United States Patent Application Publication US 2004/0123343 A1 - sequence listing, part 36

SEQ ID NO: 98912 - DNA, 3486 bp, Oryza sativa
  Clone ID: PAT_MRT4530_96775C.1
atgcccctcggtgagctccgccgcctcccttttcgcctcctccgctcgttttcgccgctccccggccgccccctcgctcgtcgggccgacgccgccatcaccgttgtcgtcgtcgtccttcccgcgtcgggatttaatacacaaaatagtctggaaatttgggctaaatttctgggcgtgacatctatggcagtgcctgaagcacacgccaatgttgttggaaactcacatggccgtaaaagaggccatggtgaaaagaaagggaaaggtaagggaagtatcatattcaagggcaagagcaagggtaaacccagaggtaaaggcaaactcaagaaggttacaggtgaatcatctggggtaaagcaggataactgctatagatgtggaggcagagggcattggtcctgtaactgccatgtccccaagcacctggttgagctctaccaacaaagcatgaatgagaaaaagagccaacatgagtcccacttcaccattgagcctgaagctcagattgaaaagcatgatgacatgcttatcaatgttaaggatggtggggacgtccgtatggacgatgattgggacaaccttcttgaaaaagatgatgacatatttggagatctgaaggaaactagatatttccacaccttaactaagaaaactggaaatattatgaccattgccggaagcaatgctcatatagtaggcaccggaagtgctactctagttctccctatgggtacccatatctttgtaaaggatgctcttttgtatcctgattcaaagcgtaccctcttaaactttaaagatatccgtgcaaacagtttccatatagaaactgagattgagcaagatgctgaatatctgctcatatcaaaaatagatggatatcaaaagcaagtggtggaaaggctcccttcatcgccatcgggtttgtactacacgtacataaaacccactaaggaatatgttgcgatgaaatccatatttagaaacccagagtcatttagagtttggcatgacagactgggtcatcctgggttgggtatgatgaggagaatcatcaacaattttgctggtcacaatgttgaaactaaagacttccctaatcctgaagattttatttgccctgcttgtgcaaaagggaagttgatcactaggccatccctcctgaagattagggatgagtcacctgttttcctggcaagaatacaaggtgacatatgtggacctatccagcctctgtcgggcccgtttaggtatttcatggtattgattgatgcttctaccaggtggagccatgtggacctattgtccacaaggaaccatgcttttccaaagctaatttcccaaatcatcaggctaaaagctagcttccctgatagctgcgtacaatccattcgaatggataatgctggtgagttcaggtcgaaggcttttgatgattattatttagccatgggcattaaggaccccaccggaagttggggatatacgttggttatgagactgtccataatcaagtatcttgagcctatgactggggatcttcatacggctcggtacgctgattgtatctttgatgaggaccatttcccaacattagggggagtaaggcatctagaagaatgccgagatgtaatatggaatgcaactgggatgcagtccttagatccacgcactagtgaagttgaactggaagttcagagaatcataaatttgcaaaatattgcaaataagttgccagatgccttcactgattacaagggagtgacaaggtcgcatatacctgcagtaaatgcgccggaaagagtagaggtaactcagaaggttactgactctgctcttaccccccatcctagaaagagggggagacctccgggtgctcgggacaaggttccgtggagacgtccgcagagacaagaacctgagccacttgttccactcaaagaatcgattgaagaagctcaacctgaagttgagaaagccccagaagaggcaactcaacctaaagttgagaaagccccggaagaggcaactcaacctgaagttgagatggtcccagaaggacaccatcctgaagatgaagaacccagtgttttacgcgtgtaccttggcactagaagatcggaacactccaactcggttgttatgggaaatcacgacgagctggaggaaataaatgaggagatttccactaactatgctgatacaggagagttacatcatagaaagaccactattgtcgacaaacactttgcttcaaagattgctgatataatggatccggatccagaaccaaagtccatggctgagtgccagaagcactcagattgggacaaatggaaagcagcaatagaggcagagttgcgctcgctttataaaagagagttgatggatgtagtgaccgcatacttgtatgggtcactagattcggaaatttatatgagggtccctgaaggactcaagattccgaatccgaaaggaaatcgcaacatgtatagtgttcgcctgcagcgatcattatacggattgaagcaatccagaaggatgtggttcaatcggttaagtaactatctcctgaagagagattacttaaacaatgatcattgtctctgtgtgtttataaaatccctgaatggattttgtatcatctcggtctatgtcgatgattttaatatcattggcaccacagaggacatcaaagaagcaatggcttatcttaagaccgagtttgagatgaaggacttggggaaaaccaagttctgcttgggcctgcagctcaagcacctccctgaaggagtgtttatgcaccagtctacctataccaagagggtccttgttaatctattagctagatatagtgcaaccccaaccagaagacattgggttggtgtcaaaactatcctcaagtaccttcgaggtactcaagatcttgggttatggttcccaaagaaccaagatccatccatggtgggatatgtggatgctggctatatgtcgaatcctcgtaatgccagatctcagactaggtttgtatttctttgtggtaatactgccatttcctggcggtttgtaaagcagaccctggttgcaacgtcaaccaaccactcagaaataattgctctatatgaggccacacgagaatatgtggggcttatgcggatgatcggtcacatccagaagtcatgtggcctaaacattgataacacccccaccatcatctatgaggataatgctacttgtgttgcacaaatacatatgggctatgtgaaaagcaatttcacaaagcatattactctcaaattcttttatccccatgagctccagaagagcggggaaataaatgtcctgcaaactaagtcatgcgaaaatctcgcagatttatttacaaagtctctgccagcatcaagttttcatagatgtgttcgtggcatcggcatgagacgacttagtgaattgcaagaatcagggggagcaaacaattaa

SEQ ID NO: 98913 - DNA, 737 bp, Oryza sativa
  Clone ID: PAT_MRT4530_96776C.1
agcaattcagagagcaccggcgtcggctatgaatcttgccgatacatgacgtctccgcggaaccttgtcccgagcacccggaggtctccccctctttctaggatgggggggtaagagcagagtcagtatccttctgggttacctctactctttccggcacatttactgcaggtatatgcgaccttgtcactcccttgtaatcagtgaaggcatctggcaacttatttgtaatattttgcaaatttatgattctctgaacttccagttcagcttcactagtgcgtggatctaaggactgcatcccagttgcattccatattatatcttggcatttttctggatgcttttctccccctaatgctgggaaatagtcctcatcaaagatacaatcagcgtaccgagccgtatgaagatccctagtcataggctcaagatacttgattatggacaaagtctcataaccaacgtatatccccaacttccggtgggtcccatagaagtacgctgtggtggtgggattgcgcagatgggaaatacttggtttttttccacgcactagcttaatgcccatggctaaataataattatcaaaagccttcgacctgaactcaccagcattatccattcgaatgaattgtacgcagctatcagggaggctagcttttagcctgatgatttgggcaattagctttggaaaagcatggttccttgtggataataggtccacatggctccac

SEQ ID NO: 98914 - DNA, 274 bp, Oryza sativa
  Clone ID: PAT_MRT4530_96777C.1
aaaaagcccaaacccctcgggttttattaaatcatcaattgaaaatttattccatttgccccccgaaatatggggaagaacgccatcccaaatcaattcctgggaggttttaacctttaacaaagggaaacatcttaaaggggaaaggggaaaaacatgacaatttaatgccgggtttgcccttgggtgaaaaccataaaaaagggcccccctcggccatgaaaaaggaacaaagggggggggcccacaaaaaaaaaacatgcttggttcgggg

SEQ ID NO: 98915 - DNA, 1071 bp, Oryza sativa
  Clone ID: PAT_MRT4530_96778C.1
atgaagcgtgggctcatagtggggaagtactacatgaacatgtcagacatagcaaagaaggaattcgccgagcttgccttggatgatagtaactacctcacttgggcattggatgttgagattaaactcgactccatgggtctcgatcatactattgtgctgcccgaagttggcactgtggagtctacgaaggccgagaaagcaaaggcattgcattttttgcgccaccatctccacccagacctgaagtctgagtatatgtttgagaaagatccactggtattgtggcaatccctgaaggatcgctttgaccagcaagggtcaattgtgctcccacaggaacaacatgactggatcaccctacgcttccaagactacaagtctgtggcggcatataactctgctctacataggatcatttctcagttgcgtttatgtggcctgaagatcactgacactgagatgatcgagaaaaccttatctacctttcatcccaacaacatagtgctgcaacaacaatacaggaactcaaagtacccgaagtactttgatcttatctcagtcctgttagttgcagaaaggcagaatgaggttcttctaaagaatcattctgctcgacccactgggtctatggcagtgcctgaagcacacgccaatgttgttggaaactcgcgtggccgtaaaagaggccatggtgagaagaaagggaaaggtaagggaagtatcatattcaagggcaagagtaagggtaaacccagaggaaaaggcgaactcaagaaggttacaggtgaatcatttggggtaaagcaggataactgcgatagatgtggaggcagagggcattggtcccgtaactaccgtgtccccaagcacctggttgagctctaccaaaaaagcatgaatgagaaaaagagccaacatgagtcccacttcaccattgagcctgaagctcagattgaaaagcatgatgacatgcttatcattgttaaggatggtggggacgtccgtatggacgatgattgggacaaccttcttgaaaaagatgatgacatatttggagacctgaagtaa

SEQ ID NO: 98916 - DNA, 274 bp, Oryza sativa
  Clone ID: PAT_MRT4530_96779C.1
tttctttcaaacggcgcttccctaattccggcaccgaatattgacctgctcgggcctcgacaccgcgccctgtacctcgcgatctgacgcgctcatcgccatcggggacctcgcgcgcgcgccgtcggcgctgggggggccaaacaacatcccagccccacagtgaggcattacagcatccccatgcataccaagaccacaaaagtgaagagatcacatcaagacctgggacctcaacagggcctgagtatctatggggtagtccaaaacctaa

SEQ ID NO: 98917 - DNA, 609 bp, Oryza sativa
  Clone ID: PAT_MRT4530_9677C.1
atgacccagagaaaacaaaacttgatatctctattgtgtctaattgatgtcaattttttattgaaaaatttattcattcatgaattcagaatgattgatagaagaacatttatagcttgtgctggtgagctgtgtcgagctgatgttctgctaaatgcatacggcaagatgctgcgtgagcaatgtgacaagcttgttcctggcattggcacgattatcaaggatcacgcgaagtatgcaaatgttatggtgatgattctgacccctcaaatgatgtgttttccagctgatgtggtacgaaagatagaggaggcagatgctgcggcagatgatgcacgggaaaaagttgattgctcactatattattccataaatcgcaaggccgataaacttgaagaactctctagacttaaagcaggagcgctccgtaaactcaagtctttggtttgtgattgttctggagggcaaaagaggagcctcacagaagtagatgatggcgttcttgggaagaagaaagtgaaggggacaccacggctcatcggtggagccaaagccaagatgaggtctctgcggcagcgagcaccgcgccactgcagatgctgctgctga

SEQ ID NO: 98918 - DNA, 359 bp, Oryza sativa
  Clone ID: PAT_MRT4530_96780C.1
caagtaggtgctgtttgatcaggccacctacgacaagatgctctccaggtgcccagaacaggcagatgactctgtgcgttttatatgagagactaaggataccggcatccctgactcgtagggccatcattgatttaatgacacggggtctagttctgatgccatcagttgcactcaaaccagcaaatcgacgccatagcaaccaacacctaagaggaaggttgaaatgcgtatttatatgccctgatgctgacggtaggcttgactactctataacaaatgttaccttcgtaaaggtggcgaatgttaagccaaatgagctacttgggataggcatgatgtcttaatgggtgagacat

SEQ ID NO: 98919 - DNA, 1467 bp, Oryza sativa
  Clone ID: PAT_MRT4530_96781C.1
ttaaatagggcaaaccgaaaggtctcgtcacaagggctgtggttattttacatggaatctcggcaaataacagtcgcccaacaacagtcttatatgtgtgcatatatcgaagcgttgatgaacgcaagctggtccggattatgttatttcttacataagacatttttactccatacttttgtttaaagaatcattcaaaggatttcatggaaaaaaaaaagttccgccaagtgccaaggatcgacattttgaactagaaatgttagatggcaccggattattttttttccacctggtgctcttacaaatggagagaatggaatgagtagaattgattgcacgacatttattacataaataaccgttgatactcggtacgtgtccggtcgtctaccaatgtcggcggtgtagcagtagacctttattgaaggttggcgtgtggctcatgatgcgattacctccatagcagccactttgaaggattcatccatcaacttaaacttgtcagctggggcggcatcgaggacagctttagctgctttcttgtaggcaagtgaagttgcagcaactttcttctcatctccttgggccatcccgagagcagcaaaggcgaacattctccgcttccacgtggcagcttcaacttcatcctttttttgctggtggggcagcagccacaacggagtcggcggcctcgttgatggcctgagctgcctcatccaagcgcttatcgacaggggcgaggagggcctttgtcgaaacatgatttcggcaataataaaaaggggtagcgcacgagacctgcataacagccactttgaaggattcatccatcaacttaaacttgtcagctggggcggcatcgaggacagctttagctgctttcttgtaggcaagtgaagttgcagcaactttcttctcatctccttgggccatcccgagagcagttatggcgaagattctccgcttccacgtggcagcttcaacttcatccttttttgctggtggggcagcagccacaacggagtcggcggcctcgttgatggcctgagctgcctcatccaagcgctttgttatgaccatattattattgtcattgttattattattaccttgttcaccctttgtttttctttgacaacacccctcgaaacgtcgttcatgctcattcgcgtacatataaatttcatatcggggttgtggaagtccagatttggatcctgcaggctcagtcaagacaagagatagcatgcactgcggaccgaacacttggcacacatgcatgcaaccaatcaattttggaccatgaagctttccggtcgatcggccacgagtccactctgccggcttgtcttcgccactgccattgctgataacaacaacgacttcaccgccggccgcctcgtctgccgccgactggtgcctccgcctacacggctggcctattatgccgccgctgttgggcat

SEQ ID NO: 98920 - DNA, 560 bp, Oryza sativa
  unsure (1)..(560): unsure at all n locations
  Clone ID: PAT_MRT4530_96782C.1
ggcgccgatgatgacgccacctacgccgtcgtctcccgtgtgctcggcttctccgccgtccctcgccgcctgcgcgccgcggacgtggcaccgccgcgccaccggcagcagatggtggcggtggcgcctgtcctggagtccgtgtctgggctgaggatctccgcctggaggagggacgtggacggtgcactggtcgtcaacggcgtgccgtcagagtgcgtggatatcgtcaaggagcgggatatcattgtccatgtcatggccggcgtcctcatggatgcagagtttgagcggtctttctcttcagaatttgacaattgatcaactaagcaaatcctatcatccctagagttgtcatgttgggttttgtgtaacaattaaatgtacattgttttttctttttaaaaagtatataaatttacaacgcataattcttgtgcttgaatgtaggtaattctgtttagagagattattaatagccagccggtgaaaatatgaaataaactgatttnttaaaaaaaaaaaaaaaaaaaaaaaaaaaaaaaaaaaaaaaaaaaaaa

SEQ ID NO: 98921 - DNA, 518 bp, Oryza sativa
  unsure (1)..(518): unsure at all n locations
  Clone ID: PAT_MRT4530_96783C.1
gacatctcttgtgtacttgtacactatttgctggtttttaggagtgagggattatctaaataaatataatttaatggctaaaaataatggattcatcagtttaagtccacatcgatggctagatttttttttcccttatatttttttgttaaattttctcctatttattagagcatcagatggcatcttacaagtgtttgtaggagtataggaatgctattactcatactcacaatctaattgtagtcaactattatttattgtgattttgtggcattctcaacttacctatncattttttttgttaatggttacccacttagtatcatccttttatctttggtgcttgatgacacatgtgcttactggatgttaattaattattaggtgcatgtgcatggatgtgtcataagcaatataacttgatgattggtagacagtggttttgtatatagaacttataacataggatttagcggggacatatgattgatatattatactccttccgtttctaa

SEQ ID NO: 98922 - DNA, 475 bp, Oryza sativa
  Clone ID: PAT_MRT4530_96784C.1
gtcactgaaaagttcccttcacttcattattgatactgcatctggtgatcaccagttcgatccttatctctcgcttctgaaagttggtggtgtaatggtgctacttagcttcccaagtgaaatcaaagttcatcctgaaaaccttaatctcgctgcgcggagcttagctggtagtgtaacagggggtacaaaggatatccaggagatgataaacttctgtgctgcaaacaatgtttacccagatatagagatgatcaagatagactacgtcaacgaggctcttcagaggctcatcaaccgggatgtgagattccgctttgtaatcgacatcgagaactctttcaagtagtatatcttcgccgtatacggtatcagaagtaacgatcgaagtttgtgacataataataaatcgaactacataatattgagacttgatcaagggacagctccagaataaaatgttccatattaagag

SEQ ID NO: 98923 - DNA, 537 bp, Oryza sativa
  Clone ID: PAT_MRT4530_96785C.1
atggatccccgagctctcctctacccgccgccaccctcgtcttcgtctctcgccgtcggaagagccctagcgtcgtgccgcttcgtgccgcagtcgtcgccgccgctccagccgtgcttcgccgtcgctccggtcgtcgtcaccgctcggggaggtcaccgtcgtggtcgccgtcgcgtcgccgtccctgtccaccgcttcgtcgccgccgaagaccgctggagcaccgccgtcaccgttgacccgaaggttgccgccgcttcttcctcgtcgccggcgccgtccgttgctcttccgccgtcgttttggtcaccggtgagttcgccgcgtcgccctctacccgttggtgtccttcgtttgcgtcgtcgcgccgtcgttcgccggcgagcatgcgttgccgagccgccgccggtgctaacgtcatcgctgacgtcatcgctgacgtcatcgttgccgttccccgtggcccggtcgtggaccgatggatctcggccgtccgttttggatagggtcgatctcggccgtccgttcccgtga

SEQ ID NO: 98924 - DNA, 282 bp, Oryza sativa
  Clone ID: PAT_MRT4530_96786C.1
ggccgccaccgtactcgtatattcctctccacccgtgtgtcgcgtcgatcgccgtcggcggcgggcggcggcaacttctggcgcatcttaggggttcggagatttcttctccgtaccccgtcgaaacatacgcattcgccgttgtggggttcgggacttgggaggtctgcgtcgtcgccgttgctggtcgacgaatcgcgtcacccatggcgcataaagggtattgggacgacctcaaggtgttcgatagaatgcccagaagactcaacatgccgctgcttc

SEQ ID NO: 98925 - DNA, 3106 bp, Oryza sativa
  Clone ID: PAT_MRT4530_96787C.1
gcacgagtgctcccgccgtcatgtctcgagccttctccgcccaaggtgcgccctcccattgcggcggcaggctgtgtggaggtttgtcctggattcatctcgtcatctcgtcccgcagccaaagcttttacttttgttgtttcctttggttggtccgggctcgatcgcgatggaggcgggctggcttgggctcgcgtccaattcgcccccaccaccgcgggtacggtacgttgttaatggtttcggagtggggagtgttgtgagcgtcttcgggaagcgctggggcgccgtgtgggatgtctctcgcccacggtgccctttattttttctatatcattattccccggagcccgccagatcgaatcctcgctccccgccggcggcgccgcggggagggagcggtctggggatggagaagccgtcgattgacgcgattctgtgtcgcgggggctccggttcggccgctgaatgccgccctgtgtgcctccgcggcgtgggttgacgttggggaagagagacgagagacaggggggtagggtcgctgcggcggccatgtcgcaaatccagagcttctcgcggcagaactgcgtgctcctcgcggtgctgtgtgggaagcacgctgagaagcgtgcccaggcgaggtcggggctggaggcgaagcggctgcggccgtcgtacccgttcccggagctcagctcgtcggggagattggaggtgcacacgctgttcaacccgacaccagagcagttcctcgaggcgcagcgcgtggttcagcccaacttcttgtacatagaggggacaacagctttaggatgagaagtcgattgactcaatcgtctgggggcaagaatcctactctaacctgcctgctgactggcgaatctaggtagtatgtatcacgacctgagatctgcagctgcttcccgattgatgtattgctatctcgtgtagctgaaatctagggggtaaactgtaagtgagtataaggagaacaagtacttaagaaaaaagaggaaacccattcctgccatgcattaatgtcagtggttcaaagttcggtgagccatacttgggatgcttttcagcttgctcatgcatcctttcgattatactgtgtaagaaacaaccatgtacaaagtgttaagcttgggcctcgtctactaggggatgctccaaagataaatataacccctcctgagaatgagatggttgaggaggaaggttcttcagatgtgtttccagctataaaaatttatgatgatgacatcaacatgaaatttcttctttgtggagttcctagcacaccggatccttgtttgttaggttcattagaagatggcctgaatgcacttctgaatattgaaattcgggggtgcaaacttcagaatcgaatcagtgcttctccaccaccacttcatgctgcatccttaccacgtggaatggttacaatgcgttgcgacatcactacgtgcagttcttctcatgtgtcacttcttgtttctggtagcgcacaaacttgttttgatgaccagcttttggaaagccacatcaaggatgagatcattgagaagagccaactagtccatgctctgccaaataatgatgataagttatcatcaagtgtgcctttcacttcaatgtccacagcttgtggggcttctacctttgaagtttggatgacccttcctaagtgggcagcacaggttctgaagcatttagcgccagacatctcatacaggagcttagtggcacttggaattggttgtataaatggcacgcctgttgcttcatttgataggcgagatgcagaccgccttcttttcttttgtacaaatcaacacaaagatttggctattgaaaatggcccatactttcatctgccaagatggtcagcatctcttaccaaggaaagagtgaaggtgggtctggaatcgaaaccaaaattgttaggtgcgaatggaattcctgaggacaagaaacgtctgatcgaagggccttcctcatcttccaaggcaaaattgaagcctgcaactatgaggcccattcctcactctagaaagcaacaaatgcatccttttatgggtttcctggaagctactgttcatgaaactagtcaggttaagccaaacttgccagctgctcccccagtgaagcataattcggtacctgctgctccagcaacacatagaaaatcaacttcagggccatctcatgctcagtcaatcattcaactgaacccactgcctctgaagaaacatggatgtgatcggttgcctattcagatgtgctctgaggaggacttcttgaaggatgtcatgcagtttttaattcagaggggtcataatcgactcgtacctcatggaggactagctgaatttcctgaggccgtccttaatgcgaagcgccttgacctatataacttgtacaaagaggtggtgtctaggggtggcttttatgtaggcaatggtataaactggaagggtcaagtcttctcgaagatgcgtaaccatactgtgacaaatagaatgaccggtgttggaaacacactgaaaagacattacgaaacatatttactggaatatgagctagctcatgatgatgtagacggggaatgctgtttgctttgccacagtagcgctcctggagattgggtgaactgtggtttgtgtggtgaatgggcacattttggttgtgacagacgacaaggcctaggcactttcaaggattatgcaaagacagatgggctggaatacatctgccctcactgtagtctagcaaactataagaagaaacctcctccccaaaaggtagctaatggctttgcgaatacagtgtctgtatcacgaaatgtttagttttcctttcttcttttttgccctgtgtttcggggagaagagcccagtagagtagagaataggcaggctgctgatagagagaggaaggtgtgtagtgttgtgatctgtattaccctattaatttggttcagcgtaggaagcttaagttttatatagaatgtaacaactgacaacacagctaagctactacggtagctggtcaaattaagttaagagcctgttgatatatgtttgcgtcgtcctgcagcccg

SEQ ID NO: 98926 - DNA, 357 bp, Oryza sativa
  Clone ID: PAT_MRT4530_96788C.1
atgagggaggcgcgcggggtcagcgaaggtgagggagaaccgaaatcggcagggatggtggccctctccctgttggtcgtggataccacctttgggactgccaccagtatcaccttcatggtgcgccggcctacaggagaagagctaaagagagagaaggagagggagatagggaagagaggggtagggattttgttgcgtctgacacgtgggtcccactgtatttcatttctttttgttgattgctcctcatgggccttcctggcaaaaacgaacaggtcgagttggaaaacacggtcggtgtacctcggaaccctgcagttgcaaatcaacagagccgtgtccatgaaagtgtag

SEQ ID NO: 98927 - DNA, 433 bp, Oryza sativa
  Clone ID: PAT_MRT4530_96789C.1
ggttccgaggtacaccgaccgtgttttccaactcgacctgttcgtttttgccaggaaggcccatgaggagcctgaaggccaaatcataccaggccggcgcaccatgaaggtgatactggtggcagtcccaaaggtggtatccacgaccaacagggagagggccaccatccctgccgatttcgataaggtgcacatcgatagggagctgcggcaatgccgcgacgaatgcaaccttgggcctccttcggcgtgcagcccgcttgacaaaccggcgacgaagaagccgacgccgcggccacaggcgatgaagccgacgccgccgcaagaagccagctccaaccgtcaattcatccacaggtctacggatctcacacctccaccgccaccaaccgccgccgccgcctaccacaccggcgcccatggagctcgctag

SEQ ID NO: 98928 - DNA, 328 bp, Oryza sativa
  unsure (1)..(328): unsure at all n locations
  Clone ID: PAT_MRT4530_9678C.1
ttgaatttttttaattaaattttacnaaaaaaagctatatttatgtgtaataatccaaaacaagcacttaatacaaggagttgcattacattcatntaaaatctctanctctttctnntacacctacccctcttatttttcaaaacggagggtgcgaacacacaatattaagaaagttttttataaaaaccnanccgatcaaccatggatccatganngattgatccacaccttanctagctcatnttttattccaaaaaacaaatatgatactactagtactggatacagaattnggctncacacatttacccaggcggaanntact

SEQ ID NO: 98929 - DNA, 339 bp, Oryza sativa
  Clone ID: PAT_MRT4530_96790C.1
atggaggggacaaggagacacttggagaaggacttagagtcatggaggatcatcgaggacgtccaagtcaaggtagaggtccaaaccaaatcgacttcgagtgcaactcggagttcaggaccagtctacactaaaacgggtgcccaggtcgcatacgtgctcggattggggcgatctttatatggatggaaagctaagattctaatgcttttattcccatgtccaaattcttttcgagtcaacgggaatcgaccgaataagttgacgtccagaatctgtcccggtgttgcgtcaccgtatttgggcctttgggccatgtatcgtgttggaggccattag

SEQ ID NO: 98930 - DNA, 2163 bp, Oryza sativa
  Clone ID: PAT_MRT4530_96791C.1
atggacgacatcgttggaatattgaagggagcagctggtcttgctgccgatgccaatgccttccgtgagttcttcaactgggccgcaccacgtgtcttggctgccgtacgttctcagcagcagcagcatctgctgcaagtggatccaggaggggtaggatcagcatcagctagagacaacagaacagctccactgcaccagattgaggatgatcttcagaatctcgagaacgacctatggctgatccaatcaactacatccacaatgtatgacctcatcgatcgtcttgaatggcatagccacaaggatacagaagactggcatcttcgccagatcaaggatgtagcgtacgatgccgaggacctccttgatgagtacaattactatgctctcaaggtgaaggtggacacgagcaagaacttggggcaagatcactcgcatgaaccctttttggagttcctgaacagtgtcaacttcagtaaagtaatgaaaatcaaaaatagactaaagcaggtttttgaccaatccaagggtttaggctttcacaaaacaccaaagaagtttgatcgattagtcagaccagagacatgccgtgtcctagacgagccagatgagatatttggtcgtgaaaaagaactgaaggagttgaagcaaaacctaggagtacgtggacgcaagagaggcagacctgtggcatgcagcactacagctgaagcaaggaggacagagttgcctgtgctgccaatagttggtatgggcggcatcgggaagaccaccatggcacaacaaatctgtgaggatagagtggtgcggaatcacttcgactgcatactctggatatgtgtctcggatgaattcgaggtaaacaggttaacaagagatgttctgaagtctcttggagtaaagtcacaagattctgatacaagggatactcttatgggcagtatgattttggtcaccactagatcttccaaagttgctaacctagtcagcaacagtgatccctatgagctcaacggactgcaaaatgatgttttctgggatttcttcaaactatgcgcattcggatccaacagctctcgcaatagcccagagctggagcacattcgtccagagttggagcgcattggtagagctatacttcccaagttgaagggttcacctttggctgccaaaactcttggacgcttgttgaaaagtaacttaagtgtagagcactgggaggacatattgagaagtgaattgtggaaattggaacaagaggagactgacattttgccagcccttcgactgagttacgtttacctaccacgacacatgaaaagatgcttctcaatatgtgccctgtatccaaaggatcataaatttgacaaggagtttttagcagacatttgggtagcacaagggaacattcagagcctatcattctttgacccactcttttctgatttagaagagtcaaacagcatttatcaccttgaggtgttggatgtccaccagtgtcctaacattgattggcaagagtacatcgacaacagccatctggcgagtgcaatgaaactcaagggacttagccttcaacttatgaggtgtccagacctcatctctattgttggtgctatatctgtctctgaaatagtgcagggtcgtatagaagattgccccaagctgatggagataacacaaccttttaaggtcatgactgatgcaaacagcacagaacatgccaaccggtcagaccggcgggcacacggtggtcagaccggcggcggcgacagggagcggcagacgatctcggcggttcgaccggagttcgatctcggtcagaccaacgttcatcaggcggagtcttctcagcaaggttatctgggagtgccagtcagggaggaacttgtcaaagtcctcaaagaccaatgtggagctatcaacagagatatgactgttgtgatcgagaggatggttcaaacctctaccgagaggttccagcgcatgctgaatgccaatcttacaacgatcaataattgtctcgacaggttggaacggcaacaatcaacaaagtaccgttttggaaatgctatttcaacaaggacggtatctcctcttgcacgctctggtacccatgaaaagctcctcgtcagtggcttctacggggcgaagaattag

SEQ ID NO: 98931 - DNA, 157 bp, Oryza sativa
  unsure (1)..(157): unsure at all n locations
  Clone ID: PAT_MRT4530_96792C.1
cagtttggtcccctcccacgttgccagccatcatttgtcatctcctccttccaaccagctagcaacataggagccattgttccggatccaatcccaaanctcctatgagccatcgaccaccattggctgcccccatcccagggtccgtggtccacag

SEQ ID NO: 98932 - DNA, 2811 bp, Oryza sativa
  Clone ID: PAT_MRT4530_96793C.1
atggacgacatcgttggaatattgaagggagcagctggtcttgctgccgatgccaatgcgttccgcgagttcttcaactgggccgcaccacgtgtctgggatgccgtacgttctcagcagcagcagcatctgctgcaagtggatccacgaggggtaggatcagcatcagctagagacaacagaatagcttcactgcaccagattgaggccgatcttcagaaactcgagaacgacctatggctgatccaatcaactacatccacaatgtatgacctaatcgatcgtcttaaatggcatagccacaaggatacagaagcctggcatcttcgccagatcaagtatgtagtgtatgatgccgaggacctccttgatgagtacaattactatgctctcaaggtgaaggtggacgcaagcaagaacttggggcaagatcactcgcatgaaacctttttggagttcttggacagtgtcaacttcagtaaagtgatggaaatccaaaatagacttaagcaggtttttgaccaatccaagggtttaggctttcacaaaacaccaaagaagtttgatcgattagtcagaccagagacatgtcgtgtcctcgacaagccagataagatatttggtcgtgaaaaagaactgaaggagttgaagcaaaagctaggagtatgtggacgcaagagaagcaggcctgtggcatgcagcactatagctgaagcaaggaggacagagttgcctgtgctgccaatagttggcatggggggcgtcgggaagacaaccatggcacaacaaatctgtgaggatggagtggtgcggaaacactttgactgcataatctggatatgtgtgtcggatgaattcgaggtaaacaggttaacaaaagatgttctgaagtctcttggtgtaaagtcacaacattctgatacaagggatactcttatggttaatttacgtgatagtgtcaacgcaaagaagtttttactcgtccttgatgacatgtgggatgatgtcttaaaagatgagagaggatggagaatatttcatagaactttaagcaatggtcttcagggaagtatgattttggtcaccactagatcttccaaagtagctaacctagtcagcaacagtgatccctatgagctcaacggactgcaaaatgatgttttctgggatttcttcaaactatgcgcattcagatccaatagttctagcaatagcccagagctggagcacattcgtccagagttggagcgcataggtaaagctatacttcccaagttgaagggttcacctttggctgccaaaactcttggacgcttgttgaaaagcaacctaagcattgagcactgggaggacatattgagaagtgaattgtggaaattggaacaagaggagactgacattctgccagcccttcggctgagttatgtttacctgccacggcacatgaaaagatgcctctcaatctgtgcgctgtatccaaaggatcatagatttgaaaaggagtttttagcagacatttgggtagcacaagggtatgtggaggctgaagatgcatcctcttgctttaatgaccttgtaaatcgatcgttctttcaaaaagcagctggccagaataatatctacgtaattcatgacttgatacatgatactgcacagctagtctccaaggatgagtgcttcatcatacaacatgtgagtgacctacctaaaatcccttcaaaggttcgccatctgtcaatattcaccaatggaaatatcagctgtacagaattagtgactatttgcacacaaaataaaaaactgcggtccctagtatgcaatgaatcttacaaaagtattaaacaatttgctcccgtgattgactgttggttcaaggaactcccgagtatccatgtattgatttttaaaatttcaacagtgagaaagttacctaagagcataggcaattcaaaacatttgcgttaccttggtttattgggaagttctactttcgagacccttccttcatctgttagttgcctatatcatgtccagactataaatgccaagggttgtgttttcaaaagatatcctaaaggtttcagtgatctgatttccttaaagaaaattgaatcaaagggcttcctatataacaaggataaagataagcaattgctagaatggtccacaaagggaataactgatgaacagttacagatgacaaaggagcagattgaattgttacctcattggaatcttgagcatttggaaatagtgtcttacctaggcgtgtctgaggcaagcagcaggcacactgttggagtattttcatccctttcaaatgtcatcattatgaattgcgatgcactgttgagtcttgatgagtttcttatgcctgcttatatgcctgtcgtgaagaccattcatgtgaaacgttgtgaacaattggcattagtgccagttgatgagctccaccgtttttctcacttggaggatctatgtattgcatactgtcccaagttgaatatgcagaggagaatgacattaccatcctctcttcagatgctcagtttagcccgttgtccaagcataaagtatatcgacaacagccatctggggagttctatgacactgaagggactcaacctgatacttattaggtgtccagacctcatctctattcttggtgctatatctgtctctgaaatagagtcgggttatatagatggttgccccaagctgatggagataaaacagcctttcaattacaagaggccacgactgatcattggcgatgtgcaggccatgaataatgatgagcgttcaagatga

SEQ ID NO: 98933 - DNA, 3231 bp, Oryza sativa
  Clone ID: PAT_MRT4530_96794C.1
atggacgacatcgttggaatattgaagggagcagctggtcttgctgccgatgccaatgccttccgtgagttcttcaactgggccgcaccacgtgtcttggctgccgtacgttctcagcagcagcagcatctgctgcaagtggatccaggaggggtaggatcagcatcagctagagacaacagaacagctccactgcaccagattgaggatgatcttcagaatctcgagaacgacctatggctgatccaatcaactacatccacaatgtatgacctcatcgatcgtcttgaatggcatagccacaaggatacagaagactggcatcttcgccagatcaaggatgtagcgtacgatgccgaggacctccttgatgagtacaattactatgctctcaaggtgaaggtggacacgagcaagaacttggggcaagatcactcgcatgaaccctttttggagttcctgaacagtgtcaacttcagtaaagtaatgaaaatcaaaaatagactaaagcaggtttttgaccaatccaagggtttaggctttcacaaaacaccaaagaagtttgatcgattagtcagaccagagacatgccgtgtcctagacgagccagatgagatatttggtcgtgaaaaagaactgaaggagttgaagcaaaagctaggagtacgtggacgcaagagaggcagacctgtggcatgcagcactacagctgaagcaaggaggacagagttgcctgtgctgccaatagttggtatgggcggcatcgggaagaccaccatggcacaacaaatctgtgaggatagagtggtgcggaatcacttcgactgcatactctggatatgtgtctcggatgaattcgaggtaaacaggttaacaagagatgttctgaagtctcttggagtaaagtcacaagattctgatacaagggatactcttatggttaatttacgtgatagtgtcaagtcaaagaagtttttactcgtccttgatgacatgtgggatgatgtcttaaaagatgagagaggatggagaacatttcatagaactttaagcaatggtcttcagggcagtatgattttggtcaccactagatcttccaaagttgctaacctagtcagcaacagtgatccctatgagctcaacggactgcaaaatgatgttttctgggatttcttcaaactatgcgcattcggatccaacagctctcgcaatagcccagagctggagcacattcgtccagagttggagcgcattggtagagctatacttcccaagttgaagggttcacctttggctgccaaaactcttggacgcttgttgaaaagtaacttaagtgtagagcactgggaggacatattgagaagtgaattgtggaaattggaacaagaggagactgacattttgccagcccttcgactgagttacgtttacctaccacgacacatgaaaagatgcttctcaatatgtgccctgtatccaaaggatcataaatttgacaaggagtttttagcagacatttgggtagcacaagggtatgtggaggctgaagatgcatcatcttgctttaatgaccttgtaaatcggtcattctttcagaaagcagctggctatagtgatatgtacgtaattcatgacttgatacatgatactgcacagctagtctccaaggatgagtgcttcatcatacaacatgtgagtgacctagctaaaatcccatcaaaggttcgccatctgtcaatattcaccaagggaaatatcagctgtacagaaatagtgactatttgcacacaaaataaaaaactgcggtccctaatatgcaatgaatcttaccgaagtattaaacaattcgctcccgtgattgattgttggttcaaggaactcccgagtatccgtgtattgatttttaaattttcaacggtgagaaagttacctgagagcataggcaactcaaaacatttgcgttaccttggtttattgggaagttctactttcgagacccttccttcatctgttagttgcctgtatcatgtccagactataaatgccaagggttgtgttttcaaaagataccctcaaggtttcagtgatctgatttccttaaacaaaattgaatcaaagggcttccaatttaacaaggttaaagataagcaattcctagaatggtccacaacggaaatagctgatgaacaattacagatgacagaggagcagattgaattgttacctcattggaatcttgagcatttgataataaagaattacctaggtcaatcttgccccagctggctccagccagactgcctgaaagtgctgacttcacttgaactttatgggtgcaggaacattcagagcctatcattctttgacccactcttttctgatttagaagagtcaaacagcatttatcaccttgaggtgttggatgtccaccagtgtcctaacattgattggcaaggtttggtggctttaccctcttctcttagaagggttacccttggcaactttggccattcgacagatcactttgtgagttgctttcgtggcctctccctcctgacacatctggaaatacattgctggttcttaacatctattcccctgcaagtttggatgagtaatcttccatccttggagaatttgcgtattgataattgtggctccctcacatccatctgtgtctctgaggcaagcaacatacacactgttggagtattttcatccctttcaacagtcaccatttcgttttgcaatgcactgttgagtcttgatgagttctttatgcccgcttatatgcctttcgtgaagaccattgatgtgttattttgcaaggaattagcattactgccagttcatgagctccaccttttttctcgcttggagaagctatgtattagaaactgtcccaagttgaatatgcagaggagaatgacattaccatcctctcttcggatgctcagcttattactttgtccaagcatagagtacatcgacaacagccatctggcgagtgcaatgaaactcaagggacttagccttcaacttatgaggtgtccagacctcatctctattgttggtgctatatctgtctctgaaatagtgcagggtcgtatagaagattgccccaagctgatggagataacacaaccttttaaggtcatgactgagagccaaaagaaagtgcagcctgatcagaccatgggtaggctaggagatgagaatctcaagaactga

SEQ ID NO: 98934 - DNA, 124 bp, Oryza sativa
  Clone ID: PAT_MRT4530_96795C.1
gtcgggcccaactaaatctaggcctgctgttcgggcctcaacaatattccggtccaatttactctggggcgtcactctggcgcaggacaccaacaattggtcatataccacggagtactactag

SEQ ID NO: 98935 - DNA, 252 bp, Oryza sativa
  Clone ID: PAT_MRT4530_96796C.1
actcggtacggggaaagctgtcgcccagccgtaccggtacccgagttaaaggataatactaaacctgcttggtctccaggaaacgacgagtacggagagggttttgttgactcaagtgatcaagatcaatatgatgtttgtgataaaaatgatgacaaatacagatactgatgcttagtaagatgataacatggacctggacttagcgatacagggtgatgtttatgtaagtgggcttagttgcaatcgatg

SEQ ID NO: 98936 - DNA, 2157 bp, Oryza sativa
  Clone ID: PAT_MRT4530_96797C.1
gtgtctggtgacagcaaccgagagataaatgcaatacctgcggagaacctatacaggagattcacatgagctcaaagattctgtcgtggacgataaggatcctagacatctgactgaagggagcttgccagacaaagctgcatcaaattttaagaatggaatcaaaccttcagccagcagtaagcaaaagcaacaaaatgacagccagagtgaaatcagtgatcatacaacaggagcatctatcttctatgagaaagccaagaagcatttagcagatatgctaaagaacactagtcaatctgccagctatccgacagcccaagtatcaaaatctttggaaggaatgctttctcaacctcattacaacgtgtcacctcctaggagtgaccataggggaaaatgccacaatgccttctcacctgaagagccagaagtttgtcttgtaaaagctgttgatgtagaagaaccagcccaagagagaagccaactgcatgataactcagagagcaatgcatatagtactagtgtagcagttgatgatcaggtggcggttctagaagaatgtggcatcaaagaagacacccaagaaggtatcatatatgctactgatgaggtagacaccgtgcctgttgaaggagttggcaaattggattgttccaaaacaatttgcaacatacagtgcatcccagcagaacaatacacagacagccccttgccagaaatattagaaggaacttgaggaataagaacctgttcaaatgttcatgagctctcctgagagcatggttgaaaatttggagcaacaagatccaaaaacacctgaaccaaaatcatcaccaaaattaccagatggttgtcctgagcaaagcaatgagaagaaagaacagccaagtcctgtatcggttcttgattcattcgatgaagatgacagctctcctgaatgcaaaacaatgaaaaaatgtaagtccaattaatacaattgtttgcaagaacaatggtttaaattagtttatcttctttccctgcacagataaaaaatattatgtactctagtatctgtattactcaccattttatgacatacagatgagctgcacgaagtttcctgtgggaccctgtacttcccagataatgaatcaggtgtaaaggtcttttgggaggataagaatgccaggttagattatataatgctggtgctagagctctcagaattatgtgcagagcaaaaatttagaggtgtggtatctagaggatgaattaatcagcccttgcatgttcgaagaactacagaatcaaggggaccgaatagatgatatgaagattttgtttgattgaatctctgttagtgcttcacagatgcaatcaaacagagattcaagagagatattttagactctcttcttggttatcttttgtcaaacatgacatacggacacctccggtaggagaaaaactcatctcagaagttgacaaatatgttgatggttatctcaagtgtagtttcccaagtacattgggaacagataattaaaagggatttggaggttcaggcatggatggacattagatcaaagacagaaggaattgtcgtggagatatgggagtttgtgttagatgaattgatagatgaggcggtttttgatttgtggatttgaagttctgatcagatcccttatcagtgttgctttgtgacgagtataggcagtatgtagatgaactgtagaggttttgattttgatgctgacaataacccattttatgcggaagaataacaagggcactatgttctggcggcccaaggaaagtatcatgtgattggggagacatttactggtccaaatgtctgactggagtggacagtttcttgtgaatgacagctgaagttacaatgctgtgaatatctgacttgttcagtttgtttggatgaaattggccagtctgtaacagccatgcctctaggcacccaggcatacagcagtccgaatttttctcttgtccattgtgtgcatgtttgtgaaccttaccccgatacgcttgtcaacaaaaagggctagatcacttcaatgtacatgtttgtatttgtaagtacatgtgtaaaaggctttctaaacaaatcacacaatatacatttcccctgaaaaaaaaaaaaaaaaaaaa

SEQ ID NO: 98937 - DNA, 4545 bp, Oryza sativa
  Clone ID: PAT_MRT4530_96798C.1
atggcgaagacgaagcccatggcggctgccgccgccgccgccgcggcggacaagaagaaggggaagggcaagaagaagaagcaggggaagaacggcccggctgcggtcgcgatgaaggcccgcggcgccgcggcggcggcggcggcggcggcggcgtcggggagcaacaaccccttcgaggccatctggtcccgccgcaagttcgacgtgctgggcaagaagcgcaagggggaggagcgccgcatcggccgcgcccgctctgaggccatccacaagagggagaacactctgctcaaggagttcgagcagagcgccaagtcgtccgtgttccaggaccggcggatcggggagagggacgagacgctgcccgagttcgacaaagttatcctccgccagcagcgtgagcacatggcaaagctgaaacgagaaagcaaatacaatctatctgatgatgaggaagatgaggttgatgttcacctgcctcactctctctcgggaaaagatgattttgatgaagaagtgcctcttgatgattatagtgatgaagaaggtcacatgatcctctcgaagaaccgcatacctctccaaagtggtgatgttccttcagaaattggtcttcctgaaggaactaatgttcacaagagcaagaaggaagttatgtcagagatcattttaaagagcaaattttacaaggcccaaaaggccaaggagagggaagaggatgaacatcttgtagacaagttggatagtgactttgcaatgttagcccagacacaggcgatgttgtccttgactcgatcagctagaatggatgcaaataaatataattcaagtacagtccagaaagattcatttggtttgactgccaaggagatttttaataaggaaaaaccagatgcatatgataaattagtgaaagaaatggttatggatcaacgtgctcgtccatcagacaggacaaaaacaccagaagaaatagctcaggaggaaaaagaacgtcttgagaagttggagaaagagcgtcagaaacgaatgcttggaactgctgagtcctctgatgaagatgatgatgatgacgaggagggtgaccgcagcacgaagctagacagctcaaaacctatatctggtgatgatcttggtgattccttttctactgatgagccagcaagaaaggaaaagggctgggtcgatgaaatttatgaaagagagggtaaaaagattggtgaagatgcaccacgcgtccgcggacgcgtgggcgcgcttccgccgctgcagccgatacgggagattggatcggaagcttctagaagtttccgtgggcgatggcgatccgcgcgaggtcctcctcctacgccgccgcggcggtcgcgctggcgctcgcgctggcgtccgtcgccgctgtcgccggcgaggtcttcttccaggagaagttcgaagatggatgggaaagtcggtgggtcaagtcagaatggaagaaggatgagaacatggctggtgaatggaaccacacatctgggaagtggaatggagatcctgaggacaaaggtatccaaacctctgaggactacaggttctacgctatttcagcggagtacccagaattcagcaacaaggataaaaccctggtgctgcagttctctgtaaagcatgagcaaaagcttgactgtggtggtggatatgtcaagttgcttggtggtgatgttgaccagaagaaatttggtggggacacaccgtacagcattatgtttggaccagacatctgtgggtacagcaccaagaaggtccatactatctttactaagaatgacaagaaccatttgatcaagaaggatgtcccctgcgagactgatcagctgtcccatgtgtacactttgatcatccatcctgatgctacatacaccatacttattgacaatgttgagaagcaatctggcagcatctacgagcactgggatattctgcctccgaagcaaatcaaggacccagaagctaagaagccagaggactgggatgacaaggagtacattcctgaccctgaggacaagaagcctgagggatacgatgatattcccaaggaaatccctgaccctgatgctaagaagcctgaggactgggatgatgaggaagatggtgagtggactgcaccaaccattcctaaccctgagtacaagggaccatggaagcaaaagaaaatcaagaaccctaactaccaaggcaaatggaaggcaccgatgatcgacaacccagacttcaaggatgatccatacatctatgcttttgacagcctgaagtacattggcattgagttgtggcaggtcaaatcaggtactctgtttgacaacttccttattactgacgaccctgagttggccaagacattcgcagaggagacatggggcaagcacaaggatgctgagaaggctgcttttgacgaggcagagaaaaagaaggaagaggaggaagctgccaaggccggtgaggacgatgatgatttggatgacgaggatgctgaggatgaggacaaggccgatgagaaggctgactctgatgcagaggatggcaaggattctgatgatgagaagcatgatgagctctaagatggtgaggatgaagaatggaggccgccttcgcgacgatgccaggatttgctagttctcccattgttatgaagttccctttttcgtgatcagaaacttgacaagaaagtactctgtagatgagcattgctgaggaactttaatttggtctttgtagctctctctgtagtgtcatttttcccaccacaagaaaaagaactgataacttattgaacaagagaaatcttttgcacaaaaaaaaaaaatcctgctgtgattgtataagttttctatggtgttctcctgcagtactttgcagtattagctactcagagtccagtgagattcaaactaattgacacccttgttaagcctttaattgagatgagtggggagactccatattttgctgccatctgtgcgaggcagcgacttatccacacacgtactcgtctatgtgaagatataaaggtttcaggaaagagctgctggccaagtttgaaaacattacttcttctgcggttatggtctcttatatttccctgctctgacttccgccatgtggtagcaactccaatgcttttgcttatgtgtgaatatttgatgcgatgccccatacaatctggtcgagatgtagccgttggttctttcttgtgttccatggtgcttgtggctactaaagagtctaagaaattctgccctgaagctgtcgtttttctgcaatctcttttggtaacatctctgggaggaaacctgggatctgacctacgaaaaaagatcaatgatcaatttttggagctcaagacaatggaaccatggcttcatatccatgaaaaagtgcacgaggtgaatccagcgaatatcctggaagtcatatgcatggattctgatgctccttatttctcctctgataatttcaaggctagtgtacttctatctgtggctgaatgtttaaggggatttgttattatacacgaagaactatgttcgttccccgaaattttcctgccaatctcttctttgatgcaagaaattatggataaatcagacttgcctggattgttacaatacattttacatgaagtcattgagttgattaaaaacagaagtgatgaagtccatgcatcaaggcagccactccaaatgcgaaagcagaagcctgaaccaatcaggcagttgaatccgaaatttgaagagaattacattaaaggccttgattatgaccctgatcgggaaagggcacaaatgaagaaaatgaagaaacgccttaagagtgagaagaagggtgcaatgcgcgaactgcgtaaagataattatttcctgtctgctgtgaaagagaaggagaggataaaacaagagcaagagagagctgaaaagtatggaaaagccatggctttccttcaggagcaggaacatgcttttaaatctggacagctagggaagggcagaaaaaggaggcggtaacattttctccatatttagtgtgtgtaaatatattgattatattccccatgctgttcagttcaccatctttcttgggtactggagatttagacacagcgaatggcctttgcatgctccattttaactgcctgttgtaacttctagcttgtggacacaccgaaatacaaaagtagatggtcagaactcccttgttagcaatatggagatggagcgtcacttgcatgaaagctacttggaagaatgtttttgcaatctccccaacaaagcaccaacatggcaatggtttttttatttctcttgtatcgggaaatggattgctctactgtgttatactcctgcaatagcaattttgatgtatcacagccaagagtttttgatgtgttccctttcctttttgcactcgtcagatgtactggaatgtaaaccaatgaaatccttaatgtaacattacttccattttatagccattccttgccatgttgttcaaaaaaaaaaaaaaaaaaaa

SEQ ID NO: 98938 - DNA, 230 bp, Oryza sativa
  unsure (1)..(230): unsure at all n locations
  Clone ID: PAT_MRT4530_96799C.1
gcggggaaaagttaaaacctccaatttgggatttaaaaactaaattggggcccccacgggccccaaaaaaagcccggggggggggggggcaaccatttttaaaaacccccgagccccaaaaaaggccagttatttcaggaaagcaaaanaccgggggtagaaaggaattccccgccggacggaaaaaaaattgtggggccaaaaacccggggggttaacgacgctggggg

SEQ ID NO: 98939 - DNA, 195 bp, Oryza sativa
  Clone ID: PAT_MRT4530_9679C.1
gttgtttcaactgactatgaggatctcggtaggggggatattgtgtgccatccttgacactcacatcatggttgactctattggttgagttactagcaactagactggaaacatgctttcctacgatagaaaaatacatcggcggacgacaagtgttgaagtagctaggctagacatgaaaatggagtccatgta

SEQ ID NO: 98940 - DNA, 574 bp, Oryza sativa
  Clone ID: PAT_MRT4530_967C.1
gacaaactggcattgtattttgaggcttctgggggaatttcatacgaacctgctttcaaagtcgaacttacaggcagtgaaataggaaaacaagttaaaactacttcaactggtccttttggtgcaccattgtttgacaaaggcatcgaatttgaactaccagaacctttggttttggagtttcctgagatgaccagctcaacaaggcgcaatatgtggcttaccctgataagggaagtaatattccttcaccgattcatatcaatgtacagcatagactcccccattcacaaatgggaggtgcattcgagaatcatattgggggtgataaggcttcatgctgcaagagagatgctaaggatgtcgccaccgcctccttctagcttcctagtattctcgctttacgatgagcttcctaaaggtgattttgtgcttgaacaactagcaaataatctgaaagagacgttaacgataactcccctcagtgcatcccatgtgttcaagggtttgagcaagtcgcatcgggtagctttaagtgcggagatagcaaaagagcatgacaaggactcaaata

SEQ ID NO: 98941 - DNA, 2931 bp, Oryza sativa
  Clone ID: PAT_MRT4530_96800C.1
atggcgaagacgaagcccatggcggctgccgccgccgccgccgcggcggacaagaagaaggggaagggcaagaagaagaagcaggggaagaacggcccggctgcggtcgcgatgaaggcccgcggcgccgcggcggcggcggcggcggcggcggcgtcggggagcaacaaccccttcgaggccatctggtcccgccgcaagttcgacgtgctgggcaagaagcgcaagggggaggagcgccgcatcggccgcgcccgctctgaggccatccacaagagggagaacactctgctcaaggagttcgagcagagcgccaagtcgtccgtgttccaggaccggcggatcggggagagggacgagacgctgcccgagttcgacaaagttatcctccgccagcagcgtgagcacatggcaaagctgaaacgagaaagcaaatacaatctatctgatgatgaggaagatgaggttgatgttcacctgcctcactctctctcgggaaaagatgattttgatgaagaagtgcctcttgatgattatagtgatgaagaaggtcacatgatcctctcgaagaaccgcatacctctccaaagtggtgatgttccttcagaaattggtcttcctgaaggaactaatgttcacaagagcaagaaggaagttatgtcagagatcattttaaagagcaaattttacaaggcccaaaaggccaaggagagggaagaggatgaacatcttgtagacaagttggatagtgactttgcaatgttagcccagacacaggcgatgttgtccttgactcgatcagctagaatggatgcaaataaatataattcaagtacagtccagaaagattcatttggtttgactgccaaggagatttttaataagctgttaatatactttttaaatgtttcgttcaccttaaggacctggatatgtctgatcagtatttgttgccaggaaaaaccagatgcatatgataaattagtgaaagaaatggttatggatcaacgtgctcgtccatcagacaggacaaaaacaccagaagaaatagctcaggaggaaaaagaacgtcttgagaagttggagaaagagcgtcagaaacgaatgcttggaactgctgagtcctctgatgaagatgatgatgatgacgaggagggtgaccgcagcacgaagctagacagctcaaaacctatatctggtgatgatcttggtgattccttttctactgatgagccagcaagaaaggaaaagggctgggtcgatgaaatttatgaaagagagggtaaaaagattggtgaagatgctgaagggtcagacaatgaagaatctgatgatgatggtgatgacgatgatgatgatgctgaggatggtgatgatgatgctgaggatgaagatgaagaagaggatttaagtgataatgactttggtaatatgtctgctagagactgggagcaaagtgacgatgatgaggttaccgtggaagaagatgaaatggaaggtctcaaacaaaaggaacagaagatcagtggcaaagtggtgaaaaaagatctacaaaattcaaagaaagagtctaatgcagaatcgcaagtcaaggatgacaatcttccttttgtgatagaagcaccaagtaacttgaaagatctatgctccttgctagatggttggtcagaaactgaaataattgagattattagtcgaattcgtacatgcaattcaataaggcttgcagctgaaaatagaaagaagatgcaagttttctatggtgttctcctgcagtactttgcagtattagctactcagagtccagtgagattcaaactaattgacacccttgttaagcctttaattgagatgagtggggagactccatattttgctgccatctgtgcgaggcagcgacttatccacacacgtactcgtctatgtgaagatataaaggtttcaggaaagagctgctggccaagtttgaaaacattacttcttctgcggttatggtctcttatatttccctgctctgacttccgccatgtggtagcaactccaatgcttttgcttatgtgtgaatatttgatgcgatgccccatacaatctggtcgagatgtagccgttggttctttcttgtgttccatggtgcttgtggctactaaagagtctaagaaattctgccctgaagctgtcgtttttctgcaatctcttttggtaacatctctgggaggaaacctgggatctgacctacgaaaaaagatcaatgatcaatttttggagctcaagacaatggaaccatggcttcatatccatgaaaaagtgcacgaggtgaatccagcgaatatcctggaagtcatatgcatggattctgatgctccttatttctcctctgataatttcaaggctagtgtacttctatctgtggctgaatgtttaaggggatttgttattatacacgaagaactatgttcgttccccgaaattttcctgccaatctcttctttgatgcaagaaattatggataaatcagacttgcctggattgttacaatacattttacatgaagtcattgagttgattaaaaacagaagtgatgaagtccatgcatcaaggcagccactccaaatgcgaaagcagaagcctgaaccaatcaggcagttgaatccgaaatttgaagagaattacattaaaggccttgattatgaccctgatcgggaaagggcacaaatgaagaaaatgaagaaacgccttaagagtgagaagaagggtgcaatgcgcgaactgcgtaaagataattatttcctgtctgctgtgaaagagaaggagaggataaaacaagagcaagagagagctgaaaagtatggaaaagccatggctttccttcaggagcaggaacatgcttttaaatctggacagctagggaagggcagaaaaaggaggcggtaa

SEQ ID NO: 98942 - DNA, 189 bp, Oryza sativa
  Clone ID: PAT_MRT4530_96801C.1
atggacatctctagggcaaatgaagactacacgagctacggcccggtagtcgagatgtcatggcacagggccggtgtcctgctgctaggggctcaaccttggttacctgtctcgggaatcccggccgttgccagggttgggtcggccttgggttatggcaggttcatgcgggttcacggccttgattaa

SEQ ID NO: 98943 - DNA, 399 bp, Oryza sativa
  Clone ID: PAT_MRT4530_96802C.1
cgcaacttctcgcctccgcgagagatggatccgacgccggcggctccaccgccgcgccgctgccaccggcatcaaccgcaggcgcgtcggcggcgtcggcgacggtggcggaggaaggcgggggcaagcaggtgatggtggtccttgtgggtccccccggcagcggcaagtccaccttcgccgaggccgtcctaggcggctccgccgccggccgcacctgggctcgcgtctgccaggatacaattggaaatggcaaagctgggacgaaaatccagtgcttgaaggctgcagcagatgctctgaaggagggcaagagtgttctccttgaccgttgcaacttggaacgtgaacagcgcgctgactttatgaagcttggcagccatgtacatgtggatgtgc

SEQ ID NO: 98944 - DNA, 1564 bp, Oryza sativa
  Clone ID: PAT_MRT4530_96803C.1
gatcggaagcttctagaagtttcgtgggcgatggcgatccgcgcgaggtcctcctcctacgccgccgcggcggtcgcgctggcgctcgcgctggcgtccgtcgccgctgtcgccggcgaggtcttcttccaggagaagttcgaagatggatgggaaagtcggtgggtcaagtcagaatggaagaaggatgagaacatggctggtgaatggaaccacacatctgggaagtggaatggagatcctgaggacaaaggtatccaaacctctgaggactacaggttctacgctatttcagcggagtacccagaattcagcaacaaggataaaaccctggtgctgcagttctctgtaaagcatgagcaaaagcttgactgtggtggtggatatgtcaagttgcttggtggtgatgttgaccagaagaaatttggtggggacacaccgtacagcattatgtttggaccagacatctgtgggtacagcaccaagaaggtccatactatctttactaagaatgacaagaaccatttgatcaagaaggatgtcccctgcgagactgatcagctgtcccatgtgtacactttgatcatccatcctgatgctacatacagcatacttattgacaatgttgagaagcaatctggcagcatctacgagcactgggatattctgcctccgaagcaaatcaaggacccagaagctaagaagccagaggactgggatgacaaggagtacattcctgaccctgaggacaagaagcctgagggatacgatgatattcccaaggaaatccctgaccctgatgctaagaagcctgaggctggggctgatgaggaagatggtgagtggactgcaccaaccatccgtaaccctgagtacaagggaccatggaagcaaaagaaaatcaagaaccctaactaccagggcaaatggaagccgccgatgatcgccaccccagacttccaagatgatccttacatctacgcctttgacagcctgaagtccattggaattgagttgtggcaggtcaaatcagggactctgtttgacaacattctgattactgacgatgctgctttggccaagacattcgcagaggagacatgggccaagcacaaggatgctgagaaggctgcttttgacgaggcagagaaaaagaaggaagaggaggaagctgccaaggccggtgaggacgatgatgatttggatgacgaggatgctgaggatgaggacaaggccgatgagaaggctgactctgatgcagaggatggcaaggattctgatgatgagaagcatgatgagctctaagatggtgaggatgaagaatggaggccgccttcgcgacgatgccaggatttgctagttctcccattgttatgaagttccctttttcgtgatcagaaacttgacaagaaagtactctgtagatgagcattgctgaggaactttaatttggtctttgtagcgtctctctgtagtgtcatttttcccaccacaagaaaaagaactgataacttattgaacaagagaaaaaaaaaaaaaaaaaaaaaaaaaaaaacccgcggcc

SEQ ID NO: 98945 - DNA, 865 bp, Oryza sativa
  Clone ID: PAT_MRT4530_96804C.1
tcatgtatcagggttagcctcagtacacgcctcattgttctctgggagatgtgagtcaacatggtcctcctgagtagcatctgggaaaataggtgagtccagatagagaccggtttcagggtctgcccctccatctaaaagagctgctatatcaggaaactcgcttgtaaaaagatctatggacggagtgcctatatcatcgggtgcacgtggaatagccaacccttcactgtaggggtcagtatgagtcgtggctgacgaattgagtacagtctcactacgaggagataatgccaatgactcctcagctcgagtgctcttcttctggtgctcaggaggggtcaagatggactcggctagtttttgttgttgagtaggtgtgcccttgctaactcctagatccacctgaccgccttagcttggcggagtgtcgggcgccgcccgccgtggcaatggcctccccctccacggtagcacggtccagctcccgccgccgattgccgtctcgccgcgccgccacccgggaatcatggtggctctgccactggtggtgtatattatcaagggcacaatataaaaatgccatgcttgtaatgccaatagctcgattgctgccctgagcaatttccactgccatagtaataacttcgggacgaataaatttcgcctccttacgagctactatttttactctacgaccgcattgaggcctctccgaattgccgtatcttatagggttttgcttgaaattggtggcattgtgctcctcttcgtgagtcatcttgatctccaagtagaactcggagatctcaaatcctgcacgatatggtatagtcataaccttttccgagtagtactgtgccat

SEQ ID NO: 98946 - DNA, 571 bp, Oryza sativa
  Clone ID: PAT_MRT4530_96805C.1
gcacgaggggcggacaaggacgcgcgcgcgggctgtcgctgctgtgctgcgctgcgccgcgtggctcggccacaccccggcgctccgcgagctcggccactgcctccaggacggctacggcgcccgccgcgacgcccccgccggccgtcgcctgctgctccacgccgacgcccgcgagcacctctcctggaagaagcacaaccacggacaccacgacggcagcgccgccgaggacgcggtgagccggttcatggccgcgtggtgggactcgcaccgcgccaaggcggcggcgcgggggtgcctccctggcgaacacggggacaggtagcacgactgtagctaggacctgcggctgtgctcgcacgcccggtgcgggcggagggagacccggcagcacgagttccgggcgtgctcggtgtgcggcgccgccagctactgctcgcgcgcgtgccaggcgctcgactggaagcgcgcccaccgcgcccagtgcgccgccgcgcgctggctcgccgcggccgccgccgccgacggcgtcgcgcactgagcgcgacacgtcgcgcatccatgtaca

SEQ ID NO: 98947 - DNA, 251 bp, Oryza sativa
  Clone ID: PAT_MRT4530_96806C.1
ggatctattaagaacaatcagaaccccggggacatactgaatgccctcattccaaacattatatcaattctaatgacaactaagaaacgctctaattccaatctttacacattaagcttacaataatatgacatgctatgcctgtactgtatcttcaataataaccagcatggggaaaacgcgtatttcatgtgacctaataatgtgcttaaaatacaagatgatggcgataagatgctaattaactaata

SEQ ID NO: 98948 - DNA, 633 bp, Oryza sativa
  Clone ID: PAT_MRT4530_96807C.1
aaagggaaaaaaaaaaatggcattaaacagtagcagctttacttgtctacaaaattcttgagtgtttcagtcatcgatggaaccttttctgggtacaaaaaattgtatcctacatctatctttgatgagtcacacaccagtcgtcagcacgtaaacaatattgctactgaaaaacagaaacagaggggatgaaaaacggggaaaatccaagatgctagtacaaaaacaacctgaagctggttgggtaatcccatattatctgcccaagattctacaaactgggtgtatcttgccgagggtgctttctccgccgcctcagcatatgaatgcaacccccagccattaaaaggccacaggccgcaaatcctaaaatggttgaatttgcaatgttttgatggtatgaaccctgcattaggaaaatgaaaatagcagcatttgccagtcccagagaaaagctcatcatgcccccacgtagttcatttggcaggtacattgttctcaatcgggctaatgaaggaagaataaagcctacacatgcatggaagatgcagaacagtatcaccaatgtcccaatatcctggtaatcataagccacaattgataaaagcgatccccacagtaacatatgctatc

SEQ ID NO: 98949 - DNA, 697 bp, Oryza sativa
  Clone ID: PAT_MRT4530_96808C.1
acatctctgggcagatcgagataaatgtttggtcacaagatacacaatcctggaagcaggtttatgcccaaccagctgatccctgcacggcgtatgctacttgtggacctttcacaatctgcaatggcattgcacatccattctgtgactactttgggatggcagcatttgtaggaaggaactttagccgagttttgactacattcagaggcacagtaggatatcttgctccagagtggattagtggagttgctattacaccaaaagttgatgtttatagcttcggtatggtacttttggaaatcttatcaggaagaaggaattcatataaagttcatactgatgacaatagtgatcaagttgcctttttccctgtgcaagccattagcaagcttcatgagggagatgtccagagtttggtagacccgcagttaaatggtgacttcagtctagtagaggttgaaagagtttgcaaagttgcatgttggtgcatccaagagaatgagattgatcggccaacaatgaatgaagtggtccgggttcttgagggtttacaggagcttgatatgcctccaatgccacggctacttgcagctttagcagaatgcactgttgtggctcactgtgatgatgattcataagtacttcctagttgatgttaataatatttgtcttagaaaaaaaaaaaaaaaaaaaa

SEQ ID NO: 98950 - DNA, 825 bp, Oryza sativa
  Clone ID: PAT_MRT4530_96809C.1
acgcggtggggcgtctaaactagtggatccccgggctgcaggcttcactcacttccctcctccttatccacgaaatcaggaggcgcggcgagggcggcgctcacagccggcggcgggcggcgggcggccgcgtcgtcccttctccttccacgcacctggcgcggcgagggcggcgctcacagcgggcggcgggcggccgcgtcgtccctcctccttccacgcaccgcaacctcgggcaggttggcgcatgtcgagtgcggcggtgaatggattggctggtgccggtggtggcatcatcgcccagatcatcacctaccccctccagactgtgaacacccggcagcagacagagaggtcagcaaaaaagaagaaggccaatggcgcagccatcgccaatacttccaccctcttccagatgctccagctgttccaaacagaaggatggggagggttgtatagcggccttaaaccctctcttattggcaccgctgcttcacagggaatctattactacttttaccagattctcaaaaacaaggtggaagatctagcagttgctcgcggtaagaagggtctaggggatggtactgttgggatgttctcctggcttggtattgcagctgttgctgggtcaatcaatgttcttcttaccaatccaatatgggttctcatcgactcgtatgcagacacatacacaagcagaaaagaagatcatggagtctaaaaaggagcttttgctgaaggatgttgctagggccaattcaatagaggtctcaattcttaacgacaggttgtataaacttgattctgaaaagcctcgtacat

SEQ ID NO: 98951 - DNA, 3951 bp, Oryza sativa
  Clone ID: PAT_MRT4530_9680C.1
atggtgaacactcgcagcaatgggaatggtcccaacaaccccaataacaacaatggagagaatcctactctggcccaagttcttgctcaacagacacagcttatgaacatgatgatgcagcaatttcagaatcagcaaaaccagggaataatcatgcacctccccaaaacaaagaagaagttggatttacttcagtgtactgatcaggagaaggtttcatttgcatcacatcagttgcatggccctgcctctgaatggtgggatcacttccgccttaacaggactactgctgaacctatcacttggcttgaattcaccgctgctttccggaagacgcatataccatcgggagtagtgtctctcaagaagaaggagttcaggtcgcttactcagggatctcgctctgttacggagtatctgcacgagttcaatcgtcttgctcgttatgctccagaagatgtgcgcaatgatgaagagcgccaggagaagtttttgggaggacttaatgatgagctttcttacccactcatggttggagattaccctgatttccagaaattagtggataaggctattcgtcaggaggacaagtacaatcgcatggagcagaagaaacgtcggattgctcaattcaagacacaacaggggaataatcagaagccgcgtcttactttaggaccccagtccatgccacagggaggttcttcgtctgttgttcgtccgcaacgtcagttcttcaacaacaatgctggcaacaacatccgtaatcaagctccacgtcctgttgcagctccagcacagcaacaacctgccaagagggagcaaggcagcaagcccgtggtgtgtttcaactgtggagatccaggacattatgctgacaagtgtccgaagccccgacgcgtgaaggttgtccctacccagaataactctgctgtaccagcatccaaggctcgtgtaaatcatgtcgctgctgcagaagctcaagatgctccagatgtgattttggggatggactggttagccagacataaaggtgtgatagactgtgccaacagaaaagtaactctcaacagctatgatggtcgagttgtaactgttcatgcattgtcatctgagtctttaaggtcaagactgaaccagataactttggaagagattcctatagtccgggagtatcctgatgtgttcccagatgatttacctggtatgccgcctaaaagggatatagagttcagaatagatttggtacctggaacaactccgatccataagagaccttatcgaatggcagccaatgagttggcagaagttaagaggcaagtagatgatttgctacagaaaggatacattagaccgagttcatcaccatggggagctccggtgccactgtttttttccaagatagatcttcgatcagggtatcatcagttgagaatcaaagaggaagatatacctaagacagcttttaccactaggtatgggttgttcgaatgtactgttatgtcttttggacttaccaatgcccctgctttcttcatgaacttgatgaataaggtgtttatggaatacttagacaagttcgtggtggtctttattgatgatattcttatctactctcgaaccaaagaagagcatgaggaacatcttcgccttgcattggagaagctacgagaacatcaactgtatgctaagtttagcaagtgtgaattttggttgtctgaagtgaaattccttggtcacgtcatctcagcaggaggagttgccgtcgatcctagtaatgtggaatccgtaaccaattggaagcaaccaaagacagtttcagagattcgcagtttcctaggccttgccggatattatcggaggtttatagagaatttttccaagattgctaagcccatgacacgactgcttcagaaagatgtgaagtacaagtggtcggaagaatgtgagcagagttttcaagagttgaagaatcgcttagtatcagctcctattttgactttgcctgatccaaagaagggtttccaagtgtattgcgatgcatccaaacttgggttaggttgtgttttgatgcaagatgggaaggtggttgcctatgcctctcgacagttacgtccgcatgagaagaactaccctactcatgatattgagttagctgcagtcgttcatgcattgaagatttggcgtcattatcttttcggtactcgtacagaagtgtacaccgatcacaagagtttaaagtatatctttactcagccagatctgaacatgagacaacggagatggttggaattaattaaggattatgacatgggaattcattatcatccgggaaaggctaatgttgtagcagacgctcttagcagaaaaggctattgcaatgctacagaaggacgacagttgccattggaattatgcaaggaatttgaaagattaaatttgggaattgtcggtagaggtttcgttgcagccttagaagcgaagcccactctaattgatcaagttagagaagcccaaattaatgatcctgatattcaagagatcaagaagaatatgagaagaggaaaagctattggtttcttggaggatgagcaaggaactgtatggttgggtgaaagaatttgtgtccctgacaacaaagatttgaaagatgcaattctgaaagaagctcatgatactttatactccattcaccctggtagtactaagatgtaccaggatctcaaggaaagattttggtgggcaagtatgaagcgtgaaatcgcagaatatgtagcagtatgtgatgtttgtcagcgagtcaaggcagaacatcagaaacccgccggtttgttgcagcctttgaagattcctgaatggaaatgggaagaaataggtatggattttatcactggtttacccagaacgtcatcaggccatgattctatttgggtgatagtcgacagacttaccaaagtggctcattttattccggtaaagacaacctattccggaagtcgcttggcggaattgtatatggcaaggattgtgtgtttgcatggcgtccctaagaagatagtgtctgatcgaggcagtcagtttacttcaaatttttggaagaaacttcaggaagagatgggttctaagctgaactttagcactgcttatcatccgcagacagacggacaaaccgaaagggtgaatcagattttggaagacatgttgagagcttgtgctctagatttcggtggaagttgggataagaatctaccttatgcagaattttcatacaacaacagttatcaagctagtcttcagatggctccttacgaagcactgtatggtcggaagtgtcgcactccacttttgtgggatcaaacgggagaacgtcaggttttcgggatggatatcctaagggaagcagaagaaaaggtaaagatcattcaagaaagattgcgtgtggctcagtctcgtcataagagttatgccgacaatcgccgtagggatttgagttttgaagaaggagattatgtgtatcttcgtgtcacgccttttcgaggagttcatcgttttcataccaagggaaaattggcaccgcgttttgtgggaccttataagattgtcagtagaagaggagaggtcgcttatcagttggagttacctcaatctttggcaggagtccataatgtgttccatgtttcgcaattgaaaaagtgtttaagggtacctaccgaagaagctaatcttgaccagatagaagtccaagaggatctgacctatgttgaaaaaccaatccgtatcctggaaacaagtgagagaagaaccaggaatcgagttatccgtttttgcaaagtccagtggagtaatcactcggaagaagaatcaacttgggaacgagaagatgaattgaagtcagctcatccgcacctgttcgccagttcttccgaatctcgaggacgagattctgtttaa

SEQ ID NO: 98952 - DNA, 2001 bp, Oryza sativa
  Clone ID: PAT_MRT4530_96810C.1
atggcaacaactaaagaagaaatgtgtttactcataagtgctgaagagaaaggaaagaatgagggcaacctgctcatcaccgcaaagccacacgagtcaacaagccaaaacgtgattcgaacatcaaggaaagcgagcaatggggttgcagggaggggaaagaagaaaggggatcgatccccatccagtcgccggcggtggagcgtagcggcggcgacggggcgtagctgcgagtcggtggccgccggctcctcgtcctcatcaccaccaccacgccaacatccatcggctcgccgtgggcgtgacggagagggcgaggagagaggagcggagctcgccgtgcgcgcgacggaggcgacaagcgtggtgaagtggtggggagttgcgggagggaggcataggggacgccggcgaggcactcgaggaggaggtcgtcgaggaggatggagatgggggtcggcgatgagcgcgatcctatttcgcgtttctcccctcctgcgcatgcaatatccggattttagaagggcccttacgcacaacatcgcctcagggaggacactgttcggcagggccttttcgcaaaaaacccacccccatcgtccgccccttctgcgccgcataatattttgccgatatctcccgtctcgttgtctcctccgctcctcaagaacgagtcgcgggctcgcggctgccgatctccatctggcgaggagaggagagcagatcagagcaggttggcgcatgtcaagtgccgcagtgaatggattggctggtgccggtggtggcatcatcgcccagatcatcacctaccccctccagaccgtgaacacccggcagcagacagagaggtcggcaaaaaagaagaaggccaatggcgcagccatcgccaatacttccaccctcttccagatgcttcagtgtgtaatcgagttactccagctgttccaaacggaaggatggggagggttgtatagcggcctcaaaccctctcttattggcactgctgcttcacagggaatctattactacttttaccagattctcaaaaacaaggtggaagatctagcagttgctcgcggtaagaagggtctaggggatggtaccgttgggatgttctcctggcttggtattgcagctgttgctgggtcaatcaatgttcttcttaccaatccaatatgggttctcgtgactcgtatgcagacacatacgcaagcagaaaagaagatcatggagtctaaaaaggagcttttgctgaaggatgttgctagggccaattcaatagaggtctcaattcttaaggataggttgtataaacttgattctgaaaagcctcgtccatatgggacaattcaagcggtccgggaggtctaccgtgaatcaggcataagaggattctggaaaggacttattccgacactaattatggtatgtaatccatcaatacaatttatgatctatgaaacattggcaaagcgtctccggtcaaagagatctggaaaggaactcccaaaaaagaaccttactgctatggaggtattcttattaggtgcaatagcaaagctcggagctactgttgtgacatacccattgctagtggttaagtctaggttgcaagcaaaacaagaaattggcaggaatgtgatgtcaagatacacaggtacgattgacgcgatcataaagatgatccggtatgaaggattgcacgggttttacaaaggaatgggtacgaagattgtacagagcgtctttgccgcctcagttctttttatggtaaaagaagagttggtaaaattcgtagttatgttaattgctaggagtaggaccgtgctcggtcctagctctaagaaacgataggcagttcatttatatcgaaacaatttgtaacgtcctctttgagactatatatcaattatttacaagataggaaatcgaaaatgtctccaaatactaatgcttctcttcttgatggtgcgttgtactttccatcttcaaaaagaaaca

SEQ ID NO: 98953 - DNA, 500 bp, Oryza sativa
  Clone ID: PAT_MRT4530_96811C.1
gtgcctgccatgtcgccgacggccagtccgatgtcggcgcccgccggcagcagcagcttctactcccccttcgggctccacgtgcagcccgatcactggagcttcttccatgaccacgagcccgtcttcttcatgcccgacttcaagttcgccgccgccgccgccgccagcgcgcagcccaagcccacctccgccgccgacatgccccacaagatcgtcaagcaggtcgagtaccaattcagcgacattaacctcgtcgccaacgagttcttgctcaagatcatgaacaaagattctgaaggttacgtccccttatccgtgattgcttcttggaagaagatcaagtctcttggagcaaccaatcaaatgctggtcaaggctcttcgcacctccaccaagctgattgtgagtgatgacggcaagaaagtccggcggaggcagccattcacggagaagcacaaggaggagcttcagtcacggatgatcatagcttgagattt

SEQ ID NO: 98954 - DNA, 660 bp, Oryza sativa
  Clone ID: PAT_MRT4530_96812C.1
atggcaattaaggaccgggctaaatttctgggcgtgacacggcgcctcctcgcggcggccgggcagcgggcccgcagcggtgcggtggcggtcgcattggacgtgctgctgtggctgcaggcggccgggaacaaggggatgttgggctacgacgatgacgatgaatcagccgccgccgacctgtcggagatcatcgagttgtactcgcaggacgacatgcatgctggtgcccttcacccatctttcaatttttccaaggatgacataagtcatgatatgttacatgctgggcataaggaatgcgtaatgctggaagacctcttgaagagatgcagaagaaggagagcaaaattaaaattatataaccttctgtcactgaaactactaccaatttaccgcaaacttagtggaaaccacaactgtaatttactgcttgcagtgctgaaggtctccgcagaagatggcaagggcaacaagtcttctgtgactgttcatttgtatggcccaaatacagacttggtggttgatcggaagagggaattgcagcaagctcaaagaacctcattgttttttcaaatattcaagggcttcttgaccatgaaggatggtgacatttcagtcctattccacaaaaatatgttaatgaggatgtattattag

SEQ ID NO: 98955 - DNA, 649 bp, Oryza sativa
  Clone ID: PAT_MRT4530_96813C.1
cgggcgcgtgggtctacgaccggcactgggtatacttacttggtcgtattggtttatgctgtctgtatcatctgctagagctcgtcgcgccgcaatccttcgtggtaggagttcttcctcacggccagcatgtgaatcaacacgtatcaacagctacctcgttcaattctggcccttcgtaccagtctttgctcattcggaggaaaaggaaattggcaatcttgctgtcgccgagttgtcttgcttcaccaggttggttctttagccgtgtttagttgcaaaatccttcttcaaacttccaacttttccatcacatcaaaactttcctacacacaaacttccaacttttccgtcacatcgtttcaatttcaaacaaacttctaattctggcgtgaactaaacacaccctaagggtccaggcaatgaattgcttaagacccctgtactgtagctctatttatccgtacacagtactgcacatgaatagatgattgcctctgttttttttttggccgaatgctcaggaggccggttatacaatatgcttttagatttttttctggaaaatttctcattgtttgcgataagtcttatctgctgacacatgagcgatgcaatcaaaatggatgttagggtaagctcttatact

SEQ ID NO: 98956 - DNA, 229 bp, Oryza sativa
  Clone ID: PAT_MRT4530_96814C.1
aaataaacaagaaaaccccaggagcgagcatacaaacacgcaccgagcaagaacatacctgcatgcactgttcatactgaaactacaactactgggcgcaatcactacagcaacctacatggcacaattgttcgaaattacacgcaaatacacactgagctattactaaaagctcaaagaatcaagttctttctcatgacaaatttgctactagagctagctagactga

SEQ ID NO: 98957 - DNA, 332 bp, Oryza sativa
  Clone ID: PAT_MRT4530_96815C.1
gcacgagggttagctttgcttcgtggcgactcgtcagctcgctgcttggttggtgatggagatggagctagggttgggaaggtactggggggttgggaggaggcggtgcggcgcgtgcgcggtggcgccggcggcggtgtactgccggacgtgcgacggcgacggcggcggaggtgggtatctgtgcgcggggtgcgacgcggagcatgggagggcggggcacgagagggtgtgggtgtgcgaggtgtgcgagctcgcgccggcggcggtcacctgcaaggccgacgcggcggcgctgtgcgccgcctgcgactccgacatccacgacgcca

SEQ ID NO: 98958 - DNA, 155 bp, Oryza sativa
  unsure (1)..(155): unsure at all n locations
  Clone ID: PAT_MRT4530_96816C.1
cggactcgtgggcggactcgtgggcggacgcgtgggcggacncgtgggcccaccgtcacatctcacnttatcacatgctactatcaangagacattccttctatatttcatcacaccgttctcgctgccacgcatggcatctgaggagngngaga

SEQ ID NO: 98959 - DNA, 1831 bp, Oryza sativa
  Clone ID: PAT_MRT4530_96817C.1
actagaattggtcttgctggccccgccgcctttccgcgatttcgtcagttacccagatctcatcttacgcaggcagagatggctgtcactagaattggtcttgctggccttgcggtcatggggcagaaccttgccctcaacattgcagagaaagggttccctatctctgtctacaacaggacgacttctaaggttgatgagaccgttcagcgcgccaaggtagaaggaaaccttcctgtgtacgggttccatgaccctgcatcctttgtgaactccattcagaagccacgtgttgtcatcatgcttgtcaaggctggtgcaccagtggaccagaccattgcaactcttgcagcacacttggagcagggtgactgtattattgatggaggaaatgagtggtacgagaacactgagaggagggagaaggcaatggaggagcgtggcctcctctatcttgggatgggtgtttccggaggagaggagggtgcccgcaatggcccgtccttgatgcctggtggctcattcgaggcgtacaagtacattgaagatattcttctcaaggtggctgcccaggttcctgatagtggcccgtgcgtcacatacattggcaaaggtggatctggaaactttgtcaagatggttcacaacggaattgagtatggtgacatgcaactgatttctgaggcatatgatgttctcaagtcagttggtaagctcacaaacagtgagctgcagcaggtgttttctgagtggaacaagggtgagctcctcagtttcctgattgagatcacagccgacatatttagcatcaaggatgaccagggttcaggccacctggtcgacaaggtcctggacaagactgggatgaagggaactgggaagtggactgtgcagcaggccgcagagctttctgtggctgctcctacaattgaggcatccttggattccaggttcctcagtgggttgaaggatgagcgtgttgaggctgccaaggtcttccaaggtgacttctccagcaacttgccagtggacaaggcacagctgattgaagacgtgaggcaggctctttacgcctcgaagatctgcagctacgctcagggcatgaacatcatcaaggccaagagcatggagaaagggtggagcctcaacctcggtgagctagcgaggatctggaagggagggtgcatcatccgtgccatcttcctggaccgcatcaagaaggcctacgacaggaactccgacctcgccaacctgctcgtggaccctgagttcgctcaggagatcatggacaggcaagcggcatggcgcagggtggtctgccttgccatcaacaatggcgtcagcaccccaggcatgtcggcgagtctcgcgtacttcgactcctaccggagggacaggctgcctgccaacctggtgcaggcacagagggactatttcggggctcacacctacgagagggtcgacatgcccggctccttccacaccgagtggttcaagatcgcgcgtgctgctaagatgtgaaatgcttcaaattttcggtaatatttggttgctgcttgctgctgagtcgcttgtagggtgggaggaactgttgttaaattttatggtcaatgtgctacgcttaatttggataaggaggtccatagctatctccattcttttaatgtaaggagcagcccagggtggagagaacatggatatttatcattggaacctttgttgtgatctttgtaagtctatatatgaataaaagcattttggcaatgcttgcttttttaaaaaaaaaaaaaaaaaaaaaaaaaaagcccagaagacttctctctctccgggg

SEQ ID NO: 98960 - DNA, 557 bp, Oryza sativa
  Clone ID: PAT_MRT4530_96818C.1
cccccccaaaaatttaaggctaaggaaaaaaacccaaaaatccagggggggtaaaaaaaaggaaaaaattttccccttaataaaacggggaaaaggggaccttaaaaaacaaaaaaatcctagccccctggaaaaaacgaaaagaaccaaaccttgggggccaaaggagaaatcccacgaaaaaaaaccccttttaagaaactcccaaaaaaaccccttttttttaaggggggggggctctaagggaaaaaaccaaaaaacccttttttttgggtgggtcctaatcgggaaaaaagggggggttaatctccccacggggaaaacctttgaagggtttctccccccttttggtccaagggggcccggagggggccccaaaaagggacaagggggggaataagggcccccctaataaaacgggccaaaaaccccgaagggcgggggtcaaaaaaaaacccgggggggcacccgggggggaccccgacgatgtataaccaccctacgtggaggggggcaaaaaacgttggccttcggaagcccagggccaccccggaaag

SEQ ID NO: 98961 - DNA, 416 bp, Oryza sativa
  Clone ID: PAT_MRT4530_96819C.1
tgattgtacctctagttttgttttctctcttgaagataacttatttttgtgtacgtagtaaaggtttatttgtaaagggggaggggtaaaaaaataataaaccaaattaaattttctttctaaaaaaaaataaaaaaaataataaaaaaaaaataaaaaataaaaaaaataaaaataaaaaaaaaataaagataaaaaaataaggggggggcggttttaggggatcaaggttttcttccgggggtttgggaggttatagtttttttttgggggcccttaatttaatttattgggcgggggttttaaaacgtggggatggggaaaaccttggggtttccaaatttaatggctttgaagaaattcccttttttgccggttggggaaatagggaaggggcccgaaccgttggtcttttc

SEQ ID NO: 98962 - DNA, 2475 bp, Oryza sativa
  Clone ID: PAT_MRT4530_9681C.1
atggcgcccccaatcgtcgggaacggccgcgcttttcccggccaccaaccatggccgccggccgccattcccgtcgccgttccgccctcccccgtggccggctccctcttttctcatataaaatgggatcctcatcccccgttctctcgttttagccccctcccgagcctccccgtgcgtcgcagccgcctcctcttccccggcgccacctccgatttgtggggaaatcgccggaacggtgcccccgccggcaaccagtggcattggtgccactgtactccctccagccggctcctgtacgtcgccggtgcgccgatcgacgccgccgtctcctccttcgacaccgcggcatcgcctccttccccggcatcacctcctcctcgcccgaagctcgccggagtggcctcgtcgtcggcgtccagtacctcccggtctccggtcggctcctgtacgtcgccgccgcggcaccaccacctccggcatcgcagcggcaaggtcgccctcggcctcgcctccccttcgaccgaacccctccgcggtccatcgtcgttgtctccgttcgttctcgtcgtcgacgtcccgtcggtcgcccggctcgtcgtctcgcggtgccgcctccgtcatcgtcatcgcagcggcgtgttccacgtcgtcccgtctccgtgcagccactgctggctgtccctcatcgccccctcgccggccccggtcgtcgtcgtcctcgtcctctcgtcgttcccgatcgtcgtggcccccgtcctcgtcttcgtcctcggctccgcgtcgtcaagccttgtgccggccgcgtctcgccttcgtccaaggatcgccgccgaagccgtcccctcgccgttcgtctccgttgtgcccgtctgtctccgccgcgcccgttcgtcgttgtcgttcccgcgcctcgtcgcgtggtgggcaaatgaaggctacacgagctgcggcccggtagtcgagatgtcatggcagagggttggtgccctgctgctaggggctcagtcttgcctgcctgtcccgggggttccggccgtaggcgggattgggtcggtactcttgtctatggctaggatgggttggaaactatgtcacgtcttccgtctgtataccgtggtgatgaataacactggtaacaaaggctatgggaatgatggatccgatgactcaagaacccaagccaatgggaatgagagaagcatcaacgaaacctcaccagagctaatccaagttgtggttaaccaaaccaacatgttggcaacagcctttcaactattacagaattggaacaacccagcaagggcaaccaacgttcaagtgcctacagtccagcaacagtgcaagttatcagaatttctcaaaactgggcctccaacctttgccatggccgtcgatcctatggaagccagtgattggttgcgcacagtcgagaagaagctagggttgattcagtgcaccgaccaggagcgggttggcttcgcaactcatcagttggttggaccggcttcagagtggtgggatagctacgaagcatcacggccagaaggacataccatcacctggaacgagttttcatctgtattcaagagatcacatgttcccgcaggaatgatcacactaagaaaacgagagtttcgctacctgaagcaaggagatttgaccgtcacagagtacctgcatgagttctatcgtttggctcactatgcaccagaagatgtggaaacggatgaagacaaacaagagaagtttctccaggggttaaaagatgagcttgcagtgcaattactcctagaggattatgaagattttgagaaacttgtggacaaagccatgcaactcaaaagtgagcataatcggatgacgaactgcaagagaaggattgtcaacatcccagtatttccaggtggtagccaaagacagcgcactgagccacttcagatcaccggatcttctgttgtgcatcaagagttcctgccccaagaagatgaacgcaatgcagacaacaacactagcaatactaatgatgatgataccaccaacaaccatggttcatgccccattagtgaccactcgaataaagcgtgcaatgtcagtagcattcaccaagatgtcaacgatagtatcaatgttggaacccagaatgacaaccttagcaattttgacactgagaaagactccaatggtgatagcaactatggtaccactgatgccaatgttagcaaggatttccaaccaccgattccaactccaagtcagaatgatcgtcctcagacggatagctcagcaaagaagacgttgatttgctacaattgcaaagaaccagggcattactcgagggactgcctgcaaccaaggcaaaatcgacctccacattaccgccaatttacacgaagcagacatcccaatcgtattgtggtcactggagcaaatgcagtacctgttaagcctagcgctagtcagaagcaaccataa

SEQ ID NO: 98963 - DNA, 206 bp, Oryza sativa
  Clone ID: PAT_MRT4530_96820C.1
gcacgagctcgtgcccaattcggcgcgagtctgaaggaatttattgaaggaaaggattttctgacttatagctacaaggagcaaactgtagactgtctgtgcgaaaaccagatgcattgcagaaagggctatctgtcgcattcccatcatttagtccgatattatccaattttttaatgacgtcagccatggagcaaacggggggt

SEQ ID NO: 98964 - DNA, 1337 bp, Oryza sativa
  Clone ID: PAT_MRT4530_96821C.1
cgatcatttccaactgaaacagttgatcaactcatcgcctctcgagcaggcgagcacacacaacacgcagtgatcgagtcgggctcgagcgacgtcgtacgctgagaagatggcgcacttccagggacagcagcacggccacccggcggcgcgcgtcgacgagtacggcaacccggtggcggccggccacggcatcaccgggacgcaagaggcaggcgccggagggtacggcgccgccggcaacgttgcgcagcctcagcatgcgttcggcggcgccaccgacgccgggggttatggccggcaggccggatacggcgccaccggcaccggcacccacgacgccgcgggctatggtggttccggtcagccggcgtacggcgctaccggcactggcgtccatgacgccggtggtttaatgcctgggcacactgccgggcatggtaccaccggcaccggagtccaccacggcgccggcgccggtttacccgcggggcagaccgccgggtacggaacaaccggcgtcaccggagctcagcacggagctggtggactaggaaccgggcacacagccgggtacggaaccaccggagcccaccacggcgccggtggcttgggcaccaggcacatggctggacacggagccaccacaacacccgacaccatggcatacggaaccaccggcacaggggcgccacacggcgccaccgccggcaccggcgcgtatccgcacgcaggcggccagttccagccggcgagagaggagcacaagaccggtggcatcctccgccgctccggcagttcaagctcaagctcgtcgtctgaggacgacgggatgggagggaggaggaagaagggaatcaaggagaagatcaaggaaaagctccccggcggcaacaagggcggccagcagcagccgacggccactgcggcgaccggcggatatggtgccggcacgggacacaccgccgccgctggtacaaccaccgacgccggcgggacggcgtatacaccgacgacgcagccgacgcacgagaagaagggtatgatggagaagatcaaggagaagctccccggtggtggccatcactgagccctttttgaggttcagtttagctccagctttggagtggccgtacactgttcagaataaccaatactccgatgtatggatgaataaaaacgagtggttgcatgcttcaatgtgttgctaatattaatatcggtcatagcttcttgtatttctgaagtttgtacttgcctgtcttttaaaatgtttccttgtatttatgaagtttgtacctgcctgccttttaaaatgtttccataatgttgctagt

SEQ ID NO: 98965 - DNA, 627 bp, Oryza sativa
  Clone ID: PAT_MRT4530_96822C.1
atggcgatgcaggtggcggcgccgtcgcggaggaggccgagcttggggcggcagaagatcgagatccggcgcatcgagagcgaggaggcacgtcaggtgtgcttctccaagcgccgtgccggcttcttcaagaaggccagcgagctgtccattctgtgcagcgccgacgtggccgccgtcgtcttctcccccgccggcaaggcctactccttcggccacccctccgtggagtgcctcctggagcgattcctgccggactcgtcgtcgggagcggcggcgcgggtgcggcgaggagcgaataataatggtggtggtgggatggtcggggagctcaacaggcagtacggcgagctgcgcgcgatggtggaggcgcacaaggcgcggcgggagagggcggacgagaagatagagatggagcgcgcggcggggaggtggctgcccatggacgccgatgtgcgccgcatgtcgccggaggagctcatggctttcgggacgggcctcatggctgtgcaggctgccgtctccgcgcgcgccgaccagatgctgcgcgacgcgctcctcattggccgcaggccgcccaccaccaccaccgccggcttcggcttcttccacatgccacactactga

SEQ ID NO: 98966 - DNA, 375 bp, Oryza sativa
  Clone ID: PAT_MRT4530_96823C.1
atggatcacctccaaatctccaacaaccacagctgccgtctccgagcaagagcgaccacggcgatgccctcggtggcgagagcgaggcgatggcaacacgactacccatgcggtggccgccgcctaccactcaccaccacgcggaacgactgctccgtgcacttgcaatcacctatcgtgcgaggtaataagttcgatcacccactcatctcctccacttgccccgccaccgacaccggcgagcaacctaatgtgacgcgacctcatcaagatcacctgcgacgtgtggcagttagccctgaagaagcaactggaagatgtggtggacaaacagccaagaaggccaaaatgcctccaaccggcggccacagctga

SEQ ID NO: 98967 - DNA, 1230 bp, Oryza sativa
  Clone ID: PAT_MRT4530_96824C.1
atgtgctgcccctgccgctgccctgccttcgaggttgtatacgaagaggctcggttttgcgggttaattacgcggggtgccatgaggtaccatagcgaattagcgatcagatcaggggtagtttgggaagtttgtcacgtggaacaggcgtctctgggtggcggccccacctgcacgtgtctgtctgcatattgctttgttgaaagttgtgtcgtagtggaggccgaaagttgtctgaaaagagagatcgatcctgagactgagagcgagactgccggctgccgactgccgacgacgacgtacgaagccccgatccgtcgacaatgcaagacacatcgaatgggtgctgctactagtgttcgctacgtgtcattgcctggttgtctcgatcttttcgttccttccggatgttttggcacacctgaccgttctcatcggtggatcggtcaatcaatgcaaattatcgtccgcactgcaggactggtaacgaatgaattgatcgatcgtgtagccgtgcaaaagcagcaggtcctgtacacgttgacgacccaacaagagcggccggtctcgatattatccatcactgctcccatccgtactcccaatttatcggacggctctgattttttggtgatgggcctacatcttctttctcccaagcctattcattttctttctccaagttcctctcccatggaaataatcggagaaaaggaaaaaatgaatcggctagaacaacgatcaacggtggcaagatctttgattctcttcggcaacgcgatttttcaaatcgtcaatgctaacgatcaagcacataagaaggatgcaaccgatctaagtagcagttttatgatttatcgtctgctatatgtcttcttttctgttgaagttttttttttctttcgaaaaataccgccgctgattttgcagtgtctgcatcgcatcgcatcgcaatgtgcgatgggatctcgtcggcatcaggtggcaccactctactactactcctggtgtggtgggcccttcctgttgaccggtcaagatccagccagtgatgatgagttggatcccatgcggccagtcagcagctctcagctcctgggtcgtctccatcagcacacacgtgccagatccctccgtacgtcccctccagatttttttaaaccacgatatatcttgcggttaccgttaacccgtggggtgatggtagtaaaccccatccacgagctggct

SEQ ID NO: 98968 - DNA, 465 bp, Oryza sativa
  Clone ID: PAT_MRT4530_96825C.1
atgtgctgcccctgccgctgccctgccttcgaggttgtatacgaagaggctcggttttgcgggttaattacgcggggtgccatgaggtaccatagcgaattagcgatcagatcaggggtagtttgggaagtttgtcacgtggaacaggcgtctctgggtggcggccccacctgcacgtgtctgtctgcatattgctttgttgataagtgtgtctgtaaaaggatgagattcgactccgtgtagacgtgagcagccgagcacgtgcgcggcgtgcgcgacgtgcgcgacgcacgagcgtagcgatagccccggatccgtgcgacaatcgcaagacacatcgaatgggtgctgctactagtgttcgctacgtgtcattgcctggttgtctcgatcttttcgttccttccggatgttttggcacccctgaccgttctcatcggtggatcggtcaatcaatgcaaatta

SEQ ID NO: 98969 - DNA, 678 bp, Oryza sativa
  unsure (1)..(678): unsure at all n locations
  Clone ID: PAT_MRT4530_96826C.1
ttaccaactgcattccacgcggtggcggccgctctagaactagtggatcccccgggctgcaggaattcggcacgagctcgtgccgaattcggcacgagaggaatctccatgatacaaaacaaaaccaaccctacatgtgttctattgctgacacacggcagttgtaactacatgttaaatggtggcatactatacacctgtacaatacacgcaacaaacaataaccacttacatgccatcctccaccctgaaatagaaaaccatttttagcatgttggtgcttcattttgtattccattggggtataaaaatggtacaaaacaaccatttttaacccaattttgttattcctttgcggatataaatatggtatacattgtaacttgatatcccccaaccggggggcctcaggtaaaactccaagggggggggccccgggtacccaaattccccctatagtgagttccttatttacaattcacttggccgtccttttttacaacttccttgnactggggaaaaaccccntgncctttaccccaactttaatccccctttgcaacaaattcccccctttcccccacttggccttaatnacccaaaaaaaggcccccccccnttccccccttccccaacaatttcccccncccctgaattnccnaaatggccaaattnttt

SEQ ID NO: 98970 - DNA, 381 bp, Oryza sativa
  Clone ID: PAT_MRT4530_96827C.1
atggcggccgagatctccgcggccgattccttcccctccggccgctctttccctctcccggcgctatataatccctccccgtgcttcgctcctccgtttccgccactcgccgctcgctctccccgtcggaagcgcgctcgcgccgtcatccactcttctccgccgtcgacgccgagctccggctcgccgccgtcgtcgtcccggacctcctcccgtctcggcgtcacctccttcggcttcgccgtgcccccgtcgacctcgtccgctcctccgtttcgcccgccgaccgccggagcgccgccgtcctcgtcgacccgagccgcgccgccgtcttcctccgctccggccgtcgtttccgccgccctcgtcgtcccggggtga

SEQ ID NO: 98971 - DNA, 1173 bp, Oryza sativa
  Clone ID: PAT_MRT4530_96828C.1
ttttttttttttttttttttattttttttttgatactaatcatgcatatattattatctctctcaactacacaggatgtacacaagctgcaggaggagtgcaccaatgcaaatagtacaaagcactcgatcctgaaagaatccatcaccaagatggcaagaactaggcaagaactgaactaaatcaaagaatcgaagcatcaatggcgtcgtcacagcttcaagctgaacttgcagttgctggccttgatgttgacggggttgttgacgccgaggctgtcgacgacgaggtcgcagcgcacccgcgacgtgaccttccacagcctgaggctgccgagctcgacgcgcacggggacgtcggcgcggaacacgagcggcacggcgcccgtgcgctgcgcgtcctgcagcgccgacatcaccgcgccgccgagctgcgcctgcccggccatgacgacggccagcaccgtcgtgttgcggtggccctggtagaacgccgggagcgcgccgcgcgccaggcggtgcgcgtcgtaccacacgctgaggctggacccggcctcgtagtagatgccgatgcgcgcgttcgggttcgtcgccgtcaccgtcacgtcgaacctcgccgtcgcggtcagcgtcgggtccacctggaacgccgagacggacagccggtccaccgagtagcgcggcgccttggggtcgaacaccaggtagagcgcccccacggccgcggcggcgagcacggcgagcagcacgacggtcaccagcacgcagcagatcaacctgcagcagcagccccgccgccgcttcggcggcggcagcggcggcacgggcggcgccacgcggcgcggcggcggcggcggcaggtgaccgtgcgatggcggctgctgcggctgcgccgccgggtcgcccttgtcggagcggaacgagccgccgggcaccagcggcgccgtgggccggtgccggccaccggcctccaggtcgacggggtgaatcctcatccgctggtgatccgccatggccaacctcaagaacaagaagcacctcgcacccacgcgtccggctttctcctctcttgctctctgtctctatatagaggtaaggcgatgccgcgacggcgccggcgaggaggaggtggaaaggtggttgcctcgtgccgattcggcacgaggcctcgtgc

SEQ ID NO: 98972 - DNA, 2127 bp, Oryza sativa
  Clone ID: PAT_MRT4530_96829C.1
atggagaagaagggacacagagcctttgctaaggcaattaagtctttcggttcttcagaaaggcacaagcgttctaagagtgatcttgaggatatgtgtgctaaagatgcgctgtatgcttcagataaaacatgcgttcagcctaagccagatgctgtaaaagttaaggtaaaaagtgatatcaacgctgaagtgcaacctgggagaggagcgcagagcttcttgagaaaagagattctccagctagaaaagcacctcaaggatcagcaggtcatgcgtggcgccctggagaaagctctgggaccgaacgctactgctgctccagtcaacgtatcaaacgagaatccaatgccaaaggatgccaaagaacttatcagggagattgctacactagagcttgaggtgaagaacatggagcagtatctccttaccctgtacaggaaggcctttgagcagcaagtgcccacattttcccctcctgaccaccggggagctccgaagccgccggtaccggcgatggcggcagtgagctcgcagcctgtgcagctgcagaaatcacccagtgtcaaggcatctcgcaagaacaacagagctgacgcaatgctgcgatccagctacccgccaccgtcccgtaggacgttgaacgatccagtgatgacggattgctctacgtcgggttgctctagcaggctaggtgaatctgatgttctccggtgccagtctgcggtgtcgtaccgcggcatttgttcgtccaggatttcaccatcggaggacagtcttgcgagagctcttcggtcatgccactctcaacctttctcatttctggaggaaggagagagtactgcagcaggagtgataagcttagcagagtatctaggcactaatgtagctgaccacattcctgaaactcccaacaacctatcggaggagatggtgagatgcatggcaggggtgtactgcaaacttgcagatccccctttggttcaccacggctcgtcgtcttcgccaacgtcatcgttctcctcgacgagtgcgatatccccgcagtatctgggggatatctggagtcccaattacaagagagaatctactctggactctcgtttgataaaccctttccatgttgaggggttgaaggagttcagtggaccatacaatacaatggttgaggttccactgatttgccgcgatagtcggaggctaaaagaagttgaggatctgctccagacttacaagttgattttgtaccggttggaaaccgtcgatctcaggagaatgacgaacgaagaaaagattgcattctgggtcaacatacacaacgcccagctgatgcatgcttatctaaagtatggcgtcccacagaacaatctgaagaagacatcacttcttgttaaggctgcctgcaaaattgctggacggagcatcaatgtagctgttatccagagcatggttcttggatgcaacacatactgtcctggacagtggttacgtactttgcttcacccaaggatcaaaagcaaagtgggcaaagtagggcatgtgtggcaagcctttgccgttgcacaatcagagcctcttttacgctttgcgctttgttcaggaagccattctgatcccgcggtgagagtgtacactccaaagaggctgttccatcaactggaggctgccaaggaggagttcatccgggcaacggtgggcatctggaaggagcagaaaatactgcttccaaagctcgtcgaggcgtatgcgaaagacgtcaagctctcgtcgcagggccttgtcgacatggtgcagcgctacctcccggagagcttgaggatggcaatgcagaagtgccagcagagcagatccagcaagatcatagaatgggtgcctcataacctgaatttccggtatctgctgtccagggacctggcatttcctcacctgaactgactaatcttactgctctctgctcaaataggctgtgaaatgagctgaagtatatgcattgtatcatatagatttagacgtaaggattgtgtagggttgatgtgtgagtagtgtttatctttgcctgtaaaaatttttgtagatgaacagtaaaaggggaagaaatgagaaagaagcatcctttggttatctgac

SEQ ID NO: 98973 - DNA, 649 bp, Oryza sativa
  Clone ID: PAT_MRT4530_9682C.1
tgctgttcgatgggcaatgtcgacctcaattcgttcggtacctgtcacgcccagaaattcctgaatagaattcaagcagaatgtgcattaaaatccccgtccaggaccggccggggtacacaaacgacaatgttgacattcagatccacgtcggaaagaggccatgacaggacctttcgcataaccccctctaaccaagcacaccacacctcaggtttcacccccactcctcgcaaggcagcgggcagtcccctctcgtgcctaggtgaatccggaagccgcataggccgtcgcagggcccatccaaactccatcacgcccacccttgcaatagagcatttgcaatataggatcaacatgttcaagtgacaagcatgacttgccttgctctgctgctggaggaacctcggcaactatttcgaagtacaccggagcgtcggaggaatcggaatctagcgacatacaaagcaaacattgcaaacaggctataagactacttaaatcatttattgcgcaataaatcccagggctgacgtcatcaaggcggggcgcggcgccggcaagcgggccccaccagtcagtggctcgggagagggaggaaggggcgccggcaagcgggcccactcagcagcggctcaggggggggcgg

SEQ ID NO: 98974 - DNA, 693 bp, Oryza sativa
  Clone ID: PAT_MRT4530_96830C.1
atgcgggagatctggagcagcttcggcctctggatgctgctgctgatgctggaagctgtttcccctgcaaagatccacgggaaccccgcgaacgacctggtggcgctggtgaacgccaaccggacggcgaccaagctgcctcatctgcgcaccagcgctggccttggctgcatggcgctgcagtacatctccgactgcattggcattggcattgggtgcgccggtgacaacacggtggcgtgccagccccccgaggcccacatcaccgaggtgtacgccgccaactgcggcgtcgagctccccacggtggacgtcatcacgggccgcctcctcggctgccaccgccagcgctccgacgcggaggccgcgctggaggccgtgctctccggctccggcaacagcaccgccgctagagcggtcatccgcggcaaggagcacacccaggtgggcgccgggttcgaccgcgcgcaccgccgcgggcccttcttctggtgcctcctcttcagcagcggcagcgccaactccaccttcctgctcgaggccgccggcaagggcgtccaccagtctcacggctgcttcagcgtccctgacaacactagtctctctctctcctgcagcagcgccgccgccgctgctgtgcctttgctcttcttcatcctcctcctcctcccagtactacaagtttattattag

SEQ ID NO: 98975 - DNA, 485 bp, Oryza sativa
  Clone ID: PAT_MRT4530_96831C.1
ggtggagaagctcaagtacaaatagactattaaaaatacgagaagaggacgttcaatgttccagttgccagttgggtttgagttagcacgagaaagtaatgaactaaaaacttaattaacataaaaaaccaaaccaatggtttcagtaaataaagcagggaaacattaagagaaagcaaaaagacaaaagctacaaactctcatgactgcgcatggaatcagtgaaaaaacataacaactcgagttttcttttctccttttttttattcagaacagtacgaactcaaccacacacaaactctcgccggtgtaagcttaggcctttgacatgtgaacgataaggtcaacgacacgagaactgtaaccccattcgttgtcgtaccatgacaccaacttcacaaacttgtcgctcaatgcaatcccagccttggcatcgaaaatgcttgacctgttgtcaccaacaaagtcggtagacacaacatcat

SEQ ID NO: 98976 - DNA, 1625 bp, Oryza sativa
  Clone ID: PAT_MRT4530_96832C.1
gtttccggaccgagaagggcaagggaatcgtggctcctattgagtcggtggcgcccaagtggccgccggagagcgccgacctcgaccatgctcgccatcgctggagccgcatgagcgaggaggagcggcaagccttcctcacgttcatgtcgcacatcgacagcttccacattgcgggttgcaagaaagaattgcggtcatcaatgcctgaaagagtaactggctgtgagatggagcttctcaaatcatggagatgggagccgatgccaagcgatggagatgatttggcagagagggcattgatcttgagcaagcttaagagcattgtttcttggctcattgataaggatgccgtttctctcagccttctgtacatcatgtacaagttcatcatgagccgggtcaggccagtaaaaccttctgtggatccatactataaacaagagaaccagaaggattcgcttggtttggctacatggatggaagagtcaggcaccttgttttttgattatcggaagaatgcttcaagaaaaactgatgattctagccagccagatgaattttttgactggctattctgcgaatctttgcttgaggatcgctgtgaatcatggcttggcatgcgggaaaaatgtgttaatcttggacctgccatctttaaaaagataactgaagaattggataaactgaagctgaaatgcagctcatgtgaagaactaaaacaaaaaggaggtgtatatttccttcctaaggccatccttgagagtgatattgacatcgagccttatttttatgatgggattggctctgtacagactgaaatgctattaattgatgctgaggtggattaccagaagaaaaggcttttggaagcctgtaaagtggattatcttgcagccattttacctattgcaaagtcttacctttgggccaaattgaataataacccccctgagaaggttttacctcttcctccaccaaatggtcttcaactacaagctcctttgaatgtgattctccggtctttgtggcacataaggcgattccatgatactctccagaagattccacgtgaatgtcgtgatgttacagttggagactttcaaattgagaaggaattgcttgaaatctttgattcttgggatcttgtgaaagacggcaaaccatgtgaaccaagtggttcgacgagatttgcagattttacaagttctctgataaaaaagagtggaaaaatgactgcatccaaaattgtgaaaagcctttttcagaggctgcactcgtcacatactcctttgcattttgagttcaggggtgaaacttcggaactgcaaacaccaaccgagccaagtttagtgggttgtatatgcctagtgcatgatctctttgggttacacctttatgaaaataaattcaactgtctgaatatggtgcacaccaaatttgcgtactctattgaattgggcgctggaggagaaactaagttcaagtctttcagcgaactcttggtagctagagagtccaggaatggaagtgttgggcagaaggttgcccagtactctcttttatgtccaccacgtttgttcatgaccggagaaaaagtaaggtcagtggatgaaatcatttga

SEQ ID NO: 98977 - DNA, 458 bp, Oryza sativa
  Clone ID: PAT_MRT4530_96833C.1
gcacgaggcgcaacaccatctttccaaagtaaagctatagctgctttcggaaattcttgatcagcggtgctagctcaatggcttctcgcctgcctctggcagtgctgctgcttgcggcctgctcctccacggccgccgccaccagctacaccgtcggcgacggctccggctggaccaccggcgtcgattacacctcatgggccgcctccaaagacttcaaagtcggtgacagtctcgtgttcaattatgcgaaagggctgcacacggtggtagaggtgagagcggccgactacatggcgtgcacggcggtcagcccggtgagctccgacagcagcggcgcgaccaccgtggccctcaagacgcccggcagccactacttcgtctgcagcatcaccgggcactgcggcgccgggatgaagctcgccgtcaccgtcggcggctcctcctctccttcctcg

SEQ ID NO: 98978 - DNA, 2589 bp, Oryza sativa
  Clone ID: PAT_MRT4530_96834C.1
atggctggcgtcggggagccgcggcggagcccgaggaagagcaaccgggactggctggactgcgaccggcggttcgcgcagcaggccgacggggtgatcctccaggtgctccgccggagcccggacgcggtcgagcgcgcgacgcagctcatgtgccgctacaagaagtcgccgctcgcctacgccatcctcgcggaggcgtggctcgcgtccgggaatctggtcatggcgaagactcacctcaggagcgcgacggtgctcgccccgcgctgcccgtacatctccttggcgctcgccgcggtgctcgtccgcatgggatcctgggaagaggcggcactcccccttgccggaagacagcatcaacgccatcgtcagctccccaaaggtcagcagcaaaggattgccgtcgaacgagaaagaatccgcctgctgcgtttccgggccgagaagggcaagggaatcgtggctccaattgcgtcggtggcgcccaagtggccgccggagagcgccgacctcgaccatgctcgccatcgctggagccgcatgagcgaggaggagcggcaagccttcctcacggtgagttttcaagatatgaagtcgcatttcctttcaagatcaggaacgtcgcggtggcagacgagacgtgcgctctcaggtgctgaggagctcgtcaacgggtgtgggtcgttttcgtatcggctttgccctttctgcttcgtcatctttgtggatgctacggagttcatgtcgcacatcgacagcttccacattgcgggttgcaagaaagaattgcggtcatcaatgcctgaaagagtaactggctgtgagatggagcttctcaaatcatggagatgggagccgatgccaagcgatggagatgatttggcagagagggcattgatcttgagcaagcttaagagcattgtttcttggctcattgataaggatgccgtttctctcagccttctgtacatcatgtacaagttcatcatgagccgggtcaggccagtaaaaccttctgtgatatccatgtgcggctcctgcgggattggacagttgagttctgcgcacctcaaggaactgcttgatttgcttaagtggcttccacatacccatacagactataaacaagagaaccagaaggattcgcttggtttggctacatggatggaagagtcaggcaccttgttttttgattatcggaagaatgcttcaagaaaaactgatgattctagccagccagatgaattttttgactggctattctgcgaatctttgcttgaggatcgctgtgaatcatggcttggcatgcgggaaaaatgtgttaatcttggacctgccatctttaaaaagataactgaagaattggataaactgaagctgaaatgcagctcatgtgaagaactaaaacaaaaaggaggtgtatatttccttcctaaggccatccttgagagtgatattgacatcgagccttatttttatgatgggattggctctgtacagactgaaatgctattaattgatgctgaggtggattaccagaagaaaaggcttttggaagcctgtaaagtggattatcttgcagccattttacctattgcaaagtcttacctttgggccaaattgaataataacccccctgagaaggttttacctcttcctccaccaaatggtcttcaactacaagctcctttgaatgtgattctccggtctttgtggcacataaggcgattccatgatactctccagaagattccacgtgaatgtcgtgatgttacagttggagactttcaaattgagaaggaattgcttgaaatctttgattcttgggatcttgtgaaagacggcaaaccatgtgaaccaagtggttcgacgagatttgcagattttacaagttctctgataaaaaagagtggaaaaatgactgcatccaaaattgtgaaaagcctttttcagaggctgcactcgtcacatactcctttgcattttgagttcaggggtgaaacttcggaactgcaaacaccaaccgagccaagtttagtgggttgtatatgcctagtgcatgatctctttgggttacacctttatgaaaataaattcaactgtctgaatatggtgcacaccaaatttgcgtactctattgaattgggcgctggaggagaaactaagttcaagtctttcagcgaactcttggtagctagagagtccaggaatggaagtgttgggcagaaggttgcccagtactctcttttatgtccaccacgtttgttcatgaccgtttttgattgggaggatatcaatgggagctacaataacatgcatgaagtattgatcagcttagcaacagagttggacattagtcatatctacagaggtctgcattcaggatgcatgtatactctggtttctgcgcactgctacgattggtggcacccggcatcaaatattcttgactggatggaaataatacttatctgggtaattcccatactgtcttgtcagcctgctggatcctggcaagagtcaatcgagcggtaccgtcagtccaaactccgcccggaaatcctcttctttgagcgtgttgagtag

SEQ ID NO: 98979 - DNA, 605 bp, Oryza sativa
  Clone ID: PAT_MRT4530_96835C.1
gaggctgatctggaagctgcggtcgtttctcctccccgcaccgcgaacgcttctcctcccccatcccctgcgcgcaccagcagtgggtccgccagccgcggcgccgcttctcctcccccacacaagcgacgagatcaaaagcctccacccgtagcaacatgagcgagccaccgccagcatcagtgcatcagcagaaggggatcgccggcagtaggccaagcgacggaaacgagccataccacccgtaccagttcaagggaagttatgggcggttcccagtttctgtctatccctcttctaatgacctgcattatttggtttgttgcatctcttcgtgtcttctccatatgtcacagacatgttgctgtttgttgtgttgctgcccgctctgattacacaggttcatggatccatctgctagggatgaggttgttcccctttcatgttgaattgctgatccttatttttcccaggtcatccctaatccagcatttcagtgagctgaacaggcagcaggtgatatcacacaggtcacaggattttcgtgattggagataattttcatcatatgcagcacaatgatcaatgatggtgtgatgaggtga

SEQ ID NO: 98980 - DNA, 177 bp, Oryza sativa
  Clone ID: PAT_MRT4530_96836C.1
atggcttactgcgccaaacctcaccctaccgagcgctctgccactgggtgggaggggaggcggcggtggtctggtgacggcctggcggcggtggatcctcggggtgacggcggcagcagtggcggttctggtagacggagttcattgtctgtaatttctgtgattgatgatggttga

SEQ ID NO: 98981 - DNA, 2981 bp, Oryza sativa
  Clone ID: PAT_MRT4530_96837C.1
ggtgccaggccacgtgggcgattgtgtctgcctcaagcctctggtcatgatactccacgaggcatatatatatatatatatatatatatatatatatatatatatatatatatagtaagtctgactgaatttgcaagacaccccaacttgcacgtagttaacaaaagacgaattagatgcactcacaagtgcaagacagattctcactgtgcttgacgtcaagagagggggatggaagctgttgtatgcgcatcacatggagctgtagggtccctgctatggaagctaagtgccttgctctctgatgaatataaccttctcactggtgttaagagtaatattatgttccttaaagctgagcttgagagcatagatgttttcctcaagaagatgtatgagtttgaggaccccgatgagcaatctttgttctggatgaaggagttcagggagctgtcctatgacattgaagacatcattgatgcttccatgttctcccttggtcatgagtccaatcgcagaccccgtggcttcaaggggtttgctggcaggtgcatggacttcttgacaaatgtcaagacacgccattggattgccaagaaaatccattgtctcaaatgctgtgttatagaagctagcaatcggcgtgcaaggtacaaggtcgatggttctgtctccaaactgagtaggacaagcttagaccctcgcttaccagcattctacacagagacgacaaggcttgttggaattgatggcccaagggataaactcatcaagatgctagtggaaggggacgacgcattggtgcatcagctgaaggtggtctccattgttggatttggaggccttggaaagactactcttgcaaatgaagtgtgccggaagcttgaaggacaatttaagtatcaagcttttgtgtcagtgtcccaaaaaccagacattaagaagattctgagacatatactctctcagatctgctggcgagagtgtatcagtgatgaagcatgggatgagcagcagctcatccacacaataagacaattccttaaggataagagtagaatattgacgacgacacgtatcatcgcagttgctaagtattgttgctcacctcaccatgacaatgtatatgaaataaagcctcttggtgcaattcactctaaaagcttatttttcaaacgaacttttggttctgaagataaatgccctcttcatctgaaagaagtttctaatgcaatcttgagaaaatgtggtggcttgccactgggaattatcacagtagctagcttattggctaataaagctagtacaaaagaagaatgggagagcatacataattctattggttcagctcttgaaaaagatacagatatggaagaaatgaaaaggatattgctccttagttatgatgatcttccttaccatttgaagacatgtttgctatatctaagtattattccagaagattacgagatcaagagagatcggttaataaggagatggattgctgaaggtttcatccctacagaaggggtgcatgatatggaggaagtaggcgaatgctatttcaacgatcttatcaacaggagtatgattctaccagttaatatccaatatgatggtcgagctgatgcttgtcgtgtgcatgatatgattcttgatctcatcatatccatatctgtcaaagaaaattttgtaaccttgcacggtgaccaaaactacaaaatagtgcaacaaaataaggttcgtcgcctatccctcaactatcatgctcgagaagatataatgataccatcaagtatgattgtttctcatgtccgatccctcactatctttggatatgctgaacatatgcctgctctgtcaaaattgcaatttatgcgagtgttagatgtagaaaataaaatggtgttggatcacagttttctcaagcatatacacaggctttctcaattgaagtacctgcgactcaatgtaagaagaatcactgcacttcctgaacaactaggagaattgcagaatttgcagaccttagacttaagatggacacaaataaagaaattgccatctagtatcgttcgactgcagaaattagtatgcctaagggtaaacagtttagaattgcctgaagggattggaaatctgcaagctctacaggaattatcagagattgaaatcaaccacaatacatcagtgtattctctgcaggagctgggaaatctgaagaaactaagaattcttgggctgaattggagcatcagtgattcaaattgtgacatcaaaatttacgcagataacttagtcacgtccctctgtaaactaggcatgttcaatcttcgatctatacaaattcaaggttatcatattatttcccttgatttcttactggattcttggtttcctcctcctcatctcctccagaaatttgagatgtccataagctactttttccccagaatcccaaagtggatagagtcacttgagtacctcagttacctagacatctacatcaacccagtggatgaggaaacattccaaattcttgcgggcttgccgtctttaatatttctttggatatcctctagagcagcaacccctaaaaaagggttaattatcagctataatgggttccagtgtctgagggagctctacttcacctgttgggaaagcaagacaggtatgatgtttgaagcaggagccatgccaaaacttgaaaagcttcgggttccatataatgcatgtgatatatgctctttgaatggtggtatggattttggcatccaacacctctgttccctgaaacatctccatgttgagattatttgccgtggtgcaaagcttcaggaggtggaggccttggagaatgctatcaaaagcgcagctggcctcctttctgatgagctcacttttgaagtaagtagatgggatgaagaagagattattgattcctcctctcttctctctttctctccctcctctctagg

SEQ ID NO: 98982 - DNA, 856 bp, Oryza sativa
  Clone ID: PAT_MRT4530_96838C.1
atggcgagtgcggcggcggcggcggcggcgctggtggtggtggtgctcgccgtggtggtgtcgccggcgagcgggcaggtggcgacgtcgtgcacggcgtcgctgataacgacgttcacgccgtgcctcaacttcgtgacggggagcaccaacggcggcgggtcgccgacgcagcagtgctgcgggtcgctggcggagatggtgcgcagcagcgccgactgcgcctgcctcatcctcaccggcaacgtgcccttcagcctccccatcaaccgcaacctcgccatctccctcaccaagctctgcaactccatgtccgtcccactgcagtgcagagatactgcaagccaaatcccacctccagcaccatcgccgccggaaacgtcagtgcagccgaattcggccgttgatcccacggcgatgtcgccgtcgccgccgatcatccaggggcagaggccactgttgctgccaagctccgcgtggaggagagctcatgtgtccatggcgtctgtatcagtagtgctactgatagctgcatccgttttggcttgaggggcagaggccactgttgctgccaagctccgcgtggaggagagctcatgtgtccatggcgtctgtatcagtagtgctactgatagctgcatccgttttggcttgattaggatgaattgaactgggattgttttagcacaggaatttgaggcgtgttcagtgtattgcacatatttatttagcctttggaattgcacaggattcttgtaagaaaattttgagggctttgagttgattgtgtaatataatcattccttgtggattaaaaaaatgttggtataaatttgtctaaaaaaaaaaaaaaaaa

SEQ ID NO: 98983 - DNA, 4542 bp, Oryza sativa
  Clone ID: PAT_MRT4530_96839C.1
atggcagcgacgacgggcgactgggacggaggcggagtgggcagcaagcggcggaggagctcgctcgggcagccggtggcggaggcagaggcagaaggcgctcttcgacgcggccgccgcgggtggggcggcaacgcctccttcctctcctcccaccacaaccgccgcgcggaccacacctactcgttgtcgtcttccatgcgcacgatggtcgccggtgcgctcgcgatcgcgtcgtcgttccaagcagcgctcctcatctgctcggcattggcggcggcaggggtgcgctcacggcggccctcgaggctcgaccgcgccctggcgcctcccctcggggccggcggcgacaacgtcctcggcgccatgctctccgccggcgtcttcaaccccgtcctccgcgacgcgctctgcgtcgcccaccacttcgctcactcgctcgccgacctcctccaacgccctcgtcggcgccgccccgcccacaactgggcgccgtccctcctgggaccgggcgacgccctcgacgcatcgagccgccgaactcacctcgccgccctcgccacgatatgccagagagatgaaagtgatataaatgtcgcccccgaacccgcgaacgcactggggagcctcctcctcaagctccatcctggcggcttgctgaggtggctcgtctcgtccctcaagagagccggcagcagcagcacaacaatcgccggcgtgacgctcgaaagcagcgccaagacacaaatattccgccactacgacgaagtcgaccacgacaacgcggcgtgcagcgtctgcttcgtggcactggcgccatggctgctgcctcctcgccgacggagtggagctgccgcgctcgccgacgacctcctcctagatctgcctcctcctcctccggccacctccgccgcccgcggcctgctgccgctgccggtccgctccgcccctccgctcctgccgcttatccgccgcgaggacgactggacgagggagagccgagaggaagaagagggagagccgagaaggacttgtggggcccacaggatcctcgccttgagaccgccttcccgccatgaaggcgggaacccgaagccggaaaacgccacgtcaccgcgaggacgagacaagaaaggacggacaccctgcttagctggctcccacgcacgcgccagctcaggccacacagctcctgggccccacatggcggtgaccgctccgcgtgtccatctccgcgtttggattggcgggagcactgtttgggattcacttgggttcagtggcatttcccgtaataaggcaggtgttgatgataatgtggaaaacattctacggatgataggcgaggagaatgaatcggccaagactgaaccctcagatgattctggaaatgccttcaagaaatcaaaactgtcctcccttgtgaagggcttccatgaagagtatgagtaccttcacaagcactaccaacagctaattggtaaactagaaaatgttgggcacagttccagtgattcggattcatctgattcagacgacgagggagacagctcagacaataataatcttaagacaaaggtagaagatgcacttagtgaagaaaatggctggaaacagaagcttgttgaagatcgtgaagccaaagaagaaagtctggaagcagaaattgagaagctgaaacaaaacacagaagaacaagcaaaggaaatatctgatctgaagcacctactggataaagcaatcaaggataaagaagctacaagggtagagttaagttcggatgttgcaaatttgtcatctgagaatgaaaatctaaagttattggttgaaactacagagagagaggcaggagaatcacacaaaacaataacactcatggagaatgagattaggacactgtctgttgagaagcaagttactgaaaaagagagagatgacctgaagatttcaatagtagatctggagaacatgaatggggatttgagcaatcagctacaagaaacaaatgagaaatgcaccttcttgtcatcccaactcgagaaggcccagctagctgagaaagaagtgcagaccttgttatcagagattgagaagataaagaatgagaatttgatgctctcaagggagaatgataacctgaaagcatgtgagcagaatttaggtactgaatgttctcagctgaaggcaactattgctgaaacaaaagctgaaaatagcaccttgactgaagaaaaacatttacttgagagcaaacttaaacttttaggcgtggagatagatgatctgattgcagagaaagaggagctaatgaacagtatgaacatagaacgtggagctgcagcagaagaaaaggaaatgctagtatccaaacattccaagtgcctaactgagttggagaaggcacagtcaaagctacagcagctagaagcttcttttgagaatcttggtaatgacttggaacaggaacttgagaggatttctattatgcataagaataatgaagacttggagttggtgaattccaatttacaaaatgatcttgcaacagtacaaggacaaaagaatgaagctgttgcttctactcttgagctcggtaataagttagaagagaaaaaccaacaaatttcaaatctgcaggaagccgtggaaaaccttgaagcggcaaagaccaatatgtataatgaggttacagtacaccaagagaaatgcaccttcttgtcatcccaactcgagaaggcccagctagctgagaaagaagtgcagaccttgttatcagagattgagaagatgaagaatgagaatttgatgctctcaagggagaatgataacctgaaagcatgtgagcagaatttaggtactgaatgttctcaactgaaggcaactattgctaaaacaaaagctgaaaatagcaccttgactgaagaaaaacatttacttgagagcaaacttaaacttttaggcgtggagatagatggtctgattgcagagaaagaggagctaatgaacagtatgaacatagaacgtggagctgcagcagaagaaaaggaaatgctagtatccgaacattccaagtgcctaactgagttggagaaggcacagtcaagtgttaaggaactagaatcaacaaatggtgatttgaatgataaaattgcagtgctgcaaaaagagggaagctctctggcatcagagctccaacagctagaagcttcttttaagaatcttggtaatgacttggaacagaaatttgagcagatttcagttatgcagaagaataatgaagaattggagttggcaaattccaatttacaaaatgagcttgcaatggtacaagaacagaagaatgaagctgttgcttctactgttgagctcggtaacaagttagaagagcaaaaccaacaaatttcaaatcttcaggaagctgttgaaaaccttgaagcagcgaagactgatatgtataatgagcttacagtatgccaagaggagaaaaatgcagcactcctacagcttgctaatgacgatctgcacaagagcatcgctaacctggagaaggaacttgaagacaccaaggttagttctcatgctgaaattttagcactacaagaacagaagaacaaagcactgtcagacttgcagcagtctgaaatctctatcgagaacttcagaatggagttagagcaaggaagagagaaaatttcaatcttggatctatctaatgaagaaatgaaggataacaattatagactgaaccagcaattggaggagataaggactagtctgcatgctgagattgcagctctacatgaagagaaggatgcagctcaattagagttacagcaatctctggcttctgcgaggaacttggagacggtgctagaaaagcaaacagagaacctttcaactctacagcacgctaatgataacttaaagaagaacaattgtaccttgactgagcaattcgaagtaatcaagattgagctgcaggaggaggttaagatggcacatgaagagaaggatgccacactaacacaactagagaagtcagaggattctatcaagaatcttgaaagtgagttggcacagctgaaggaggaactatcagttcagatggaaagcaattccagcttgaacaagcaattggaggaggcaatattgaaagtgtcaaacttaactgaggagctcgagacagttcaagctgagactgccaatcgtgagatagcaattgcttgcctccagcagagcctcagaggaattattggcagctgccagagactccagtatgcatatggagagctagcaagggggcgccggcgcgcctgccgaggcggcgaaacggcggcgctaggtgggggagaacggcgccgcctccgcgcgcccaacgagcgctgttctgcactcctgctggtgctctccctcgccgcggagaaggcgactctcaatgagctcgatggggatggctattatgtggacgacctcatcatcggcgtgagtagcatgccgatggaagactacagggagacgcttccggctagcttcacaagttaa

SEQ ID NO: 98984 - DNA, 1103 bp, Oryza sativa
  Clone ID: PAT_MRT4530_9683C.1
atgccgccggccgactccagctgcccctgccgccgcgtcagcacgccggccggccgtgccgtcgcctcccccggcgtcacagtcgcctctcctgcaccggcctgccctccgtttcccgcggagacctccggaagtgcatccccaccggcaacagtggcattgccgccactgttccgccttcggtcgcctctgccgcgtctcctgtgcgccggccgacgtcgccactacctctccaggcacaggaacgccgtcgtcttccccgaccaggccacggcatcgcctgaatttcgccggaacaccgtcgtgccacgctggcctctccatccgcctcaccggaatttccccggtcggcccttcctccacccgtgcgccgtcggccgcgccaccaccacctccggcatcgcagcggcgagccgccccttcatcgtcttcatcctcggctccgcgtcgtcaagcgttgcgccggccgtgtctcgctttcgtccaaggatcgctgccgaagtcgttccctcgccgttcgcctccgtcgtccccgagccgtctccgccgcgcccgttcgtcgtcctcgttcccacgcctcgtcgcgtggtggggtcgatggacatctctagggcaaatgaaggctacacgagctgcggcccggtagtcgagatgtcatggcacagggccggtgtcctgctgctaggggctcagtcctgcctacctgtcccggaggttccggccgtaggtagggttgggtcggtactcttgtctatggctaggatgggttggaaactatgtcatgtcttccgtctgtataccatggtggtatgtggcacgtggttacatgtgaggaagatgtgtcttgtggcacttatgggtgtgtcttgttgagtacggtggttgtactcagtcttgctcaatttttcccaaacccagaagaggagttcctggaagatgaaggctttggtgtctagctcgtgcctgccgtcaagcgcctgtggtcgtcgccctagtcctccgctgtttttcgtttgtcttcttgtgtgctgggccttgcctcctgggacatggaataatacacgcacgtaaggaacgcccgttgggttatttccggtcgtgac

SEQ ID NO: 98985 - DNA, 340 bp, Oryza sativa
  Clone ID: PAT_MRT4530_96840C.1
ttcagctgcttatagtccccatcgttctactggcttttgtcgccggcatccttggaggaggtggaccaagcatctgctcggacaacctggctgtccagcattcctgtccggcaatccctggaagagggcactaatcgatccatcgatgatgggggaggaattcgcgttccatttaatttctacacatcgggggatttgaagcttagcaagtttagtactactatacatgaaacaactactctatgttttaaggtgatcgtgtgttcgtgttggtgttcccatgtccttgcagtgtcctgcttttccaacataataaaacggacagcataattatccgatg

SEQ ID NO: 98986 - DNA, 530 bp, Oryza sativa
  Clone ID: PAT_MRT4530_96841C.1
tgttgtcacagctgaaggaggaactatcagttccgagcgaaagcaattccagcttgaacaagcaattggaggaggcaatattgaaagtgtcaaacttaactgaggagctcgagacagttcaagctgagactgccagtaaaattaatgacatggaaactaacacaaaagatttggtaaatacaattgttctattatcttctcagaagaacaaagtggaggagcatatgaaaattattaccgaagcatgcatggagaaaatgtcatttatgaaagatttcgaagatcaagtaaagcaaaaaattacagatcgtgagatagcaattgcttgcctccagcagagcctcagaggaattattggcagctgccagagactccagtatgcatatggagaggtatccacaaaggcatcacaccttgaggtacttaggagggaatacctcgtgcagatagatacattggagaacaaacacacagaaattatggagaaacatcgtcaattaggggaggaaaatacatttgcaaacaaagag

SEQ ID NO: 98987 - DNA, 571 bp, Oryza sativa
  Clone ID: PAT_MRT4530_96842C.1
tccccgggctgcaggaatcggccgaggattgttttcgtcggcttgcttttataattttgtaacctaatagttacctttatactatatcgtatatcgtagttaagtaatacatagaagcaattatttataatgttattcatcgactgtaaagaatggtaggcttattttcctcaaaaaaatatgtctactaaaataagtgttaaagtaaaattaagacttttttaattggatataggttattgttttctattaactagccgccaaccacgtcgactcgcgtattgcacatgtaggtggccggtgcgggagtttcgcaacattcatttgctcgttcccgacgacatgaggcggctagctgttgtacgatgctgattgcacggtgaatgtggtcatggatataacactcaatcgaccacctctgcctccagggaggacagatcctgcaacctccaggcagaagtctcggttcgttctcagaagtctatggtaacagccattgaaaataatcaactttagaaacaaaatactttcccgtttcagaaatttgaaaactcaagttccaccatatttg

SEQ ID NO: 98988 - DNA, 783 bp, Oryza sativa
  Clone ID: PAT_MRT4530_96843C.1
atggctgacaataagaacggcaagaaaatcggaagctatgataatagtgcctcaagctcccaagctaatgaatcaccgggtgtaggctatatggcagtggcccaacacctgatccgtcagaacaaacagctcataactctattacagcaagacagtttgcaatatcagaactggagtcaaaatcaacatcaagcccagatgaatccgacgcaaccattcgcatctcaagtaagcataacgccgccacctcagaaggctcgcaatgccaaaccaccaggtgatctacaggatactgctgaattgtggtccggtttcggcggtctaaccggcggctcaccggcggtcagaccggtggcatcgcggcggtcagaccggcggcgacaggagtcggcagcagatcatctcggcggttcaaccggagttcgatcgctgtcagatcaacgttcattaggcggtcagaccggcgcattcacttcgtcaccattctgggtactacccagcagagtttcccgtacctttggaataggggttgccttcaccctaacaataagcacggttaccgcgctaaccatggcaaacacgatcgagaaccacggtaagatgaacgccaacgcaggtggcatatgtatgctggctcatgcttccctgtcagtgcaaacgtgcgaggcgtacgtgctcccttcagttcagcagaatgcagggaaactgcagagcgatggggagagcccagcagcagaaacagcagctagcgtgcctgagcaacctctcctccggacacaataa

SEQ ID NO: 98989 - DNA, 2244 bp, Oryza sativa
  Clone ID: PAT_MRT4530_96844C.1
atggaaactattagcaatatctttcacaatgacccactcccacctctaggagcaagagcaaaccaatctatcaagctgagaaaattcattatttctccatatgattcccgttacaggacctgggagacgttcttgctcgtgcttgttgtttattcagcttggatctgcccatttgaactagcatatctgagaaatctctcctggaaggtttctcttgttgacaatattattgacagcttctttgcaatcgatattattctcacattttttctagcgtatctggatcaaaagtcatatcttctagtggatgatccaaaaaggatcgtggctaggttacttagcatgcttcgattatggcgtctccggcgcctcagtgaattatttgccaggctcgaaaaggatatccgattgaattactactggataaggtgcaccaaactaatttctgttacactttttgcggtacattgttcaggatgcttcaattatttaatagctgatagataccccaatccagcaagaacatggataggagcagcaataccaaactacagatcacaaaatctgtgggttcgatatgttacggcaatttattggtccataacaacactcacaacaactggttatggggatttgcatgcagagaatcaaagagaaatgttatttagcatatgctacatgctatttaacctgggattgacagcatacctcataggtaacatgacaaatctggttgttcagggaagttgccggaccaggaattttagggacacaatccatgctgcctctcagtttgctgcaagaaatcagttgcctggacatattaaggacgaaatgctatctcatatctgcctaagatataaaacagaggggctgaaacagaaagaaacattggatagtctccccaagggaatccgttcaagcatagcgtgcaacttattcttacctgttatagaaaaagtctatcttttccatggtgtctcatttacttgcatgatccaactggtaactgaaatggaagcagagtactacccaccaagagaagttgtcatactccaaaatgaagcaccccgagatgtttacatattagtttcgggagcagtggaagagcgggtagagatcgatggaacagaaaaggtccaggaagtactgtgcaatggtgaaatatttggagaaataggagttatctgcagcatcccccagccatgtgctttccatacaatcaaagtttcacaactattaaggctgaacacagcagtgctaaagaacattatcaaggaaaacagcgatgacagacgagttattctgaacaatctttcccagaagatgaaccaagatcacaggttctctaccgaggtgatggaaaaatctttacagatgatgcatcaacactttggagagtacaacagatgttctgcattgaatcaagacaatgagaagaatgaattaaaagctaataatggtcattctatggctttagaatggaaaagagtgacaatacatatgtattcacagaggaacaaaagaccggaggcaccgcttgcaaaagttataaatctaccaggatctcttgataaacttttcgccatagcttgtcagaagtttaacaattatcgtcttacaaaacttgtcaatccagaatttgctgaaattgatgatattacagtaattcgagatggattgggtgaatttaggttagttaacatctacactaggaaatcacaacaacagttcatcttgaacgtatcaaaactatatcaatttgacatcggcacgcggcaaggacatggtgccatgtggcatgcggcggccggcggaggtgatgatgaaggagatggtggcgcacggcggccgatgcacggagtcccaaacaaggagacgacggcatcccgaggatctctcaaggttgaggaaaagggaatggatgtagtggtagtcgagggcattcaagaagccatcgtgaggacgaggacgactccccggccgcaaggacaaggacgactttaccgatcatggtcgcaaggagaggacgactccaccagccaccgtgcactacaatctcctccgccatcgcggattttccgggattttgatagaaaccagattaacttccctattgaaacgcagtttcaagagggtttctgtggtggcctttctgtaacaaaactatacaatatgctcaattttcaattgggcttagaactttgtaggatcaagcgtaacattactgatctgatcccttag

SEQ ID NO: 98990 - DNA, 824 bp, Oryza sativa
  unsure (1)..(824): unsure at all n locations
  Clone ID: PAT_MRT4530_96845C.1
tgaaggtggacaatatataaggttaccctctatgaccggctttactttagctcgcccggaagttggggattgtgaatgataccatttccccagtaacagctatgccatgatttcgctagctctatattaccctcctcaaggacatagctctgagctccacgcggtgtcgtcgctctcgtactagtggggcccccgggcgcccgcgctttcgcgcgcgcggcccctttttttttttttttttttttgatagaagataaaagagggtaaacattaagcaaaattaagtcacgagctcatatcatatctcaaacttaacatgcggcataataagactaagcacttttgagttcgatccaaatcacacgagcatcgagctcacacgctacaaaagattggttcccccttcttgttttcttgcatatagcacttaaaaggaaactactaccaagaacaaacgggacatcaccggcggagcggcccggcgcgtctacttctcggaggagttgggcccgcgcttcttgccgaatccgacgacggcggtgacgaagcggcggttgtactgcatcctcttgtgggcgcggccgcggggcttcttcttcttgtcctgcttcgccaccttgggcgtctggccgcgcaccttcccggcgcgagcgagcgatccgtgcaccttacccatgtcgacggcggcgagcctgccgcggcggcggcggctccgaggccccggggtgggcgccgcggcggcaacccctnccaattcctgcacccggggattcntattctaaacgcgccncgcggngaacccccttgtcccttatnagtaattt

SEQ ID NO: 98991 - DNA, 2287 bp, Oryza sativa
  Clone ID: PAT_MRT4530_96846C.1
ttttttttttttttttacaagacaaatactgcatgttttttggcactccatgctggcacgcgggagcgagcgacgtcaagggcttttttgagaagagaacataacatctccgatccacaaatactcctagtacaccaacccagtcaaacaatacattacaaaatgatcattcaatcaaaacgcatgaaaatagtacaaaatactggaaagtgaaatgctgaaagtatccatgaaacattgagaccatgatgctgattcactaccgacacacggtgacagcatcgctcaggtggaataaaccatccgtgtgcagcgaggccacaacacagacagaagaaggtaccagggttaaaaagtcctgtaaaacaagctagctgatacaatgtcggatgacaacaggtcataagagattagggcaaacaacctggggtcagaccttatcagcaacattcaatattgtctgatcaagagcttcacggctaagccacagcatttagatgagcttgttacaaagtcacttgctactgagtgcccctacacaactttgattaagatacaccatgtgagatcatgaaatgacacctgatgagctgatatttacacaggttatcttattacttccagagattggcatacaagatcgttctgtcagataactattggcaatatattgctcggtctatctgaggtggtattggttttatctcggttccaagctcttgttcaatgcgatacaagttaaaacggtcctcataggtgatcaaattcacagccaaaccaaggtggccgaatctgccagatctaccaaccctatggagatatgtttctgcgctcttggggaaatcaaaattgataacaacattaacagcttggatatctattccccttgtaaaaagatctgtacaaaccaagttcctgcatgcaccattgcgaaaatcatggaaaaccctgttccgatggtcttgcaacattttagcatggatatagaagcaagaataaccaagctctgtgatcttctttgccaatagttcaacacgatttaccgagttacagaatattatcgattgattaatttgcagcttggaaaaaagagtattaagacagtggactttctgcctctcttcaacaaaagcataaaactgtgtaattcccttcagtgtaagttcatccataaggttaatgacatagggtttagggagatatttgtccttgaactccttgacagtcacagggaatgttgcagagaacatcaaaatttgccgattcgatggaagataccgaatcaattcctgaatagacggttggaactcaggagaaagaagcttgtctgcctcatccataacaagcattgaacagttcttcaggacgcagacacctttctttgtaaggtctaaaatgcgaccaggagttccaacaagtaaatgaacaggttgataaagacggacaatatcatcctttaggctggttcctccagtagtgaccatcacttgaatcttcaaatgtttcccaagctccttgcaaacttgtgatgtttgtagagccaattcccttgtgggaaccaatataacaacttgaatagcatttttgtcttgatcaatcttttccagcgcgggtatacaaaatgcagcagtcttgccagttccattttttgctcttgcaagaatatcactgccagttaatgcaataggaatactttcttcttgtataggagaaggtctttcaaatcctttctcatatatccccataaggagttctcgcttcagaaaatagtcttcaaattcatttcccttggtagcagtaacatcctctgtcctgtagcgtgtatcttgcggtgggagcttcagttgggccttccagtcttgtgaactcgaatctatgccgtccgcgacaggcggcgccttctgctcgctggcgcccgcggcctcggcggcgatctggttccgccgaagccactgctgatgctggctgttgtgcggcgtttgctgcggctgcggctgccgctgcacgtactggtggtggtgcgggtgcggcggctgctggtgctggtgctggtgctgctgatgctgcgatggcggtgggccacggccgtagtagttagggttcccgccccggccgttgccgatgccgggagggtacctcgcgcgcggatccatcgctacgagggcgcgcggcgcggcggagctcagatccggccggaggcttggctgggaggaagggatcaaggcggtgcttctctcaaattgggggatttttaggggagcctagtcctcgggtcggggaggtggag

SEQ ID NO: 98992 - DNA, 819 bp, Oryza sativa
  Clone ID: PAT_MRT4530_96847C.1
atggaggcgcttgacccggcgacgatggcgagcacgggcagaggatgcaagcgagcgacggtggataacgacaaggcagtggacggcggcggcctcggcagcgttggccagtgcgaggaggagtttggccagctggatagccatgctagtctgctggatgcctccgtcgcacatcgtctcacatctctgcccttgtgtttgatcgcgccgtcggtgtgccacggtgcgacgatgaagtacgggacgtacgacggccgcgcggcgccgaacacggacacacgcatcgagccatccagcgcgggggtgaccaactatcaccgcccgcaaaacggcgggtcggcatcggcatgggcagcatccggggcggacggcaacgtcggcgaagatcgagggcacccgccgccgcatgagcgactctcttccacgccctgccgagaagcctcgccgccgtcggagcccacgtctattgctcccatggtggtgctgtgcctgcgtgcggcggcggcgtcgccgctgcaaacatcacgccggcgcccccgcatcggctccggctctggtgccggcgcctgcctccgccgctcccccacctgcgtcccgatgccgacgtccctgctggaggaaggcgccaatcgcgtgcgccgtggagtctccgcggcgtcggcgacggcagcgggaagcttcagcttcggccagatcgacggcaccctcgccgccggtctccgatgggaccaggactatggcagtaaagatttggctggaacatccaatattttcagccaattgtctgaagatgtgattaccaaggatgcaaataactag

SEQ ID NO: 98993 - DNA, 2540 bp, Oryza sativa
  unsure (1)..(2540): unsure at all n locations
  Clone ID: PAT_MRT4530_96848C.1
ccgtgnntcacaactattcgcttgcttgatactactgcatatatcacgttttattcatgtgcaaacatagcagagtagtattacattttcgttcaggtacatacacatacagagcatattacgcacatcacacatcctctgagatgtgtgatcaaccttgcatatcagagacaaactgatcaacccatcctgtaaataagagggaatacatacgaaatcctttttagcaaggaccaactgtattcgagcatatttagtacttcagcatcaagagtaccctgattcgctttcctgataagcgataattatctagtagtcgtcagaactggtcttgcctcttccggttgcgtactcatcagtgctcgacttgttgtagccaccagtgtagtcaccggcgtcagacttgtcgtagccaccaccgctgccatagtcgccggtgccggacttgttgtagccgctctcatagttgtccgtgcttgatttgttgtagccgccgccgctgccatattcaccggtgccggacttgttgtagccactctcagagttgtctgtgcttgatttgttgtagccactgccaccatatccatcagtgttggaggcgttcttaccactgtcgtagtcgccggtgctcggcttgctgtagccgcttccgccatagccatcatcgttgctgcttgacttcttgtagccaccatcatagtcgtctgagcttgatttcttgtattcgtcaccacgaccatagtcgccggtgctggagtccttgtactcgctgccatagtcgccagcgctggacttgttgtagccaccaccactgccactgtagtcattgttgccggatttgttgtagccgccgctgccgctgtagttgtcagtgccggatttgctgtagccaccgctgctgctgtagtcgtcggcgccagatttgttgtagccgccgccaccactgtagtcatctgtgccggatttgttgaagccgccagttaagtcgtcggtgttggacttgttgtagctaccagtgctgccatattcatcagtgttggtgttcttgtagccactctcattgtcgtcgttgccggactcgttgaagaggccagtgtcacgaccgtagtcgtcaccgctgcggccataatctccagtgttggtcttgttgtagccaccttcctcgtcatcagcaccagaccttctgtagctgctgcgatcatactcatctgccattctaaaatgaaaagagagcacacaaaaatcagggagatgctgggtggaaccatggtttgcaaaaggtgcatgcatcaaactgtggtcatatggatactagaatgaactgcaactgataaccattcattttgcttacgcacttggcaaaatgaagataatattccacatgactcaacagaaatccatgattgctgtccatttgtaaggatctgaagctgttacaagtcaacgtcgcttccaataacttcagagagggtaatttcgtccaattatattgaataagacactctgttttatgcatagcaagcagctgtcacattgtcttccaagtccaaaacaattattgttatcacttgaagagcatctcagcctttattcttgagtaaacttttgcaccattatttaaatcgaagatcttcacagcccaatctgatgatgattcttccaatcttccaagagtaacaaacaagaaagattttgatcacctcggtgattcctttatgggataggtgttgtaactttaaactcatcttctgccttgataaagacaatagagcacatcaaatccattttaacaacaattcaagacaattctgttacagcgccacataaaaatcgtaagtgaaccaaaaccgcggaagcattgcacagactgttcccacaaactgattttgtcactgttaatctatagtagctttgttaatcacaataaaacagaaaacgttaatagcatccatgtaactcccccttgacaaaaattgctgataagttctgcttgtaaaagaaactatcagttcagtcctacaacattcttaaaagtaagctgctcaccttgataaagacaatagagcacatcaaacatcagctccagagatatatcacagagagatcattgtacatgattgatacattcaagcagatctttagcacgatttgccaaataatgttctggaccatagcatatactagcaaggtatttgctgtaggtgatgcagcaaacagctaagctcagaatgcactctttctgttgctcgatgagagttgctggcgcatgtttaccagaaaggttgaaagaatcttcctcagaaagctggaaagcctgaaatattgctggaccaagccaactgaaatctatggggttctttatcttttccaggcagggtaagccttgggctaaaaatggccagcactgcaacgataaagataacaagggcttgccaaacttctcacaagttgatctgaattgattgtaccgcacagaatcatgttttgccgaatttgttgaacatgaagcaaagctgaagatagcttcaggcatgtaaatc

SEQ ID NO: 98994 - DNA, 416 bp, Oryza sativa
  Clone ID: PAT_MRT4530_96849C.1
cggtgctttaacgatgacaaatgtgtgctccgtggatgacaacaagctcggagctggaatcttttatagggattttccggcctatgtgaaactcggtaacgggaagatgattcctggcgctcgtgatatactgaggaccggctctggatccggatcgaacgtatcccgctcgctcaacaggcaacaaacactagggatgaaaactgacttattggcgttggaggttgtgggatcgtctactccggagtgctggagggaaacaaccgtgctgtgggaaagcggagtaaccctagagctaccaagggtgaaatcgttccgcaacatggatgcttctgcatgatcatatgcagcgccgtcatctgctgtgcctgattgggtattgttagcaccgggttgccatcaacctgtgctgtgac

SEQ ID NO: 98995 - DNA, 567 bp, Oryza sativa
  Clone ID: PAT_MRT4530_9684C.1
agcggcggccattgggcacggcagatccaacaaggcaggagcttaattcaatgcctaggtgttgatctccctgggggattcatgaagcaccccaaggtctccttcccaaccacctcatgtttgatcctgataatattacatacaatgaatcgcctccatcctagtgctagcgtgaaaatgggatgttgtttgtgggggtttcttctgttactattgattgcagttgtaaccatgttgattttgccgttcgggttgagcgccagccacaaatgcgactctggtctgcagggatgacgcgatgtgtccgtgtctgtggaggcaacagaaggatcgccggtttgtcagtgcacgttaggagagccctgtggatgaaatcgtcgcagcaacgcagcagctcctgtcgatttcgtctatttctactgcacgattgtatcctgaagtttgctacctttaccttccaaaaggatggttttatgtatgtctctaagttgtagttaaggcgatgtattgggaaatttatatttccctaaacttttattaatatatctatctaccctataattcatc

SEQ ID NO: 98996 - DNA, 2007 bp, Oryza sativa
  Clone ID: PAT_MRT4530_96850C.1
atggaggagaccgctgtagcgaatggaggagcagctgatgatgttgctgctcctgataaggacaatgacattaaagaaaaagctggcaagggcaacgaggtagcagtagagaataagaatgctgaagagcagaataaaggaggctcagagaatggtaccaagggtccatctgatggagatgttgagatggcggaggctgagactgcaaaggagagtgatgtgaagcagttggacactgaggatgcgaaaaaggatggtgcgcaggatgcagatgcaaatgaagaaaagaataccaaggacacagaaggtgaagatgtcaagatggctgaggctgaggccgaggcaggaaatgccgatgtcaaggatacagcagagaaggaagataaagatgagaacaccaatacggagaagcaggaattgaaagatgcaaaagaaagtggttctgagaagcaggaggaattgaaggagcaagataaaagtggttctgaaaagcaggaggaattgaaggagcaagataaaagtggtttagctgagtacgaggaaaagaaagcagaagaagagagtggtgctgagaagcaaggggaagaggaagcagaggaaaagggctctgctgataatgacaacgaggaaggagacaaaaatgcaaatatcagtgatgaacatctgaaaaaagatggtggaaaggatggaaacaaagatgaagcagaagaagaggaggtcagtgaagcagacaagaaggtagaagagaataaggaggaaacaccgaagaacaagaaggcaagaagtgcaagggatagaagccaaggtaaggataagaaacaggatgggtccaaatccagggaagcgaagagcttactgaacaccgccagcccttatggtactgatcgccctcagcgtgagaggaaaacagtggagaggttggttgaagtgattgaaaaggagcccaacaggaacttcgtagttgagaagggtcgtggtactccgttgaaggatataccaagtgtggcgcacagaatatcaaggaaaaaacctgctgatcttaagtttcttcacaatgttctttttggcaggaaaggcaagactgttgattttaaaggtcatatactccagttctctggtttcgtgtggcatgaaagtgatgaaaagcagagggcgaaggctaaggagaagcttgacaaatgtgtgaaagacatgttgttggaactctgttggatccttgctattccgactccaaaagcaaacatcagaaaggggtcgaattctcggaaacgcaagagaggaagcacacccaagagttctagcaagaaatttgatgatgatgacgacataactccaagtaaaaagcggaataaagctctggaatatgatactgatgaagatgaggatgatgcggatcccatgaagtcagatagtgaggaagatgactatgattctgagaaagagaaggcaaagaagaactcctcagatgcaaaagataccgctagtaaaaagaaggctgcaacagggagcagccacaagacaggtactccaaggacagtgagcaagagttcaagcaaaacaccatcttcaaaagtttccaaggaaaaggagagccctgaggacagtgcaaaagtcttctctaggaagaagaaatctgtcacaccaaagcgtccttcaagctctgaaaaggagataaaagacaagaagtcatcaggtaaaaaggtgacaaagggtaaaggagaatcagcagaagtaggtctacccagtaaggacgagctgaggaaaaccataactgaaatccttaaaaaagttgatttcaacacggctactttcagtgacattcttaaaaagcttgaggatcgctacaagattgacctgacaccacgaaagtcagctatcaaaatcatgatccaagaggagctaaccaggctgtcgaaagaagacgacgatgaggatgaggacgaggatggaaatgaagacgctgagaagaaaaaaccacaacatcaagccaaggaggtggtggcctga

SEQ ID NO: 98997 - DNA, 576 bp, Oryza sativa
  Clone ID: PAT_MRT4530_96851C.1
gcttggtatggtcaactggtcatgtcaaggccagaatggtagcattacaatatatttccttagatgcggcatcttattgcagataaatgaccgaattcctaaattcagatacaatatttcatcaacaaaataaaaaacacatgaatttttctgtgatccgctgtagtaatgttggtatgtttttcttcatctgaaatggatcaggataaattagcaagataacccaattgtatttattctacccataattgaatgtgatgttcagatcgtaaccatctctttttgccccacgcaggaaagagaggggaggacagaacacctttgaactgggaaaccagggtaaggatagccctgggagcagcaagagggattgcacacattcacactgagaacaatgggaaatttgttcacggcaacatcaaggcctcaaatgtcttcctgaacaaccagcaatatggctgtgtctccgacctcggcttggcatcgctgatgaacccaatcaccgcaaggtcccgttctctgggatattgtgcaccagaggtcacagattcgaggaaagcatcgcaatgttcagat

SEQ ID NO: 98998 - DNA, 2607 bp, Oryza sativa
  Clone ID: PAT_MRT4530_96852C.1
tggatccccgggctgcaggcgaggaggcgacgcgactagctgctgctgctgctgctcctgctccactccgccctaggtcaggtagtgcaataagggtctctcgggatgcctgaggaagacccagcatcggcaatggaggagaccgctgtagcgaatggaggagcagctgatgatgttgctgctcctgataaggacaatgacattaaagaaaaagctggcaagggcaacgaggtagcagtagagaataagaatgctgaagagcagaataaaggaggctcagagaatggtaccaagggtccatctgatggagatgttgagatggcggaggctgagactgcaaaggagagtgatgtgaagcagttggacactgaggatgcgaaaaaggatggtgcgcaggatgcagatgcaaatgaagaaaagaataccaaggacacagaaggtgaagatgtcaagatggctgaggctgaggccgaggcaggaaatgccgatgtcaaggatacagcagagaaggaagataaagatgagaacaccaatacggagaagcaggaattgaaagatgcaaaagaaagtggttctgagaagcaggaggaattgaaggagcaagataaaagtggttctgaaaagcaggaggaattgaaggagcaagataaaagtggtttagctgagtacgaggaaaagaaagcagaagaagagagtggtgctgagaagcaaggggaagaggaagcagaggaaaagggctctgctgataatgacaacgaggaaggagacaaaaatgcaaatatcagtgatgaacatctgaaaaaagatggtggaaaggatggaaacaaagatgaagcagaagaagaggaggtcagtgaagcagacaagaaggtagaagagaataaggaggaaacaccgaagaacaagaaggcaagaagtgcaagggatagaagccaaggtaaggataagaaacaggatgggtccaaatccagggaagcgaagagcttactgaacaccgccagcccttatggtactgatcgccctcagcgtgagaggaaaacagtggagaggttggttgaagtgattgaaaaggagcccaacaggaacttcgtagttgagaagggtcgtggtactccgttgaaggatataccaagtgtggcgcacagaatatcaaggaaaaaacctgctgatcttaagtttcttcacaatgttctttttggcaggaaaggcaagactgttgattttaaaggtcatatactccagttctctggtttcgtgtggcatgaaagtgatgaaaagcagagggcgaaggctaaggagaagcttgacaaatgtgtgaaagacatgttgttggaactctgttggatccttgctattccgactccaaaagcaaacatcagaaaggaagatattgtggcaaagctgttggatttcattgctgaacctcatgctatggctgattccgggcattcggatgatcaggggtcgaattctcggaaacgcaagagaggaagcacacccaagagttctagcaagaaatttgatgatgatgacgacataactccaagtaaaaagcggaataaagctctggaatatgatactgatgaagatgaggatgatgcggatcccatgaagtcagatagtgaggaagatgactatgattctgagaaagagaaggcaaagaagaactcctcagatgcaaaagataccgctagtaaaaagaaggctgcaacagggagcagccacaagacaggtactccaaggacagtgagcaagagttcaagcaaaacaccatcttcaaaagtttccaaggaaaaggagagccctgaggacagtgcaaaagtcttctctaggaagaagaaatctgtcacaccaaagcgtccttcaagctctgaaaaggagataaaagacaagaagtcatcaggtaaaaaggtgacaaagggtaaaggagaatctgcagaagtaggtctacccagtaaggacgagctgaggaaaaccattactgaaatccttaaaaaagttgatttcaacacggctactttcagtgacattcttaaaaagcttgaggatcgctacaagattgacctgacaccacgaaagtcagctatcaaaatcatgatccaagaggagctaaccaggctgtcgaaagaagacgacgatgaggatgaggacgaggatggaaatgaagacgctgagaagaaaaaaccacaacatcaagccaaggaggtggtggcctgagctgagcattggtgaaacctcgtaggtttagcacccgctgttaattattatccgctgttaattattattttgtacctgcatgtatgccgaaccttgtgcttgcatcatgggcagcccccatgttaattattgttaatccgtgtccacagatagccaaaaaccatatccctgtttggtaatgtcaaaaacaaggttcgcttaggcagccctacacctgtagctgacttgggaggcaatttcttaggtaactgttgatgtccaaaaactctgcaatgggatgtggcagagcatcatgtaatgaatcatgttcgtcataggtttgaataacaagtggacgtattaggctgtaaaaaaaaaaaaaaaaaaagggcgaccaatataaaggataca

SEQ ID NO: 98999 - DNA, 249 bp, Oryza sativa
  Clone ID: PAT_MRT4530_96853C.1
atggcggccggcgccggcgccggcggcctctccggcgactactaccggcggtcgtgcccccagctggagctcgtcgtcgacatggccctcgcgccggtgtttgctgtcgaccagacctcgccggcggcgctcctccgcctcttcttccacgactgccaagttcagataatggaatataatcctggcctttactcaaagaggctacagccaataattacactaactcaacaaaaactcacacctgaataa

SEQ ID NO: 99000 - DNA, 337 bp, Oryza sativa
  Clone ID: PAT_MRT4530_96854C.1
acggggaacatccaaagataagggctttccacgaaacaagggccttacaggcaaggcagccaaatatgaactgggcttaattaatacacccaccctttggatacattgacaggagggcattggaaacgtgcccaatacgaaggggaaaccccattttaatttgaaaaggggggaacatcttctaccaagggctagaaagtgcaaggattagggccccccctaaaaaggggggcaaaggggaggtcattgggctggcaactgggaggcatcatgggtgcaaacaaatggtgacatggctaaacccgattttgaagggcaaaaccagaaatcatgggtg

SEQ ID NO: 99001 - DNA, 556 bp, Oryza sativa
  unsure (1)..(556): unsure at all n locations
  Clone ID: PAT_MRT4530_96855C.1
cccacgcgtccgcccacgcgtccggctaaagtggtcaaggatcgtcggcggaagaatcctgttagcagcataattcttctttctgatggtcaagacacccattcatttctatctggtgaggctgatataaactacagtatacttgttcccccttcaatccttcctgggacaagtcatcatgtgcaaatccacacctttggttttggtacagaccatgattcggctgccatgcatgctattgctgagacatctaatggcacattttcatttattgatgctgaaggctcaatccaagatgcatttgctcaatgtatgggtggcctccttagcgttgtagttaaggatatgcggctgtgcatcgagtgtatagatgaaggcgtgtctcttacctccatcaagtcaggcagctatgcaagtcaagtagctggaaatgaacgcagtggattgttgataatgtgacctctatgcagatgaagagaggggatttctggcactctactgtncagncgacatggacagactgnctgacaaaccaaatgcacatcctagatgcata

SEQ ID NO: 99002 - DNA, 413 bp, Oryza sativa
  Clone ID: PAT_MRT4530_96856C.1
tcgattctcttgagcggactttctttttatgacattctctgtggctctctcacgccaggtatggtcagtggggccatgtctatctatgctcctatatatcctctattctctacaggctatgctgtacgctcgtcctcttcgcttggtcttggttacatcgtaatatctcgttatatttcttgctctttctctgctgttcgatttttcacgactaatctttaacccttcatctaacatcgcatcttcgtgtttctcccttttcttcttttgtcttcttttctccttttcttcttctccttatgtctcctactgttcctctcttctcgtcttcattaattctcctccttttcccctttccccgtcctttcttccatttttctttcccccttctttcttttccttttcctcttctc

SEQ ID NO: 99003 - DNA, 261 bp, Oryza sativa
  Clone ID: PAT_MRT4530_96857C.1
atggcggcggtagctgcgacaacgacgatggtgatggtggctgcgactacaacgacgccaacggcggctgcgacgaagacgacgagcgaccgcccccatcgacggcgccaccagcttctacgcccacacacctcggatccgcccgcgtcgtcttccaacgcccacccaacagccgccgctggatctggcctccacggggttctgtttgttaagatgcagatcattactagtgtgatgtatattgttactcaaattgtgtga

SEQ ID NO: 99004 - DNA, 240 bp, Oryza sativa
  Clone ID: PAT_MRT4530_96858C.1
atggcggcggtagctgcgacaacgacgacgacgatgctgacggcggctgcaatgaagacgatgagcgaccgcccccatcgacggcgccaccagcttctacgcccacaaacctcggatccgcccgcgtcgtcttccaacgcccacccaacagccgccgctggatccggcctccacggggttctgtttgttaagatgcagatcattactagtgtgatgtatattgttactcaagatgtgtga

SEQ ID NO: 99005 - DNA, 788 bp, Oryza sativa
  Clone ID: PAT_MRT4530_96859C.1
caaaaaagaaaaaaaaaactcgttttcttttcttctcttctcttctcttgttgcggcgaagggggagaggaaggtcgaggtcgacgagatgggcggcggcaatgggcagaagtcgaagatggcgagggagaggaacatggagaagaacaagggcgccaagggtatactaacctacccccttctcctcccaatcgtctcgtgcctcgatttggtcttgatttggtccttgttcatgtgtttcttgcttcttgatctcatcatcctcgtgtgttgtgtgtgctgttgatttttcgcagggagccagcttgaggccaacaagaaggccatgaacatccaggtgagcacccgatccatctcctcccccctcccgattcgctccctccacctaaccctattctattattcctcatcttcttctttcccccaattgcttgtgttttgggaccacgatttatggtgggatttagggaggattttttgattacgcgcgtgtagacacgcaggaaatcaatcgggttcaattccttcggctctgttcagacatatatcgacagcctatgttctcaaagttctgttaattttgagcttttataaaggaaaaaagaactgctgatgtaaaacaatcgtttatttttcacaagataggctgctgttaatgattccaggttagctttatgcttgcctggatctaattccaggtttggttagttgagatccatgtactcttatagttctgtatatgtcagtgtgatgatttatctgaacctttcggtagcaatagcatcgac

SEQ ID NO: 99006 - DNA, 1968 bp, Oryza sativa
  Clone ID: PAT_MRT4530_9685C.1
atggatgaagtcgggcgtcgatggacattctccagggcaaatgaaggctacacgagctgcggcccggtagtcgagatgtcatacggcggagggttggtgcccaatgctaggggctcatttctacctgcctgtcccgggtatcccggccgtaggtaggattgggtcggtacttttgttcacggctaggatgggtgaagggttatgtcacatgtttacgatgggtttcaaggccatggaatgcggagtaaagatgtgttttgtgggttggcctgggttggcttgggacgagctgggacccagggtcgggttgccagttcggtccgaatcatcgtaggccttgggttaaggcagtactaggtggtcagctttgcgaagaagaagatgtcgtcagttgtttgccgaagctccggaagactgcaggatccgctagcgaagcgaaggaagcagtgaagccagctgtgaagcaggacaaaagacttagatctgttaaggtcctatccttagtttctaatctggctctcccctttgttttccctctctccctctccaaacctttgcaacagatggctgacaatgagaaaggcaataaggtcagaagtcaggatattggtacctcaagctcccgagtgaatgaagcaccagacaccagtcgtgtgacactggtccaacacctgattaaccagaaccgattgcttatagagatactacagcagcatcagacgccaatgctgaacctgaatcaaatacaacctcaagtgcagttggaggcagtccaagcactcaccccacaagtcagcatgccgccagcatcccgaaggacccatgatgacgtgccacctgttgacccaaaagaagcaagtaacatttgctttacgtgtgatgagcaagtgcactatgcaagggagcgtcctcagcagaaaagaaaaacaccaatgcgaaccgaagatgaagtccgtaagatgatcattaccagcacagaatggcctccaccaggaatgacaagacgtcagagaagaaataccttccgaggtgcaccacagttgacagagcatcttttagctaatggaggtagagtatctgatagtgaagattcagatcaagtctcctcagatgatgaagatgaaatggaacgtaaggcatgctctcgttgtggagaaatcggtcatgtcgccagctcgtgtgccactatatgcgttcattgcgaggaagaccatccacccgacaggtgtccaacgagcaggatcacttgtttcttttgtgaaggaactgatcatgtaccaaaagattgtcaattcagttttctgctgacgaagaagatggctaaccaacccgccagttccaacggagagaagcatcaaggcaacaccaatcctcgccaagattacagtttcagcctaactccagtgccaggacagaggaatcgaaatgagaaaagaaaatgccgagtccgggaagacatctgttgcttcaattgtcaaggaatgggtcatttcgccgacaagtgcccaaaaccgagaaacatagctgccggcacgtcagtccacgcaactccctgcaatcagaagcttgctcctcaacgaattgtcatccatgcatccccgaagcagtcctatagcccgcgttgcaacagctccaattccaatgaatgcactaccacaaggtgtcaatgctcaatttcagccccagccaccagctgacaagacagaggccagtatctgcgttgtacctttggaaattccaatacagcagctgagaaatcaagtacaagatgaagaacccgagtgtaagaaagttattgtttgttacaactgcagtgaagaagggcattactccgaaaactgtccccaaccaaggcaaaatcgacctccacattaccgccaatttacacgaagcagacattccaatcgtattgtggtcactggagcaaacgccgtacccgtaaggcctcgtgataatcagaacccatag

SEQ ID NO: 99007 - DNA, 439 bp, Oryza sativa
  Clone ID: PAT_MRT4530_96860C.1
gcggccccgcaacgccgcgttcctcgcgccgctccggacgtcatccgcagtttgtaccaaagcagtttcaaacagtgatggcacccctggaacaagcagttctccacatgtggtgtgctttggagaattgctcattgacttcgtcccaactgtcaatggtgtatcattagcagaagcgtcagccttcaagaaggctccagggggcgcacctgctaatgttgcagttggaattgctcgtcttggtgggtcatcggctttcattggaaaggttggcgatgatgaatttggttacatgctagctgacatactgaaggaaaataatgtaaacaatcaaggattgctatttgatgcgcatgctagaacagctttggcatttgtgacactccgaaatgatggtgaacgtgaatttatgttttatcgcaatccaagtgcagatatg

SEQ ID NO: 99008 - DNA, 1542 bp, Oryza sativa
  unsure (1)..(1542): unsure at all n locations
  Clone ID: PAT_MRT4530_96861C.1
cccacgcgtccgnnnacacatncnanatcgcaagcgnncaccctttttttttacctttttccgatcacagaaaattatgntaattaatttgaagtaatgtgtagtttttatatagctcaaaatccaattttcatagcctcttgcacctgattattttggttggctggaagccacggttgacagttgacacatcaccaaggcgccatgagttattcacaccaaattgcacgaacaaataaacctattctaacaacgtggtgctgcgaggcctttttcacaatttgatttacacgagaaataagataagttacatttttaagcaacaacctttgttagggcatcaaccacttgctgtcgagtgggcaatgccgggatggctcctctctctgtcacagtgagagccccacagacatttgcaaactttagagcttctttcaatcggccttcatcctgcagcagtgaaaaatcaacagatagctgggatagtattccagcaacaaaggcatctccagcaccagtggtgtcaacagcattcaccttaagtccaccaactctcccattaaattccttagaataatatctacaaccttctggaccttcagtgacaagaagcagtttcagatttgggtgcatgagtttttttattacagaatcatcatatggatcctcccctttcgtcaaaaaggaaacctcctcttcactaatcttgataacatcagcagtttcccatatgctcagtataccatctctagcatcatcagctgatgaccacagtgggagcctcaaattcggatcatacgaaattagcaccccagcatctttagcagctttggcagctgcaatatgtgcagttttacatggttcagttataagacttatcgagccatggtggaagatttttgcctttctgataagatcaaggtcaagttccttttcttcaagcagcatatctgcacttggattgcgataaaacataaattcacgttcaccatcatttcggagtgtcacaaatgccaaagctgttctagcatgcgcatcaaatagcaatccttgattgtttacattattttccttcagtatgtcagctagcatgtaaccaaattcatcatcgccaaccttttctatgtttcttcctaactcaaattggggctttccaatgaaagccgatgacccaccaagacgagcaattccaactgcaacattagcaggtgcgccccctggagccttcttgaaggctgacgcttctgctaatgatacaccattgacagttgggacgaagtcaatgagcaattctccaaagcacaccacatgtggagaactgcttgttccaggggtgccatcactgtttgaaactgctttggtacaaactgcggatgacgtccggagcggcgcgaggaacgcggcgttgcggggccgcgcggccgcggcggggagggagcagcggaagatgcggccggcgctgaagcagggacgacgtgaggtggtggggagccggcccgcggtgaagggcggcggcggcggcggcgcggcgtggagagccat

SEQ ID NO: 99009 - DNA, 320 bp, Oryza sativa
  Clone ID: PAT_MRT4530_96862C.1
gggtttgtacaagtactggggtacaaaaaacaaacacaagctaggaatatggactattttacaaaccaaaccattcagcaccctcgcaaattaacctcctacagttccaagaaaactgaggaaaatcaaatcaaaacagactaaagaccaaaatcaaacgcctaaaaatttcgccactccttcgaatcgacgatcttaattcttccgggccaaactactaatcctatttactctgaatgttctgaacatcaccaatcactagctgaatctacgtgcagggcagcaagagtcaggactcaggaggacgcttgatgtgcgct

SEQ ID NO: 99010 - DNA, 2379 bp, Oryza sativa
  Clone ID: PAT_MRT4530_96863C.1
tctctctcctctctttctcgcccgtttccccaccaccaccaccaccaccacctcccctctcccattcgaccaaatcggcgaggggaatagcccggccgcgcgccgcgcctcctctcgtcgccggcgatggccgacggcgaggcctcctccggcgcgtacagggagttcaaggcgctgacggaggcggcggaccgcaagttcgcgcgcgcgcgcgacgtgccgctctacggcggcggggtggaccaccacagccggaaggcgttcaaggcgtacacgcggctgtggcgcctgcagcaggagcggcggcgggagctcgtcgcgggcgggctgcggcggtgggagatcggggaggtggcctcccggatcgggcagctctactacgcgcgctacctccgcaccgccgagccgcgctcgctcgtcggcgcctacgtgttctacgaggccatctacagccgcgggtacttcgccgccgcggcgcaggtggtggtgggcggcggctacaggcaccagggcctcctgatccggtacaaggagctgcggttcatcgcgcgcttcctcgtcgtggccatgctgatgcggcgggccgaggcggtggaccacctcgcttcccgcctccgttcgctcgtcgaggagaccaagtcggcataccccaaaaccaacttcaaggaatggaaacaagtgcttcaagagcttgggagattcttgaaagctgatggagcatacaagggatctagatcactgagatatgacaacttgtttgactcttttccgtcgaaccttgcacctattgcacgattccattcaaaaagagtactgaaactgaaagaagctgtattgacaagctatcacagaaacgaggtgaagttcacagaactaactctggacactttcagaatgctacagtgtctggagtgggaacccactgggtcttatcagattgctgccaaagagcttacagaaaatggcactataagtgatcagagtggaccctctggcctgattgatatccacctatcatcagaaatatctgatggaaatcttcctgcaaatcctcaaaaggcaatcatatatcatcctacagtatctcatcttctagcggttctagccacagtctgtgaggagctttctcaagatagcatcttacttgtctatctatcagcatcaggtttttccgagcagaacattacttctcaaaagtatgcctcaagctcatcatatgcaagggcaacttccgtgtatcccatcgataagccaaattccaatggcaattcagataatcatctatggcttggtccccgtggaagtggaggtccaaacaatctttatccagaagatctgattccctttacaagatatccactattccttgttatcgatagtgaaaatagtcatgcattcaaggcagagaagggagagccagctgccttgctactttcacctaggatagcatcagcaatgcctggtgtggaatccacgagtaatggaagccaatttacgtacttcctcacagctccaatgcaagccttctgccaattagctgggataacttctgacatagacagcgatacatatgctaacgcggaaatcatacttttctccgctttggaacaatatgaaggaatcctctgcacatctgttggattgaacaacgtctggggacaaattttaccagatccttttctcaggcgcctgatcgtcaggtttattttctgccgagcagttatattctattttcaccctgaggagaatggtgaacatataccaatctgcctacccagtcttccagaatcagtcgcgccaaatgctgaagccatcatggcccccatccttgagtttgcagaaaaccttgttgtgagcgaccggtttcatttccgacattctgtccacaacaataagaaatgatgatcaggagcaacaactcaatccttctgtagatacctccatggtatataatcaagttatttgttgatttgttcgtatttatacagcaaacggagcatgattcagtatgaacaggctgctgcagcagctgcagcttggagagggtgaatgatttatcatttttcgctgcttcatctccattgagcatctgtacaagtttggttaggtggtccttacttttgatctaggcagtgtagggcttctctttccttttctttcggtttgtggtggagaggacagtttgtaagctggaagaggcattttttagtaccccggaaggcaaattgttttttagggttagcccaatattttgagagttagtttactaccatcggatgcattgcgttgcacatttgtctagtgcacccaacgtttgtaattgttgtttgtcctgaatgaagggttctggattattgtctgaaaaaaaaaaaaaaaaaa

SEQ ID NO: 99011 - DNA, 519 bp, Oryza sativa
  Clone ID: PAT_MRT4530_96864C.1
tgtgtggacgacctcctcaccgacgtcgacgactccaagcccgtcgccgcgcccagggctcctacacgctggcgtgcctgcgcgcccccgtgtttgtggtctccatcaccctcgtcctcaccgacgggccctacaaggggagcaccatcctcatcgccgccgcgacgacatctccgaggaggtcagggagctgcggtggtgggcgggacggccaagctccggcgagccaccgggcacgtgctgtggacgacggcgaggcgggagtctccggtgcacatggtgctggagctcgacgtgtacgcgtgggtgcccgcgtcatcttctccggctcgccgttggtcgtcactgctgcgtggcacaaacgtcgtcacggctgatgttgacgacgctgattcttatttctaattattatactttactactcgagttggttgcgcatttgtcgcaaccgcaacaacattttccttcaataataagaaaaaggacaaatgattgatcgataaaaaaaaaaaaaaaaaa

SEQ ID NO: 99012 - DNA, 550 bp, Oryza sativa
  unsure (1)..(550): unsure at all n locations
  Clone ID: PAT_MRT4530_96865C.1
ttgaaaatgttagattntacaaggaagaggagaagaatgacccagagtttgccaatgatgcattcggaacagcccacagagcacatgcatcaactgagggagttccttttgcagaaggagcttgactaccttgttggagctgtttcaagccctaaacgcccatttgctgccatcgtgggtggttcaaaggtgtcatccaagattggggttatcgaatcccttttggagaaatgtgatatccttcttttaggtggtggtatgatcttcacattttacaaggcacaaggactctctgttggttcttccttggttgaggaagacaaacttgagcttgcaacatctctccttgcaaaggcaaaagaaaagggtgtctcccttctgttgcatctgacgttatcattgctgataagtttgctcctgatgctaacagcaggttgntcagcatctgctattctgatggtggatgggtctggatattggtccagattcagtcgcgtattcacttaccctggaacaacacagacagcatttggatggcctatgggtgctc

SEQ ID NO: 99013 - DNA, 249 bp, Oryza sativa
  Clone ID: PAT_MRT4530_96866C.1
atggcccccctcttcgatgagcaggggaatcttatctatagccacctggttattggcgaccggaggcttcccctgagggatttcgtggcggaggagaagctgaggatgatgccgtgctcccacaccttccaccagcgctgcatcttcgactggctccggctcagctgcatctgccctctctgccgccgcgctctacccacacagcactacagcaggaggatgacgacaagcttgggtgcccggagctag

SEQ ID NO: 99014 - DNA, 266 bp, Oryza sativa
  Clone ID: PAT_MRT4530_96867C.1
tcgtcttcttccacctaaacacatacaccttttattcccaatggatctagccggggaggttgccaaacaactgttggaatgtatagcatgtgtgtgcacagttccttctgttactcttattaccacactaattagcagatatagattattcttccataaattgcaggctgttatcagttgatagctcatgctttattctttgcttcatccttttaggtatacctaatacctaacgggcttttcgttgtctctttaatctctctttt

SEQ ID NO: 99015 - DNA, 407 bp, Oryza sativa
  Clone ID: PAT_MRT4530_96868C.1
aggataatttgtgtaagccgtcaggggcagcggctgctaccgtcggtggcggcggaggcgatggcacggctcgtcctctccgagtgctgcggcctcacgccgctccgcctgcgcgggcgcggcgccattgcgctgccggcgcctcccagcctcgccgcggggccgcgccgccccgtgtccgccgccgccgcggggggagccatccaccgcgagtgggcgctccgcgtctccgcccccacccgcctcacctccgtcgtcgaggaggataatagaggggaggaggtggtggaggaggaggccaggggttcgtaggcggcggccgaggcggcggcgggggaggtgggaggggacggagacgggtacgaacccggggcgccgccgccgttcgggctcgcggagatccgcgc

SEQ ID NO: 99016 - DNA, 201 bp, Oryza sativa
  unsure (1)..(201): unsure at all n locations
  Clone ID: PAT_MRT4530_96869C.1
gacgacgccgcacgcgtacgtaagctaggccttcctgagcggccccccgggggggtgggttttganntataaaatgatattctgggtataggacattaaacaaaaaccatttacccatacatatcatgccgatctgatcaaaattgagcaaagtttgtgctagacgaggcagtccaaattcatgtntataatatatatata

SEQ ID NO: 99017 - DNA, 2902 bp, Oryza sativa
  Clone ID: PAT_MRT4530_9686C.1
atgacggagctcgtggcccctcaccgggagaccgcgcaggcccccctttgccggttcggccgggggcttagggtgagatctcaagctctctctgtgtgtggaaagatcgcgtgccaggaagaaacgcgagacacggacgatgtatacaggttcgggccgctgggaagccccacacctacctccactcccggcggagacaggcgcaacgcgggatcgtggctgtctgatgctgacgcgaccagtgtcagaccggtcacagatcacatcctgcctgtaatggttgggatgaagcctggtattcatctaaccagggctaacgtgccatctctaagaggtaacacgctagctccggctggagacgtgtgcctagagactctcgtcttgacgggacggggcgaggcgtgcgtcagaccgccagtcgccacctaacccttgatctgaccgacttctttaaggggtcggggtgcctcggccctcggggccggggcaagcgtaacccgacccccccctcgggggaaatcaggaggagggcggacacctcaccctcgggcccgacgtccccgaaggtgccaggccacgtgggcgattgcgtctgcctcaagcctctggtcatgatactcccggtcccatatcaccgacagtagcccccggcgttatgccagagcaatttcccttcccaagggaagcggtcaggtgtgacgccacccctaaagcctggtgacaggtgggaccggtctccgtagttgggcaaaatacccaacggtctcaatccatgcacattggtaatggtgacttggctgtccataatgggcggtctcttcaagactgccacattacctgagcagcgcacgaatctgggcgagccgatttgcttcgcctggagatatggtgatggtgcttttctcggagccatcagaatagcgtatagcatcttctgggcccgagggtatcgggttttggcgtcccggagggcctcactaacaaagtagatgggccgctgcacctttcggcggggccgatcctcttcgctaggggccgcatctccagggcgctcttcatccgagaggcagcgcggggcgccctcggcttctgcgccgatatcctcggggtaagagggcgacaggcgcggccttcccgcagtggccccgaggctatcctgagggtcgggggcgcctgacaccgtcggacaagcaggcggagggccgactccggccgtcgggggccttgggccgccgttcggcttgggggcctctcggaccctgacttctccccgtgggtagcgctggaagagttcccttccggaaccgaggacggcgcacgcgcgcaggtccgggacgccgccgaccacatcgtccacagcttcgagggtacggcccctcggctcgcgttcgccctcgactccgacgaggagggcggcgacggtggtgcggacgataacgacgacaaggctggtgacccgggcgcgtcggagtgagcccccaggcccccgccaatcttgaatagctttttctttcttcttccgaggccttcgggcccccttcttgtatagactcccctttcgggtggccagcgaaacgccctcgacggcgaggacatgaccctcgtcgtcggaatgggccaacctcttcttcctcctcctgtcccgccgccctgtctgagcagcggatccgggggcggccgaagctgccactccgggaccggaggggttccaggtccatgcctcctccttacgagccactcgatccgcaagctgaaaaagctccgcggtagtctggggctctttggaggcaatcttttcgagcatgcggttgtgccgcacaccccccctgaacgcgtaaatcaccgcgtgtgcagggatgcatggtatggtgttgcggacttgacagaaccgctgaatatacgagcgaagtgactcatcatcccttcgttgtaccgcgtgtaagtccgcttcttcacctgggcgcggatatgtgccttgaaagttcatggtgaactgttggcacaaatcctcccaggagtggaccgacgcgggtggcaagttcattagccaaccccgcgcctgtcccttcagggccatgggaaagaaattcgccatgaccctgtcgtctcccccagcggcctcgatcccggtcgtatagacctggagaaactcggtggggttgacgctcccatcatacttctcggtgatggtgggccggaaccttgggggccaacggacattccgaagactcgccacaaaggctctacagccgacaccaccagccgggggcacggagggctgatcctcacgtccatgtcgaggtgacactctggacgaggaggcgccctccgttgcacggggagtacgccggctattacgctcgatgttgaggcgggcatccggctccccatgctgatcctcccgagtcgacggtgtcgacgagggagtggcagccgaatgacgtgcagccgccgccgctcgccgcgccctccgccttgatgacacggagccggtggtagcggcgccggaggtcttggtggtgacggaccgtccaccagcacccaggcgttgctgcgccgtcatgaccaagttggccacgtcgtccagccatcgctgggctggagactccgggtcagggacgacaggcgggtgtcgtaggagcgcgccagcagcctgaagcgcgccctgaggcgtgctgccgtcgccgtagacgaggaggcgacgctccccatctcgccgttctcctgcaccacccgcgactggtgatgctgcggatttctcgactctctcgagcgcctccccctgcttgggactttggcgtggaggaggtgggggagtgcgagctcgacggcgcgggtttggctccccgtcatcgccgctcacactcggagagagattgtgcgcctttgcttgctcggccat

SEQ ID NO: 99018 - DNA, 684 bp, Oryza sativa
  Clone ID: PAT_MRT4530_96870C.1
tgtttaagaagcaatcgaatttctttaagaagcaatcgaattcaacagatatggaggcttaccatgccatcgatgtcatgcacattacaaagaatatgtttgacagaaccatcagcctcttgctagacatacggagtaagacaaagtatagtctaaagtcaagtactaacctaatgaatatgggaaaatcatgaaagagtttaaccctaaacatggagataatggaaaagtctacgtccctccagccaattgcaccctagcgcttaacgcttgaaagaagaaggcattttgcacgtggctttcacggtgttggagcacccatatatttcttatcaaacataagacgattagtctcgatgaaaaatttatcgatgtccattaattattcgcatggctatcatgtcatgctcaccgtatttctcgcaccgtatttctcgccattgctactagacctttaaaccaaacatgtaaaagttgcaaccacaaatatgtgttacctttttaatacaatatcatagaaggtcatcaacccttgaagagttatggcctcttagtacactcgcatgagactatgtgtcagcttgagatgtactttcctccgtcatactctagtggttttatgatattctctagttttatgataaatttgattaacattagtcatcctgctcataggatgcatat

SEQ ID NO: 99019 - DNA, 1401 bp, Oryza sativa
  Clone ID: PAT_MRT4530_96871C.1
atcggcgatctcctccacctccactcctctccgacctccctccgccgaccagaagccatggccgcgccgcgccgccctcgcctcctccccctcctcctcctcctcgccctctccctctccctcgccgccgcctccgccttccagtccgacgagctgctcctccacgacgacgacgagttcgagggcgcgggcgcccgccccacgccagggccgcccgcgcccgcggcggcggcggtctcctcctcccgccggcggcccggggacagcagcgcggcggcggcggagtccagcgccgtgcagttctcgctcgagcacgacctcggcgccgggttcgtccccgcggggtccttctccgcccgcctcaagtcctccgcgcacggctcccagactctcactaagcttcggttcacaaggaacgagttgactggtgatgaaaaggatgcatttaaaaaattgctggatgaagatggtttttattcaattaggttgctgtctaatgtgttggatcctgcaagaaaagactatgttgtttcctcaatcaaagctagatgcataccacgtgaaagtttggatgaacatattgttatccacatggatggtgtaaatattttagcagttaattatggttctgttggcgggtgcacatatccccgtccagtgaaaatgccatcaaagtgggtattcaattcatacactgttctgaagacttctgaacaagcaccaagaactccatcatttgtagatcagttaatagaagccgaaaatggtcttggtgaagtggtgaaatcacctgagaagtctttctgggctaaatattggatgtacatcattcctcttggtctcattgtcatgaatgctgtcacggcagcagcgaacatgccggaggagcaagctggagggcagggccaacctggagctcaaagggcaccaaatgctgctccaaggagaagatgatatctgtgctgcctatttggtttctatctcgcttgtagtaatacgcagttgtatcatagcagtacttggtctgcttagatccaaaggcaatttgctagctggttttactatctacagaacttttagcatttagcaaccagttgacagagtacaatcaatgtgcagtgcaaaagctctattatcagctgtccattctaagtcagttcctgagagtttactgcatccttagcttatcaggtcctaagaacttacttttgttttccgcttttccacacttgtcttttgtaccggcaatttactgcccgattttatactcgtaaacatgttacaatatttcagtgaagacatcactggtaatggcaacatacaatttcacaaaaaaaaaaaaaaaaaaaatattccttaaaaaaaaaaaaaagggggggggcctgcagcccgggggatcca

SEQ ID NO: 99020 - DNA, 2365 bp, Oryza sativa
  Clone ID: PAT_MRT4530_96872C.1
accgaatccagtggatttccgagattttattagtaaactgtttggtccaactgccctgccaacatcctcgcatgcttacgatatacgtacataaaattcaacgaaatagtttcagcataacaaacacatgtacagtctaacagtgaaatagactaagactgtttagttcagcgcaaagttttgattttggttaaaattggagatgatgtgactgaaaagttatatgtatgataggttgatgtgatggaaaaggactgaagtttggatctaaactttagatctaaacatggctcagacagcagtactcgaagttgatgcttcatggaacctttctcgaaagatccctgacacgctatttggattgtttttcgaggaaattaaccatgccggagctggtgggatatgggcggagcttgtcagtaacagagggtttgaagctggagggccccacaccccttcaaatattgacccatggtctatcattggagatgaatcctctatatacgtcacgactgattgctcatcttgtttccgccaaaatattgttgctctaaggatggagattctctgtgataattgtccagccggcggtgtcggcatttacaacccaggattctggggcatgaatatagaagaaggaaaagcctataatctagtcatgtatatcagatcattagaatcagtcgaattgacagcttcgctcacatgctcagatggaatgcaaaatctggcatcagtttctatacaaggtattgatctgtcaaattggacaaagatagagttgcaattactagctgaaggaacatgcagaacttcaagacttgaattaacaagtatgaaaaagggaataatttggtttgatcaagtgtcactcatgccttcagacacatacaagggccatggctttcgcaaggaactactatacatgcttttggaattaaaaccacagttcctacgctttcctgggatcagccaccatgatgaagtcgataccaccataattgaaccttttgttaaggatgtattggatagtcttgaatttgcaagggggagagcagaatcgacatggggttctgttagagctgcaatggggcatccagaacggttcccactgaagtatgttgctattggaaatgaagattgtgacaagggattttaccgaggaaattacctcaagttttatgatgctatacgcaaggcctatccggatattcaaatgatttcaaactgtgatggatcatctaggccacttgatcatcctgctgatttatacgatttccatgtctataccagtgctgctaatctttttatcatgaagaataagtttgataggacatcacgcattgggtctaaggtatttgtcagtgagtatgctgtcaatgaacaaagggatgctggtaaaggaagccttcttgcttcactggctgaggctgctttccttactggcgtcgagaaaaatagtgatcttgttcagatggcaagctatgcaccgctcttcgtaaatgacaatgaccgcacctggaacccagatgcaattgtattcaattcctggcaacagtatggcactcctagttattggatgcaaacatatttccgtgaatcaagtggttctgtgattcatccaattacgatcggttccagctactccgattcactggctgcatctgcaatcacctggaaagacacacatgatatctttctgagaataaagatagtaaactttgggccaaatgctgttaacctcgcaatatcttcaagaggacttcaagctggcgtcaatacggcaaaatcaactgtgactgttctcacatccggcaatttgctggatgaaaattcatttgctgaaccaaacaaagtcgtaccggttaaaagcgagctgccagatgcttcagaagagatggaagcagcgctctctccttattcattcacttcatttgacctcgctctagatcagtacagcaagctcgtggcagagatgtgaagcaatgatgcacacttataccagagaatagaacacaggatgattacgtgaggtgtggtacctgaatttcagaaagctaacagagtgtatatactgcattctggcatttgctaatcacacttcgtgtgaccctgttgtttatgacgctgtaagagtagtttaaggttgtcacattatcgaacctagcggtaacgctaattaatatcattgtcaataagctatccctttgatcacactaagctccggctactcagcttgaatggattcctagctaatctgaatcagcaaacaggaggggaaaaatgaagggtggatgagaaatgtcttgaactatatttcattcatacttattctgcataaaaaaaaaggaagggcgaaagaaaa

SEQ ID NO: 99021 - DNA, 1240 bp, Oryza sativa
  Clone ID: PAT_MRT4530_96873C.1
gtggatccccgggctgcaggattcgcacgaggaattaacggctgcattgttgagatttacgcgtggtaataattcattaatacaggtgtagtaatagtgcaatactacaatgcattgattggacatggatttcgtcggtgacaatgctcgtacggttagacgtcgtcgtcgtaggggaaggaggtggcggcgagccactggtcgccggagatgaggttgtcgacggagaactgggccgcctcgtcgtagcccatatcatggaacccggcccatccgacgcggccgtccatggcggcgcccggcccgccattcccatactcaccgaagtacaccgtctcggcgcggccgggctcggcgccgggccactcgacccagccggcccggtcgacgagcgggccgaggtaggagtccatgacgacggcgcgggcgtagggccgccacggccggcccaggaaggtgcgcgtgctgacgccgctggcgaggagctccggcgaggcgaccaccgtgcagttgtgcacggagaagcccgtgtcctcgttggggtcgccgcgcgcctgcgccgtgaggacgttggactggccggcgacgggggcgccggcgacgagctcgcacgcctggaggacggcggcggcgtcgccgaagacgaggtcgacggtgccggagacggcgcactcgcggtagaactggcggaacgagtgcgcgtagagagagtcctggtggccctcgacgccgcaccggtacgccgccgccatgtccgcgctcacccgcagcgccaccgcctgccccttcgccgcccccgccgtgttccggaacgtcacgtcccgagccatgaacccttcgcctgacaccccgaaggtggcggagcggaaggtggtccagccgtcggcggcgctgcggctgccggtgatgacggtggcgccgcggccgtcgccgacgagggcgatgttcgtcttgtacggtggcacctccacgttctcctcgtacgtcccggccctcactcggatcaccgtcctcgccgcgctgttgttcggcgccgccgccaccgcctcccccaccgtccggtagttcccgctcccgtccttcgccaccgtgatcaccaccgtgttctcgccggagttgttgctgttgtcgtcgtcgtcgttcccgccgttgtagtcgtcgttgtcgtcgtcgtcgaggaggcggcggttgtggtggatgatgttggcgacggcggcggcaaaatcgcttctgatccacc

SEQ ID NO: 99022 - DNA, 1500 bp, Oryza sativa
  Clone ID: PAT_MRT4530_96874C.1
ctgaataacccacagcatgtgcagcaggtcttgattgcttcaatactaggcaacgatgattgacatgctcaacactatcacaaatatcacaatacaactccgacgaacaatctgcagccacgtgccccttctaagtacacctagaacacaccttcaactttgcttgagttttgctaatgtcctcacgaacatgttgatcaacaaacaaagatggatcacaatccaagatagccaattctgaatttgtctccggatcgtccgtcaccaccgcagccccatccatctggttcaccactacctccatatcacccaccttcaccttccctttcccagcacttgcaccaccgcctccccctgaaactcctccaccaacctcccccttagctgcaaatttagaaccacctcctgccttgttaattcctcctcctggcctgcttaaccgtcgaccaccatcagcacccttgcctccgaccaccttagctttcatcgggctagctacccccttatcaagagcctccacctcatcggctcatcccattctcttcctcacctccccctctcttctctttcgtgatccctcttcctcctcctcctctctctctcgtcccctacctctagccgggcagcaaccgccgctgaaaccgcccacgccaccaccgttcccgctctcctccacgccaccactccacaccagtgccccacgcccacgtcgcccgcccactaacccgcttctcccgctcgtgcgtgcgcccgtgaggggcaggattcaatttgaatccccccctctctctctcccccacctccccacgtcgccagccaaatcgggccctttcccggccgtgtccgcctctcccaaacccctatatagcttccctgcgtcctcctctccatttttcccctttccacctccctctcccgtgacctctatcgcaccggcgccgtcacacccaagctcagccgccgccgccactcatcaaccacgcgccgccacttctacagccgctgccacaccgccacttctacagccgctgccacaccacgcaatcccagccgctagcttcgccgccgcaatagcaatctcggccgctgctcacttgccgcgcgccgtcgccgtaccgctctccccacgcaccgccacctattgccgcctccatccgccgctagccaccgctagttccactgccgcgccgcgccgctccgtcgccgccgtcggcctcgggaggtcaagggccgccttgtccatcccgcgcaccccgccatccaccgcttgccgccgtcattcgctgtcgtcttcccgcacgccggccgaatcccacggtgaggagcatttcccctttctctccctcctagcaccgagccgcgctgctgcccttcgcgccgtgcgccgccaccttccgcgcccctcccttaccgcgcccgaaacccttgtcccccacccgacccgcccctccccgcacgcgcgcacctcccgcctcctcccttcctccgcctccgcgccct

SEQ ID NO: 99023 - DNA, 1967 bp, Oryza sativa
  Clone ID: PAT_MRT4530_96875C.1
atgggttccaaagatgcattcttttgcaccttctgctccttgcttcttttttgtttcagttccgcaggcccgtcggcatggagctggacctgcctcagacagcactagtagaggttgatgcttcatgggaggtttcacgaaagatccctgacacactatttggattattttttgaggaaattaaccatgctggagctggtgggatatgggcggagcttgtcagtaacagaagtaactctcagtttgataaacattcctcatggaagctcaaaaatagtgtcgctctaaggatggagattctctgtgagaattgtccagctggcggtgttggcatttacaacccaggattctggggcatgaacatagaagaaggaaagacctataatctagtcatgtatatcagatcattagaatctgtggagttgacagcttctctcacatgttcagatggaatgcaaaatctggcatcagtctctatacaagagattgatccgtcaaattggacaaagatagagatgcaattattggctcaaggaacatgcagaacttcaagacttgaattaacaagtatgaaaaggggagtaatttggtttgatcaagtgtcactcatgccatcagacacatacaagggccatggttttcgtaaggagctaatatacatgcttttggaattaaggccacagtttctacgctttcctgggatcagccaccatgatgaagttgataccatcataattgaaccttttgttaaggatgtattggatagtcttgaatttgcaaggggaagcgcagaatcaacatggggctctgttagatctgcaatggggcatcccgaacggttcccactgaagtatgttgctattggaaatgaagattgtgggaaggaattttaccgaggaaattacctcaagttttatgatgctatacgcaaggcctatccagacattcaaatgatttcaaactgtgatggatcatctaggccgcttgaccatcctgctgatttgtacgattttcatacttttcattgtgcttttattaagatgcactctgacatattttttcaggtatataccagtgctgctaatctttttatcatgaagaataagtttgacaggacatcacgcattgggcctaagtgtcacaacacttcagccggctttgtttctctgtatcattacagttctcttgcatcccgacgccctaggatattggatacacagaaagtacttattaattactatgctatgatcctgttccaggtatttgtcagtgagtacgctgtcaatgaacaaagggatgctggtaaaggaagccttcttgcttcactggctgaggctgctttccttactgggttggagaaaaatagtgatgttgttcagatggcaagttatgcaccactcttcgtaaatgacaatgacagcacgttagtacctccagctttgctcctttttatttccaacgttcttgttggtcacaactggaacccagatgcaattgtgttcaattcctggcagcagtatggcactcctagttattgggtgcagacatatttccgtgaatcaagtggttctgtgattcatccgattacgatcagttccagatattctgattcattggctgcttctgcaatcacctggcaagactctgaggatatctttctgagagtaaagatagtaaactttgggccaaatgctgtgaacctcacaatatcttcaagaggacttcaagatggcgtcaacactgcaaaatcaactgtgactgttctcacatccggcaactttctggatgaaaattcatttagtgaaccaaacaaggcaagacaaccattgtttccatcacaagtcgtgccggttgaaagcgagctgccaaatgctgcagaggtgatggaagcagtgctccctcctttttcattcacttcgtttgacctcgctctggatcaatacagcaagctcgtagcagagatgtga

SEQ ID NO: 99024 - DNA, 481 bp, Oryza sativa
  Clone ID: PAT_MRT4530_96876C.1
ctcactatagggcgaattcgagctcggtacccggggatcctctagagtcgacctgcaggcatgcaagcttgcgaacccggcggcgtcgacgaggcgcgggagcgatggagagctcgggagggctcggccgagaaaggaaaaagagagaggaaggtgcgggcgtgcttaaataggaggggggcggcgagtcgtggccgggaacgacgcaatttcgccggagtagtggaggaggtggaggaggagagagagagagaggcgggattcaaatcgaatcccggccatgtggggcgtgggcgcgggaagggcggggcgtgcgggaaagtgggcgacgtggcccggggcgcggaaagccgggggaggcggcgggcgatgggtggtggtttcggcggcggttggcgcgggcgtgggcgcccagaggttagggaaagggctgacaggtgggccccacctgtcagcgcccgagagggagaaggaggccggg

SEQ ID NO: 99025 - DNA, 180 bp, Oryza sativa
  Clone ID: PAT_MRT4530_96877C.1
atggagatgtggatggcgaagagaggcctacgaccactagaggcctacgaccactgcttcctcgtcccaccgcccgggtgccgactccgaccgctacttctccgcccgccgcgccgcctacgccacctggtcactggcaccaaccgccgcttctctgccggctctgcccagaggatgtga

SEQ ID NO: 99026 - DNA, 381 bp, Oryza sativa
  Clone ID: PAT_MRT4530_96878C.1
atggccaacagcaacctcccccggcgaatcatcaaggagacgcagcgactcctcagcgagccagcgccgggaatcagcgcgtctccgtcggaggagaacatgcgctacttcaacgtcatgatccttggcccggcacagtccccctatgaaggtggagtttttaagcttgaactctttttacctgaggaatatcctatggctgctccaaaggttaggttcctgaccaaaatataccaccccaacattgacaaggcactcctaagtgcaccaaaccctgatgatcctctctctgataacattgcaaagcactggaaagccaatgaagcagaagctgttgaaacagcaaaggagtggactcgcctgtatgccagcggtgcataa

SEQ ID NO: 99027 - DNA, 855 bp, Oryza sativa
  unsure (1)..(855): unsure at all n locations
  Clone ID: PAT_MRT4530_96879C.1
tttccnggggttgcaanggaatttcccggcncgaaaggggcaaaattggctancgaaaggtcctgggcaactcccgtctttggcgaaacccatgggaanaanctttaaccaanggcttgtccngggttttgggttaacttaatttttgaatcattaancttggggccattggggccgccgaaanccaaccattttggcaancttgccaatttcctttgggaaaaataaacccccctcccttgggaaaaaaaanccattggggcnaagaacaccaaggaaattgtttnggccccaaggcttgttttttggcattcctccaaagcccccattgggtccctcccatccatttaaanggaactttaanttcnttnnccnntgggaaaacnaagaatttcttnccncnaaanggaaacctggggattctccncccccccccttgttnaaaaacttgaattgcctgcccnccanccgttttttttgggccctcctcctttgaanggattcccnaaaacctttaccccnntttttgggggaagaaaaccnnaaaaaaaaaaaanccccccccccntggaaaattactttccctccctcgggggattgcccgccctccttgttcttnccaccctcccccctttggtttattttnaaaaaaaattcttgggttggcnnaaaaaccttgggcccttnccccnaaattnccnnnccnccaagggccccccaacccgccnancntnatttgggttgcctccccccntggggntnccnanaaanaacnncccnnnttnggtttccnanggggnncccccccnttnngtttnccnngggggnactccccccntnggntttnaaaanggn

SEQ ID NO: 99028 - DNA, 1585 bp, Oryza sativa
  Clone ID: PAT_MRT4530_9687C.1
tactgtggaacaaccctctgagaggtgccctgtcgtacatcttccatggatagttggacactttgcaaaaaccgctcttgaaaaccataaccaccgtaggtagcatttgttgcctctgggattggtggtgacttagctgtgcaactccatcttcagctcagaagcactacacttctgaaaagggggaataatagcaaggctgagtacaaccaccgtactcagcaagccacaccaacgatgcagacgtgcaaggggatacaaggatggtttgtggctatttgcataaaggcggttcggcaaagcccaccgtggaccgagtccacggcgccagccggccacgtgggcgcgcacccgacgctccggatcggccggggccgatcggacggccgggggcggccgagcggcacgaccaggcaggcacgcccacaggcggcggcgaccgccgagcctagaccaccggcgacgacgccggcggcgagcggcgacggcgcgagaggcggcgagagagtggagagggaggcggttctcaccgagcgaatggggcggcgagacgaagacgagaagggcgacggcagaggtgcgactggaggcacaaaagtggctgtggctcgggttcaccgtggagcgggcggctcgggggtggaatggaggagcggcgtggtggccgggcttgccggcggagcagcgaagctagtggtggtggcggcgcggcttgaggtggacgggaacggcggcaagaggctgcagaaggcggcgaaacggcggcggtgctcgggaatctcgtcccgagattctgggatggctagaaagaaagccggtgctgatgggcggtctgactgatctgcaccttgaactgccacattctgcttcgaactgattgattgactggttgatcaaccccgcacgatttgcactggctggattcgacctttctgttcctttgctttgccgaaactggaccgactggttctgcttgaactgacctaggccagaactgcggatactcctgaaacttacgtatcttggactgaactgttgatgctagcagcttgataaccttagaattgaacctgtcgacctgagattggggtgactctgctaatggttcgcaactgactcctttaactactaaccactttgtttcacctcgtcgatccttcgacacccttacagtgagtagtcttactttcgcgtggctgggatcagttgaactgttgtccttcaaatatagccaacacttctctgatttacaaagagcctgtggaacaaccctctgagaggtgccctgccgtacatcttccatggatggttggacactttgcaaaaactgctcttgaaaaccataaccactgtaggtagcatttgttactcctgggattggtggttggttagctgtgctgatatgctgaggacttggtggcgtactatctgaggttgtaggtgcttgctcttggaaaacaaactgactttcgctctgatcccgattccggcttgcatctgagcttgtacttgttgttggagacattgtcgttgcatctgctgctttggactctgcggttgcggtatcaacatctgacacatccat

SEQ ID NO: 99029 - DNA, 1114 bp, Oryza sativa
  Clone ID: PAT_MRT4530_96880C.1
ccggccgggcccccgtttcccccaccctcggctgacggctcctcctcctcctcctcctcttcctccctcccgatcccctcccccgcacgaaactcaaagcatccccggcgccgcagctccccggaggaggaagcccccgcgccccgccccgaccagatccgatggccaacagcaacctcccccggcgaatcatcaaggagacgcagcgactcctcagcgagccagcgccgggaatcagcgcgtctccgtcggaggagaacatgcgctacttcaacgtcatgatccttggcccggcacagtccccctatgaaggtggagtttttaagcttgaactctttttacctgaggaatatcctatggctgctccaaaggttaggttcctgaccaaaatataccaccccaacattgacaagcttggtaggatatgccttgacattctcaaggacaaatggagcccagcccttcagattcggacagttcttttgagtatccaggcactcctaagtgcaccaaaccctgatgatcctctctctgataacattgcaaagcactggaaagccaatgaagcagaagctgttgaaacagcaaaggagtggactcgcctgtatgccagcggtgcataaaacccaatgcctctcgtgatgtaataacccgtcatgctttagccttaatcaaatgccatttgcttgataagaacaaactggagatattggcagtggaagggagtttaaatgactaccgcttgaattatttgtctgtatacatgtggttggttccctttaccctagggcacccttgactaatcagtatctgtggtagaacttggtgctcctccaatatatttattactttatgttggaaaacttaaattgttgaaattggatctttgttcgtgtggctgcactttgtaccctctagattctgttacctgggaaatgggagatcgttccgacgaagcctgacgggacgatttggcaaaatcggttgcggttgtcgtcgacttgtggcatcgtcttgccactttgttggcaaagtactaccgtacttgtatgcctgtagcttgtcaactgcatatataagcgtatacgccttccaaaaaaaaaaaaaaaaaaaa

SEQ ID NO: 99030 - DNA, 779 bp, Oryza sativa
  unsure (1)..(779): unsure at all n locations
  Clone ID: PAT_MRT4530_96881C.1
ccacgcgtccggaacttgaaaataagtcatcctagaaatggggagtatatgagcatcaaaatgctttctaatccagatgctctcccaccaaagtaatggatttggtagttgttattgattgaagctgagatgaagcatatttgttatttgtatagatacattttctgtcccatgacaatgtttgtacaatttatcacttatgcagcaatatgtagaccaatttcaagttttcaacataacaattcaattcgttgaacatgagaagatggtagatatgtgcaattagttgagcacacttgacaatattgctaaatacacatgctaattatggcaggaagatcccatacatgggtatcttatgttcttttttcgacagtgcaaaaggttaccgagctcttttaactctaatctgctgtataatgcatgtttatcccaatattttgaacttacacgaccgatttcagttatgaacatacaaaggaatctctagtaagtagtttgattagtttcccttttcatgtcagttcttagccttatctttaggaatgcatctgcatactttttgctgagattcccgagagatgttacanttcttgttctctcacttcagaataacataattgaatggttagaacctatgtaaaataccactattttttaggtttcacaccaatgtaactggcacttgaaattgaatagtacaatttaagctgaaagaatatactgtctgaaataaaataacagactatttttcgttgttacgcgtgcaaattgacata

SEQ ID NO: 99031 - DNA, 2045 bp, Oryza sativa
  Clone ID: PAT_MRT4530_96882C.1
tgcaggattcggcacgaggcacaactagctagtttagatcccctttgcatccatcgatgatcagttgttgcatcgatgatcagttgttgcaggacagtgtagtgaggtgagaaagattgttgtagtagctgctgtgctgtatggtggtagccagtgagtagctactacactgcactgcagtttgcaccccggccatatgttggctactactactgcaggtgtcttaggtctagatggataccctcttcaggttggttagcctccaccaccatcaccaccaccagcacgcggcctcaccgtcgccgccggaccagccgcacaagtcgtacccctcctcgcgagggagcaccagctccccctcctcccaccacacccacaaccacacctactaccaccactcccactcccactacaacaataatagcaacaccaactactattaccagggtggtggaggcggcggcggagggtactactacgcggaggagcagcagccggcggcgtacctagaagaatgcggcaacggccaccagttttacatggatgaagacttctcctcctcgtcttcctcccgccagttccactcgggaacgggcgcgccgtcgtcggcgccggtgcctcctcctccgtcggcgacgacgtcgtccgcgggcgggcacgggctgtttgaggcggcggacttctcgttcccgcaggttgatatcagcctcgacttcggcggctctccggccgttccgtcgtcgtccggtgctggcgccggcgccggggcagcgccgtcgtcgtcggggaggtgggcggcgcagctgctgatggagtgcgcgcgcgcggtggcggggcgcgacagccagcgcgtgcagcagctcatgtggatgctcaacgagctggcctcgccgtacggcgacgtcgaccagaagctggcctcctacttcctgcagggcctcttcgcgcggctcaccacctccggcccgcgcacgctgcggacgctcgccaccgcgtcggaccggaacgcgtcgttcgactccacgcgccgcacggcgctcaagttccaggagctcagcccgtggacgccgttcgggcacgtcgccgccaacggcgccatactcgagtcgttcctggaggccgcggcggcgggcgccgccgcctcctcctcctcgtcgtcttcatcgtcgacgccgccgacgcggctgcacatcctcgacctgagcaacacgttctgcacgcagtggccgaccctcctggaggcgctggccacccggtcctcggacgacacgccgcacctgtccatcaccaccgtcgtgcccacggcggcgccgtcggcggccgcgcagcgcgtgatgcgggagatcgggcagcgcctcgagaagttcgcgcggctgatgggcgtcccgttcagcttccgcgccgtgcaccactcgggggacctggccgacctcgacctcgccgcgctggacctccgcgagggcggcgccaccgccgcgctcgccgtcaactgcgtaaacgcgctgcgcggggtcgcgcgggggcgcgacgcgttcgtggcgtcgctccggcgcctggagccgcgcgtggtcaccgtcgtggaggaggaggccgacctggcggcgccggaggcggacgcgtcgtcggaggccgacaccgacgccgcgttcgtcaaggtgttcggcgagggcctccgcttcttctcggcgtacatggactcgctggaggagagcttccccaagacaagcaacgagaggctgtcactggagagggcggtcggccgtgccatcgtcgacctcgtgtcatgcccggcctcccagtccgccgagcgccgggagaccgccgcgtcgtgggcgcggcgcatgcggtcggcggggttctcgccggcggcattcagcgaggacgtcgccgacgacgtgcggtcgcttctccggcggtacaaggagggctggtcgatgcgggacgccggcggtgccacggacgacgccgccggcgccgctgctgccggagcgttccttgcgtggaaggagcagcctgtcgtgtgggcgagcgcgtggaagccatga

SEQ ID NO: 99032 - DNA, 112 bp, Oryza sativa
  Clone ID: PAT_MRT4530_96883C.1
accatcttataaaatcggaggcgaggccaaggagacgggtgcattataataaggacgccgatagagcgctaacactccaaatactgcagagcgaagacgaatgagagggcag

SEQ ID NO: 99033 - DNA, 215 bp, Oryza sativa
  Clone ID: PAT_MRT4530_96884C.1
gggttggtcttgccctctacaggccatcctccacgtccaacttggggtagaatccaaaggaaatccgaaacatgccttcccgagcaaggaaacctcgaaacccgacgaaacagggtcgaactcggacctgccggtcagaccggccacataccgtcggtctgaccggcctacaatcggcggtctgaccgcccaacacatggcggtcagaccggccc

SEQ ID NO: 99034 - DNA, 577 bp, Oryza sativa
  Clone ID: PAT_MRT4530_96885C.1
ccagatgcttcgcgccatcatggagatcccggcaagatgagtagaaagctttatcaaaggggtgaactgtggcagatgcactttgacgaggtcggcaactttttcagccaagagagggacaaagtcttgggcaagactaccgtcaggaccctggccgccatcaagccaactcgcgatctgcggacccgtctgctggccgcgtctgctggcatgacggatactgaggccaaggagcttaacctcttccacgacctcttggatcgctgcctccacgtcaatcctgacaagaggatcactcccgctgacgccctgaagcatccattctttacagctaggttgcaaacgactggtcggcgttgacgcgacctacaagcatgccgttgaggcttgcttgggtgtgaaaatatagaatcataattagaaatacagcccccaccgtccgcggcatacactacaggtctcggcaagcgaagcttgttcgtcaaagttaatgtagctgcgacggcgctgtcacgaacgacatagtgtgctatggtacaaatatagatctacgggaatatgcaaaaaaaaaaaaaaa

SEQ ID NO: 99035 - DNA, 2850 bp, Oryza sativa
  Clone ID: PAT_MRT4530_96886C.1
cccggggtggcactccgcgtcccaaatcccaaaccggagctagggttgctgctgctgccactcgcgagcagcagcgccccctcacgctgagccgcctccggctccctcgccgccgatcctgcgcgtgcggcggcggcgggtggccggtttgaaggaggagaggaggcttttggtcgtcactccttgcgcaggatgggtgggagatatctgcattctccacctgctgttaatttaatctgtgaggaatcaacttttgtgcgctcaacaagttgctgtctccactcttgtctgtgtttgagatgcaaaacatcgaatttgaagccatgtcgaacactggtgttcaatatgccatcaaggcgcttcaatagaagactggctgcgctgccagatgtcgatgatttcttttgggagaaggatccaactccaatcctggacacgatcgatgcacccatccatttgaaaaatctatctagtaaggagttaaagcaactagctggtgaagttcgatcggagatatctttcataatgtcgaggaaatgccaaccatgtaacactggacattctgttgtggagctcgctattgctatacattatgtcttcaatgccccaatggataagatattatgggatgctggtcagcatacatatgcacacaagattctcacaggaaggcgctcactctttcatactattaagcaaagaaaggggctttcaggtttcacatcccgtttcgagagcgaatatgatccctttggtgcaggacatggatgcaatagtctctccgcaggccttgggatggcagtcgcaagggatctaggtgggaggaaaaaccgaatagtaacagttataagtaactggacaactatggctggtcaggtgtatgaggcaatgggtcatgccggtttccttgattctaacatggtagtgattttaaatgacagccggcacaccttgcttcctaaagcagatagccaatcaaagatgtctattaatgccctctctagtgctctgagcaaggttcaatccagcaaaggatttagaaagtttagggaggctgcaaagggactttccaaatggtttggtaaagggatgcatgaatttgctgccaaaattgatgagtatgcccgtggtatgataggtcctcatggagcaactctttttgaagaacttggattatattatattgggcctattgatgggaataacattgatgatctcatttgtgtactcaaggaggtttctactctagattctaccggcccagtacttgtgcatgtaatcactgagaatgaaaaagactcaggtggagaatttaatagtgagattactcccgacgaggaagggcctccagactcaagccaagacattctaaagtttttagaaaatggtctttctaggacatataatgattgctttgtagaatcactaatagcagaagcagagaatgacaagcgtattgtggtggttcatggaggcatgggaatagatcgatcaatccaattatttcagtccagatttccggacagatttttcgatttgggtatcgccgagcaacatgctgttacgttttctgctggtttggcatgcggaggcttaaagcctttctgcataattccatccacctttctccagcgagcatatgatcagatagtcgaagatgtggacatgcaaaagataccagttcgctttgcaatcacaagtgcaggtctggtgggatctgaaggcccgactaactcaggaccatttgatattacattcatgtcatgcctgccaaacatgatcgtcatgtcaccatctaatgaggatgaacttattgacatggtggcaacagctgcaatggttgaggacagacccatttgcttccggtatcccaagggtgccatcgttgggactagtggcactttagcatatgggaatccacttgagattggtaaaggagagattcttgctgaggggaaagagatagcttttcttggttatggtgatgtggtccagagatgcttgatagctcgatctcttctgttcaactttggcatccaggcaactgttgctaatgcgagattttgcaagccacttgacattgatctgataagaatgttgtgccagcaacacgatttcctaatcaccgtggaagaaggaacggttggtggttttggctcacacgtctcgcaatttatttcactcgatgggttgcttgatggcaaaataaagtggcgacccattgtactaccagacaggtacatcgaacacgcttcgctcacagagcagctcgacatggctgggttgactgctcatcacatcgcagcaaccgcactgacccttttagggcgacaccgagacgcacttttgttgatgaagtaagaaggaaaaatgagctagaaaagaatgaaaagttgtgcagcaagtttgagctggtagaagacagccaaattgctgtttcatggatattcttcagtctttcagaggaaactgagattgccatggcagatacagcctgtgtgcaccactgaaagagcttgcaagtttttatctgtgctccagatgcttactgtaatctgttcatgggggctgtacatactataaaccctgttttgatgatgattatgttaaaccctatcaagtgcttgtaacaggaaggggataatcatcttgctgatgtaaatactcgaggaataaatgtgctgtgtgtgtgtgtgtatgactccaagtgaagagagagctgtgtctaaattgtaatcgagtaacccttcagaactttggatgcagtgaatcctctctgaatgagatcataaaatgttgaaattgggtgtgaactgtgaatgaacggctaaatcaaaaaaaaaaaaaaaa

SEQ ID NO: 99036 - DNA, 336 bp, Oryza sativa
  Clone ID: PAT_MRT4530_96887C.1
atggcggcacgaggacggaacgccaacgccactaacgcagaccaagctcaaccgctgctccaattattagcccggtcggattgggattcggtgacattcccccgtgacattctcggtgacattgagtcactgacatgtgggaccaacatgtgcctggacccacatgtcagtgatctcaatgtcaccgagaatgtcacggaggaatgtcaccgaatcccagtccagcccggtcacggtcaggacggaccatggtggtctcctcttcacgtgtttccgcccatcgcctaccaggtgatggggttgcctattgagacgctctccctacctgatgagtga

SEQ ID NO: 99037 - DNA, 148 bp, Oryza sativa
  Clone ID: PAT_MRT4530_96888C.1
atgagtattccaagggtgtcgtatttatatttccgcagggacgtgatgcgtggtaatggcattttaccaactcttacgtcatacctggacgtggaggaatacaatggatggagaggactgccaccatctaccgcctacctcactttcc

SEQ ID NO: 99038 - DNA, 186 bp, Oryza sativa
  Clone ID: PAT_MRT4530_96889C.1
aagggcaaggggacgcgagataaggtcctgatcagaatcatggtctcccgcagtgaagtggacatgttgaaaattaggtctgaattcaagagaaagtacggcaagtccctgtactattatatccagcaagacactaagggcgactaccagaaagcgctgctgtacctgtgtggtggagatgactga

SEQ ID NO: 99039 - DNA, 1154 bp, Oryza sativa
  Clone ID: PAT_MRT4530_9688C.1
aaatgagtttataaaaagaaaaaccctaaaaagtctttttcccccccttcccctcttgggccggctcggcccacctccctccctctctctcctctcccccgcggcccaatcggcctcctccccgcgcgcgtgccgctgacgggcgggcccgcccgccaccctcgctgacgggtggggcccacctgtcatccctgtcctcccgccgctcccgccgcctcgcccgtgccctagcgccgccgccgccgcgaatcccgccgcctcccgccgtccccgcgcgcaataaagagggggaaatcactccccgtgattccctccctctttctccccacttttccctctctctctccctcggatttgttcggaaacgtttccccctaaacctcgccggcgcatcaatggcggccggatcttccgcggccgattccccctcatccggccgttctctccccctcccaacgctatataaacgctccccgtgcctccctccaccgtttccgccactcgccgctctctctctccgccggaatcgagctcgcgccgtcgctcattctctccgccgtcgccgccgagctccggtccgccgccgtcgtcgcctcggaccttctcccgcctcggcgtcgcctccttcggctccgccgcgtcctcgccgacctcgtccacccctccgtttcgcccgccgaccgccggaacgccgccgtccccgtggacctgtgcggcgccgccgggttgttggaggtgcgggtgccggttcccggggttggtcgtggacccgggggtgagccgtgggccgcgcaatttgtttcccccttgccttgggctctgtcggccggcggctccgcggtgcctagggccgccgccggcgaccataggggcgcgggcccgtcgcctcccgtcggctgtgccggcgaggccgccttcgggcgcgccccgcggctgccatgtggggcccggccgtcagccgcccgcgccctcgggtgcggctgacgcgtgggacccacggcgccggccggcgtaagccgcgtgcacccggtccaccgtggaccgtgagcctgccgcgtgggccccactcccgtggacccggtccgcgcgctcctcccctcggccttgttcaccctagaataaacaaaaccccaactagtggacactctactcct

SEQ ID NO: 99040 - DNA, 2021 bp, Oryza sativa
  Clone ID: PAT_MRT4530_96890C.1
gaagaaattaatccttgtactgctcgttaatgtcgggattgcgacaggatgccaaacgaagatatatgaacaattgctacatcgctgttagctaaaggcttgtgagtaatatacacaaaaatctggtttttgatctatcagtcgatgttactaggctgctagcacaaagctaggtgtagtacgtggctacgttctacaatcaatcagtggtcgccattgatggcgctccgagagcagcgataggtttggttgcaactgctcgatcatatcgatcgctaggtgggggggtgttgctatgctggccaccaggagtgtgtccagaggccgaggctgtcgaagacgcggatggtgacgaaggcgaggtagatggcgatgaggcccatgccgtacacccggtccagccgcatccccctcgccggcaccaccagcagcgcccatgccagcccggcgccgaggaaccccaccgcctcgtacaccgccccgcccgccgggatcgcgaacggcgccgggtactgggaccccgccgccagcgtcagcgagaggcccagccccaccaccgtgttgaacagcgggcccgcgtagcagcccgacaccgccgtctgcgcgccgccggcgccgccgtgcagcgccatggcgacgttcgacaccaggtcgcccagcgagtccccccacgccagcaccgtcacgcccagcacgctcgccctcacgcccaccatgtacccgatcgccaccagcagcgccaccagctcgcgcgccagggtgtacgcccacagcacgctcatcaggaaccccgccgccagccacggcacgcgccgccaccgcccgcggggtggggaggccgcctccgtggtggccgcggcgagcgcggcgaggaggaggccgaggagggcgccgccgaggaggacggcgagggcatgccggcacgacgatgcccaggtggcggcgaggaggaccggcgccagagcgagggacgccacggcgcagggccgggaccagcggtgcccggcgatgtccgggattgtcaggcggcgagggaggtacagcgggatgaggatcgcggataggaggcaatgaaggtaggctctttttttcgagggcgccgagttcttggagtaggacggcagtggcgtgacgccgccgtcgtcgtcgaggaggagcggcgcggcgaggtcggcctgcggcggcttccccggttcagagcagcagtgggaggtccagacgaggaggacatacgcgacatagagcgagacgaaggacgcggacacccagacggtgaccgtgccggtcaccagtatggcgaggagtgagcagagcgcgaggaggaggaagcagatgtcgcgcacgaatccccgcagctccaccacaaccccgcctcggccggcacgcgaggcggcggcgagcgcgaccaccccagcaacaacggtggacacgaacagcgcgccaccgagcgcgctgttgagcccgacgcccccgccgtcgccggccgcgaaggagacgacgctggcgaagacatccggcgcgccgttcccgagcgagagcagcgtgacgccagcgatggccggcggcaggcgcagctccgccgagagcccctcgagggacgcgcagaagtactcggacgcggtgtcgccgagcaggtagaagagcaccgccagccagagcacggccgcggcgtaccccgccgccggcgcgtgggcgaacccgcagtagaacagcctgaggtagtccacgtaccccgcgggcgcgcacggcgggtgcgtccggaggtacaggcacctggcctccccgccctcgatggactgcagctcctggcaacttccctgctcctcgccggcggaagaggacgacgacgaaccagaacgagaacgagaggcgctccccctaagggccaacccttctaggacgccgccatggcctcggcgagtgggcaggaggtgggaggcggagaggacgagcagcaggaggaggaagcagcaggcgctggggacggcggcactgtacccccgcctgcgcaggagcgccat

SEQ ID NO: 99041 - DNA, 128 bp, Oryza sativa
  Clone ID: PAT_MRT4530_96891C.1
atgggctatgctacaaccatcacctgcacgcgccgtcagcttgtcacgccttctggtataccggctagcagccgagacagtgagggggagagtgagaggtcaggggactactggcagaggcaggcctt

SEQ ID NO: 99042 - DNA, 1033 bp, Oryza sativa
  Clone ID: PAT_MRT4530_96892C.1
acgaggagctcacctcagttgattctagcttagcaacacacaagcacacagctagctagctcagctctctgtgcttctctagctaagctaatcgttttcaggcgaaggaagcacacacatctccatttgtgcatcagatcaccggccaggtcgtcggcgagaatgcagtacggagcggcggccgagcaggcgtggtacatgccggcggcggcgccggcaccgatggtggagagcgcggtggcgcgggtggagcggctggcgtcggagagcgcggtggtggtgttcagcgtgagcagctgctgcatgtgccacgccgtgaagcgcctcttctgcggcatgggggtgcacccgacggtgcacgagctggacctcgacccgcgcggccgcgagctggagcgcgccctggcgcgcctcgtcgggtacggcggccccgccgccgcgtcgccgcccgtcgtccccgtcgtcttcatcggcggcaagctcgtcggcgccatggaccgcgtcatggccgcgcacatcaacggctccctcgtccccctcctcaaggaggccggcgcgctctggctctaggcctcgcccgcccgccattggcgtgctctggcttagcccccctagtatacctagcacgcaaaaagctttacctgctgctgctgctgctgctgctaatgaagaagatgaagatgatgatgatgactagcaagtagttgattgatttagctgctgctaataggatatccatcgatcgagatacagcccatttacacggtgctagctaattaatcagtgtgtgagtgagtgtgtgtttgagagtgagtgagctagagctagaagaagagagatcgaggttggtgtgtgtgtgcttttttcttcacgacgactgcctctgtccgtctcgtgcatgcttcgcgcgcgcgcgcgcgcatgtggttgtttgttggcgcgtgcgctggatttgcttgctttgatgctgcatgctattgctagctactgaaattaaaaaaaaaaaaaaaaaaaaaaaaaaaaaaaaaaaaaa

SEQ ID NO: 99043 - DNA, 450 bp, Oryza sativa
  Clone ID: PAT_MRT4530_96893C.1
ttgtttttttttttttttttgttttttttttttttttttttttttattggaaacagtctccaacatacttcaaatcatagaccacaccatacaggaaacatagtataaacattggcatagagaggacagctgatagcagctgggaatattctagcattactttgggggcatccctttacaaaacatggcagacattaccagctttttatgttggccatacacattcaacagggtttggtagggacagaccacactggccagaacatttcgtctccttagaagggaccagctgccatgagcagctcatcaagggtccagatgccctcgttggttgccccgtcttggggagcatcattttgcaaaagggtggccattgattcatttgagggggtttaaacaaaagggaatggcaaatacttcatctcgggaacgaaggggggcatgttttgg

SEQ ID NO: 99044 - DNA, 1605 bp, Oryza sativa
  Clone ID: PAT_MRT4530_96894C.1
atgggggtgaagaacctgtgggacatcctggagtcgtgcaagaagaagctcccgctccaccacctccagaacaagaaggtgtgcgtggacctgtcgtgctggctggtccagatgtacagcgccaaccgctcgccggccttcgccaaggacaaggtctacctcaagaacctcttccaccgcatccgcgccctcctcgccctcaactgcaccctcctcttcgtcaccggtaatcccattctccttttctacttttcatttctagctgctaaagaatcagatcagcccaattcacacccatccatttcactgcgtcgcaacaagggttccgagttctcctgcatgattaaagaggccaagcgtctcggcatggccctcggcatcccttgcttggacggattggaggaggctgaagcacagtgtgcatccctagatctagagtcactctgtgatggctgtttcacttcagactcggatgcttttctttttggcgctaggactgtttatagagatgttttcataggggagggtggctatgtcatttgctatgaaatggaagacatagagaaaactcttggctttggcaggaactcgctgatatcacttgcagtgctccttggtagtgattattctaatggagttaatgggtttggcccagaaacagcatgccggcttgttaagtctgtaggcgacaatttaattcttgatcagattttgtctaatggagttaaagctactagaaaatgtaaagggaaaaatagtggaaacaaggtggacgacatgtgccccaaagcaagttcctgcgaggttggcatgactcaagactctgatggtcaatttcgtgacgtcataaatgcatatctggagccaaaatgtcactcacctgattcggaagctgtgcagagggtatgcggacagcacccatttcttcggccacagcttcaaaaaatatgcgaggaatattttgattggagtccagagaaaactgatcaatatatacttccgaagattgctgagagagaacttcggaggttttcagaccttcgctctgcgtcttcagcactaggaataaaacctttgttgagtgagataccagtaccatgccctgtactggcgattgtgaagcagaggaaagttcatgggaatgaatgttatgaggtttcatggagaaatatagaagggctccaagtttcagtagtccctggggatcttgttaaaagtgcgtgcccggagaaaataacagaatttttggagaagaagggtgaagagaagaagcagaagaggagagcaaggccaaagaaatcagggcaggctgcagtgaaagatgttgatgaacagctccaagagttgctgcttggtattgaagctgatagtggtggcatattgggtgctacagccagtgtgtgtcagactctgacagcagcctacactgtggctgtggaagatgtagttgatctgtcgtctccttctcctcctcttcggaagctctccaagtcccaaaagaagatgatggccgaggatgtcaatgtggctggtatgaacatgaacaagatggagtggaagaagagccctggcagacataagcaatgttggttcacacagcactga

SEQ ID NO: 99045 - DNA, 517 bp, Oryza sativa
  Clone ID: PAT_MRT4530_96895C.1
aagcaaacatgggtttattttttatttatcctaagggaccaaaactaataaaaaaaggaattgtttcaaaatcccaaaaccataaaatgaaggggaaaccaaaaagggggggtttagggagccttttatttaataggatgccaaataaaaaactttttggccaaacttatttgttagcagggaatatttggctcgaatttatagtgggaacttctccatatcctaaaaaaacgattctgttatgtccctcccttctgctaaaggggattcctccttccaagatgccagttttttaaggaattccatcacctaagttgggccccgtacggaataaaaagcatcagtttccttgggcacagatgacaccaaatttccaaagccaatgctgttggccttaaaaaccttgaaggcatcctcataagtcttgccatctccaacataaataggaaaaacattttctttcccacatagtccaagtgactccagcaaaaattccacagttttccctttgttccag

SEQ ID NO: 99046 - DNA, 2173 bp, Oryza sativa
  Clone ID: PAT_MRT4530_96896C.1
gagaaatgcaaatcggaatttgaagtttggagtcaccgccgccgttgaggtccgtcgtctcgtccgagtccggtccggcggaagtaggggcggaagtgcgggcgggagatgggggtgaagaacctgtgggacatcctggagtcgtgcaagaagaagctcccgctccaccacctccagaacaagaaggtgtgcgtggacctgtcgtgctggctggtccagatgtacagcgccaaccgctcgccggccttcgccaaggacaaggtctacctcaagaacctcttccaccgcatccgcgccctcctcgccctcaactgcaccctcctcttcgtcaccgatggggctataccttcacttaagttggccacttaccgccgtcgcctcggatccatttctcatgctgctaaagaatcagatcagcccaattcacacccatccatttcactgcgtcgcaacaagggttccgagttctcctgcatgattaaagaggccaagcgtctcggcatggccctcggcatcccttgcttggacggattggaggaggctgaagcacagtgtgcatccctagatctagagtcactctgtgatggctgtttcacttcagactcggatgcttttctttttggcgctaggactgtttatagagatgttttcataggggagggtggctatgtcatttgctatgaaatggaagacatagagaaaactcttggctttggcaggaactcgctgatatcacttgcagtgctccttggtagtgattattctaatggagttaatgggtttggcccagaaacagcatgccggcttgttaagtctgtaggcgacaatttaattcttgatcagattttgtctaatggagttaaagctactagaaaatgtaaagggaaaaatagtggaaacaaggtggacgacatgtgccccaaagcaagttcctgcgaggttggcatgactcaagactctgatggtcaatttcgtgacgtcataaatgcatatctggagccaaaatgtcactcacctgattcggaagctgtgcagagggtatgcggacagcacccatttcttcggccacagcttcaaaaaatatgcgaggaatattttgattggagtccagagaaaactgatcaatatatacttccgaagattgctgagagagaacttcggaggttttcagaccttcgctctgcgtcttcagcactaggaataaaacctttgttgagtgagataccagtaccatgccctgtactggcgattgtgaagcagaggaaagttcatgggaatgaatgttatgaggtttcatggagaaatatagaagggctccaagtttcagtagtccctggggatcttgttaaaagtgcgtgcccggagaaaataacagaatttttggagaagaagggtgaagagaagaagcagaagaggagagcaaggccaaagaaatcagggcaggctgcagtgaaagatgttgatgaacagctccaagagttgctgcttggtattgaagctgatagtggtggcatattgggtgctacagccagtgtgtgtcagactctgacagcagcctacactgtggctgtggaagatgtagttgatctgtcgtctccttctcctcctcttcggaagctctccaagtcccaaaagaagatgatggccgaggatgtcaatgtggctggtatgaacatgaacaagatggagtcagaaagtagttttagcacgcaatcaagtactagtgatgttgacaaccagctgattgatctgtcttcacccctggctggtggtgataatggtatgaaaggtggaagaagagccctggcagacataagcaatgttggttcacacagcactgagacagacggaggaggaggaggtggtggtggtgtggcatcggtcggccatggaaccaccatcgacctatcttctccgtcgccggccataggcgacagatcaagggttcatcacgatgatgatgatgtaatacacgagaggaaagcaagggacctgagaatgttcctggacagcatacggaacgagctgtattgagtgattatttatgaaaaaaaaaaaaaaaatttttgagatgatagtgaaatggaattggaattacaatccgtttgagcaaaaaaaaaaaaaaaaaaaaaaaaaaaaaaaaagggggggggcctcgtgccgattcctgcag

SEQ ID NO: 99047 - DNA, 333 bp, Oryza sativa
  Clone ID: PAT_MRT4530_96897C.1
ccaagagtccagaggccgatctggaattgttttaaattcttaatcttgtcatatctgtttcctgagggagaaagaataccgctccattcaccataggaacaacccggagagctttggagcgcatcctggggagacccatgattgaactaactctcccttattgctttgcgcatcactgaacggcttgtttttgatggaaaactctcccagaccatcctgttttaatgaatgggacaataatctgggagaggaggctagctaaccgtgtgttctcccggttcctagctctctgactcacatggcttcacccatggggaggaacaagcggtgcct

SEQ ID NO: 99048 - DNA, 852 bp, Oryza sativa
  Clone ID: PAT_MRT4530_96898C.1
atggccatggcggccgcggcgaggcaccaacgccacccgctctcgcgctgcggcgaggggcggcggtggcggcgcggggaggtgcggtgctcgtcgccggcgcaggagttcgcggcgctggcggcggtgttccggcggcggctggtggtgggcgccacgacggcggccgcggcggccgtcggggcgaacttcggcggggtgaccagcttcctgctggggctgtccccgcagctcggccgctcgctccgcctcgacgtgctctaccccgtcggcggcttcacccgatgcctcgactccgacaatggattcgagttcatatatccagcaagctgggttggagatcagacattgctatacagaggagcgaagagagcagaactgcagagatcactagaccctcccccattggcaaatgggaggtccccatcacggcctcggaacatcagtgaacctgtggcagcttttggccccccaggatccagtggggagctcaatgtcagtgtcatcgtttcacctgtcccacaagatttctcgatcgaggcttttggtggccctaaagatgttggggaggtggttctcagaaggatcgcaaagacaaagcggggcgcagatataaacgccactcttcttgatgctgccctgagagaagatccagcgaacaatgtgaaatactacaagctagagttccgagttgaaagcccttcctttcgacgacgcaatgtcgcagtgtgctgcgcgaaggatgggaaactatacaccctgaacgctcaggctccggagtcggcgtggaaggcggttcggaaagagttccttgcaatggcagattcattcagcctagtggctgatgtatga

SEQ ID NO: 99049 - DNA, 1065 bp, Oryza sativa
  unsure (1)..(1065): unsure at all n locations
  Clone ID: PAT_MRT4530_96899C.1
gcacgagggtgggttggcttctcctccccctcccggttcggttcgggtccggttcgatttcggttttttcttcggttcgggggttggtgggaaagcatggcggcgccggatgttgagtaccgctgcttcgtcggcggtctagactgggccaccaacaaccgatccatagaagatcactatatcacctactgttagattctttagcacaaaaataaaaaccattcgataacaccatatgttattttctcttttatgtatatcattaattatatccgtaacccccatttattaattctcgattcttcttaaacaatatctattttcatatcaattttctacacatttcttaaaacatataatcaagaaatctaattataagaatctgttaacatctcctccccatctacatatttctcacacctcccaacctccgctcctctcctccctccactaatttaaacttccaaaacttacacattaacaaaatttcacatatatgtaatacttaactacaaataactattatacttacaatactaagaaatatcatacccgctccgttctatcaattttatttattttttaacttcctaccctccctctccaccaactttatattacttattatatccactaacgcttattattgaacagtatcgttgccaatcaaaagaccatatcatcatattctctgctatgtgtatcctcatttgctctttctactttactatcttaaaatcatctttctatactaattacattattgaatacaaacactattcaatccaaaccccaaccctccaagaactaacattataaacaaataatagcaccaacccacacaaatttttataaaactatttactctcttctttttacttccccttcactactttatacttctattcatacccatcacaatcaatctcaacactatctattccctcgtcctatttcaaacaccatcatattaatatatcaaaaatttacataccccctcatccgcgcatctctctcgcaacaatatcccgaccctcccactctcccgaacatgatcacgcctgn

SEQ ID NO: 99050 - DNA, 2580 bp, Oryza sativa
  Clone ID: PAT_MRT4530_9689C.1
atggattacttcactaagtgggccgaagccgtgccgctcgagaatattacttgtacagagattccgtcgtttccggagagtccgttttcgcggaagaagagtttgaagagttccaaggccagcaaggcaactcctggtttggaatggtacattcctggtttggagatagaactgtgcagccggggtggttgttcagaatggttgggcctatacaacaggatgccgtgttacaagcctgagtacctgtttggagttgagggttttgtccaggagttgcgtacgatgtcctttgtcattggatttgggaatgctcctttttatgcccagattcgtcatgatcgtcatgaagaaaagtgccgagtcaaagtcaccttgaacagcaatagtgaagatatcccctcagtaatgtttgaagctggaggaagaaactacatccatgcatgtcaggaggtggcaaggatcgccataggagagctccgtgatcgctacagtgatcagttggtcgacactgagtatcgctatcatcctcgccaaccccagggaagtgaccgtggcagttaccttgagactgaaggaattgagaatgatgttaccacaagacatttggttgagatgttgtgggctatggatgaaagtcgtgcggagactgtgttagcagctcaagatcgtgaagatcggaatcgtggtaagatttgcaagttagaagacaaggtggatcgtttggagaaggaattagctgcattgaagggagaagcaccgccgcagaaggctaggattcgtcttaccgcaaggaagagagctttgtttgtccctcgttatcaattggcgccaaaggtccgcgtggtggagaaagaagttgccccagcaaatcctccggtcatcatcataagtagtgacgaagaagaagaacccaagcgcaacaattccaagtttgagtgggtagctatcaaagatgaggaagatgagccgaacgagccttcaatcgacctcctatgctcggaagaactagataccactaatcctgttgaagctggtgattggctgcatgccatagagaagaaattggatttgcttcagtgcactaatcaggagaaggtctcttttgcatcacatcagttgcatggccctgcctctgaatggtgggatcacttccgcctgaataggattactgctgaacctatcacttggcttgaattcaccgctgctttccggaagacgcatataccatcgggagtagtgtctctcaagaagaaggagttcaggtcgcttacccagggatctcgctctgttacggagtatctgcacgagttcaatcgtcttgctcgttatgctccggaagatgtgcgcaatgatgaagagcgccaggagaagtttttgggaggacttaatgatgagctttcttacccacttatggttggagattaccctgatttccagaaattagtggataaggctattcgtcaggaagacaagtacaatcgcatggagcagaagaaacgtcggattgctcaattcaagacacaacagggaaataatcagaagccgcgtcttactttaggaccccagcccatgccacagggaggttcttcgtctgttgttcgtccgcaacgtcagttcttcaacaacaatgctggcaacaacatccgtaatcaagctccacgtcctgttgcagctccagcacagcaacaacctgccaaaagggagcaaggcagcaagcctgtggtgtgtttcaactgtggagatccaggacattatgctgacaagtgtccgaagccccgacgcgtgaaggttgtccctgtccagaataactctgctgtaccagcatcaaaggcccgtgtcaatcatgttgctgctgcagaagctcaagatgctccagatgtgattttggtccgggagtatcctgatgtgttcccagatgatttacctgaaaggatacatcagaccgagttcatcaccatggggagctccggatattatcggaggtttatagagaatttttccaagattgctaagcccatgacacgactgcttcagaaagatgtgaagtacaagtggtcggaagaatctttagaagcgaagcccactctaattgatcaagttagagaagcccaaattaatgatcctgatattcaagagatcaagaagaataggagaagaggaaaagctattggtttcttggaggatgagcacggaactccgtgctccgccgtcgctccagctgtcgccgccgctcgggaagaccgccgtcgtcatcgccaagtcgccgccgtcctcgtccgccccttcgcagccgtcggaacccgccggagcatcgtcgccgtcgtcaacccgaaggtagccgccgcttccttctcgtcgccgtcgccgtccgttccttttccgccgccgttttggtcaccggtgtgttcgccgcgttgtcctctacgtgctggtgccctccgttggtgccgtggtgccgccgttcgccggcgagtgtccgccgcccgagccgtcttcttcgccgagccgccgccgtcgtcggtgacgtcatcgctgacgtcatcgggatcctatcccgtgagccggtcgtggaccgattga

SEQ ID NO: 99051 - DNA, 505 bp, Oryza sativa
  Clone ID: PAT_MRT4530_968C.1
gccgcctttgtttttttttttttttttttttttttttttttttttttttttttttttttttttttttttttttttttttttttttttttggggggaaaaaaaaaaatttttttggggttttcccatttggttttttttacaaaaacctaaaccttttttcccaattttttttttcaaaaaaacccttttttttactcctagataaaaccattttcaaaaatttaaaaggccctaattttttcccattacaaactttgggacataacccttgaaagggggggggaaaaccccccttttaaaaccctgggcccatttaaaaacgttgttttccccttgcgtcccaaaagttaaaaaactccaaaccaggggttccccttggggaagggggcccccaaataaattcccttaaagggggggacccccgggatttttgcccgcccccgggtcattgaaagaaatctttttgctttttgttttaaaaaacccggggggtccaaagttttgg

SEQ ID NO: 99052 - DNA, 1019 bp, Oryza sativa
  Clone ID: PAT_MRT4530_96900C.1
acacatcaccaacattattattcatggaccggggtacattgtcaatggccatctgggaccggcatgttgggcaccttgccgacggtgtacccgccgtcgacaacgaggttgtgcccgttcacgtacttagcctcgtcggaggcgaggaacaccgccgcccttgccacgtcctcggcctccagtgtcacgccatccatctcgtttatgtcattctccacgatccggcggtggtcgtcggcgctccggctggggtaccaccttgcgaaggcgaccgccgccatgggcgtccagatgtagttgggggagatggcgttcacgcgcacgccggagcgcgccatctcgcccgccacggcgcgcaccagcccgagcaccgcggccttggacacgctgtagtgcgggaccgccacgccaccgatcacccccgccgtgctcgccgtgcagatgatgctgccgcggcggcgcggcaccatgacgcgcgcggcgtgcttgacgcccgccaccaccgccctggtgttcaccgccatcacgcggtcgaagtcagcgaggtccagcgcgcccacgggggtcggcgtgaggtcaccggggatgccggcgttgttgaagacgacgtcgagacgcccgtgccgtgccacggcgaggtccacggcggccgcgacctgcgcctcgtcggtgacgtcgcagcgcgcgtacgacgccgcgtccgcgccgagctccgcggcgacggcgtgtcccaggtcgtcctgcacatcggcgaggatgaccttggcgccattcctgacgaactcctccgccgtcgccctgccgatgccgctggcgccgccggtgatgacggcgaccttcccggccaacctctgtgaatcggaggcggtggcgaaggcagtgacggaggaagacgaagctgcaggtgtcctcctccccctgctgaggatgcgatgcatcgctgtgaacatgacgcctctgaattaagctctcagcctccccgagcaaccgcgagcgatagagagagagaagcctcgtgc

SEQ ID NO: 99053 - DNA, 4041 bp, Oryza sativa
  Clone ID: PAT_MRT4530_96901C.1
atggaggaggtggagaagaaacgggaggagagtgagaagcatcgggagctgtcggaagagaagagccgatctgagtttttggctctcaaagtggcggtggaatcccgaatgccggtggtggagaagcgcgtggatgatttgcacgtttcggtggtgggactccaagatcaagtcgacaaactccagtccttggtgcagcagccacctcgtccttccccttcttctccgggttcgcccgatggtatgcaaactccgccccaatttacttcgctcccctctgctctggaacagtctgcgtttgcctctgctcttttgggtgcttcgggaattgggggtaatgttccacctatgtcttgtccgcaattcaatggtgatagtcgtcagctctggaagagtaattgcgaggagtactttgaggtttatggtgttcatcctaagaattgggtgtgtgtggctggactgaattttactggcaacgctgctttttggttacaatcggtgcgttccaaactggtcggggttacttggcaagagttctttgatcaagtttgtcttcgtttcactaaggataggcagaaggtcttgattcggcagtggtttcacattgttcaggattcttcagtttctgattatgtggagaaattcgatggtattatgcatcagttgttggcttatgatagttctttgcctctgaattattttgttaccaagttcgtggaaggactgaggaaagacattagatctggagttttgatgcagaaacctcaagatttggatacagcgtgttcgttggcttttttgcaagaggaaatactagaaggaagtcaccctgctgtgtacaggaaacctgagccgattttgttgtctaaaaattttgctcgccaacctgcacctgtttctcctgtgtccaaccatcctcaaggttctgtgttggaggataggaaacagtctgaattctcacagtctcgctctgataagttttctgccttgaaatcctacaagcgtgctaaaggcctttgtttcacgtgtggtgagcattggagcagagagcataagtgtggctcctcggttcagttacatgttgttcaggaacttttagctgcgttgcaggacgatcagttaaaccatgagtccgtcgatactgtatctgaacctgtagaaccagtttttatggctatttcttatcaggctgttactggtactgaatccttgacttcttttcggttaaatggctgggtacaggggtatgaattactcatgttagtcgattctggtagttctcattccttcattgatattactgtggcacaaaaacttcagggtatccaatgtttacagcatgttgtttcagttaaagttgctgatggtggtgtgatatcatgctctcagtatattcctggttgtgactggtggactcagggtcaaatttttaaaactgactttaaggtgttgcctttgggttgctatgatattatattagggatggattggttagtcactttgggatctatgaacattgattgggctgctaagtgcatggaattcgctagagcagattccttggtgaccattaagggaattcagtctcaaactactcattgttcttgtatcagtggtgatcaattgcaaggcatgtttaagttgggatccatcatgcatgttcttcatcttcaggaagtttccactgccaagttaggtcacattcctcctgaaattcaatctcttcttactgaattttctgccctatttgatgatcctcaaggcctgccacctaagagagcttgtgaccattccattccactgaaatcagatgctaaacctgtcttcctcaaaccttatcgtcataaccctgcacagaaagatgaaatagagaagcaggttaaggaaatgttgttgtcaggggtcattcaacccagcaatagtgcattttcttccccagcattgttagttaagaagaaggatggtacctggcgcttgtgcattgattatagacagttgaactccatcactgtgaagggtaaatttcctatgcctgttatagatgaactattggatgaattgtctggatccaaagttttttccaagctggaccttagggctagttatcaccagatcagattggtggagggtgaggagcacaaaactgcttttcaaactcactctggacattatgaatatcgtgttatgtcttttggccttactggagctcctgcaacatttcaaggcgccatgaatgatactttggctcctgtgttaaggaagtttgctcttgtgttttttgatgatatacttgtcatattatcagtgatcaaggagtcactactgatcctgctaagattgaggaagtggcctttgaccaacctgttaaagaaggatgttccttttgtctggtctgtggaggctgatcaggctttcaaggctcttaagcaagctttggtatctgctcctgtgttatctcttcctgatttttctttgcctttcactgttgagactgatgctagtgatgaaggcaaagtctggataggtaacaatccatctgtgcaggataagattatctctgcgttgcacagtagtcctttgggggggcactctggttttcctgttacttatagtaaaatcaagtctctttttgcttggcccaagatgaagaaacagattcatactactgtcaagacatgtggtatttgcatgcaggccaaaccagatcgctctaaataccctggtcttcttcagccccttcctgtccctgatggtgcatggcagattatcaccatggactttattgaagaattttggtttaacacttcttaccattctgccattcttcagtctccatttgaagctctctatggctatcctcctggtcattttggtataagggatgatgcctgctcagtacctgatttgcatgagtggttaaatgaacgtaaggtgatgactcagttactgaaacaacacctgaatcgtgcccagcaacaaatgaagctgtatgcagacaaaaagcgcagtttcagagaattttctgatggagattgggtctacttgaaattgcaaccttatattcagtcctctgtggcaaaaagagcaaatcataaactatcattccgttattttggtccttttcaagttttacatcgggtgggcaaggtggcttataagttgtctcttcctgcagagagctccattcaccctgtttttcatgtttcacagcttaagcatgctgttgggttcaggcattctgttcaaccgtgtttgcctgcatgttctgaccttaaagtttcagtggttatcttggcttctcgtcagatcaggaaaggacaggaaacttgggaggatcaagttgagttgtgtcagcgttttcctaatgccttggcttggggtcaagccacttctcaaggagagggggttgtcagcagcacagctataccggatgagctacagaacactgtcaagaccaaggaggttaagcagactaaggaaggaagacctgttaggcaccgagtatgtaatcctagattaacactgctctacataaaggctcgcgccctcatccaacaccgctggaagatggaatccatcctagaccacatgctcagggagggccgagaccgcatgctcaaggaggccggcatcgtgatccagcagcagcaggcggaggagaagaacagcagcggcggcacggccatggcgccgccgccaccgtgccccggaagtagcgtgacctgctacgtgtgcttcgagaaggtctcaccggacgccgatcagcttcaacatggacagccacgtcgatgcggcaatgctgaacgccgtcaactccttcgactggccgcacggcggcaagatgctgcagcggaggatcattcagggcgagctgatccgcgcgcaaaggacgggcggccagcggccgtcttcgcccccctcgctggccaacgcctttttccctctccgcgcacgctcgccggccggcgaggaaagatgctgggtggggagagaggaggcgtcggtcgctccctctcccatcgtccactcgtccgtggatag

SEQ ID NO: 99054 - DNA, 837 bp, Oryza sativa
  Clone ID: PAT_MRT4530_96902C.1
agaatcaaatatttttattatgaattttttcatcgctatatgttagacaatatgaatacttaaaaattatatgccatgaactattttgtaaaataaatcggttgcaacgcacgggtattatgagagttattattgtgaagaaaatagttgagcaaagtgactccccaaccccatgaactgttcaacaaccttagcttctccaacctctggaaaatggcacaaagacatcagcatacacaaaaacaagtcaacaccaaccaaaccctaattgcttagaggacaaagttagctaggcagctagctaagctagtcacacatcaccatcacacacaccaagccacaccagcaacagcagcaagcaacccaatccaagaaccagagaaggaggaggagatctgggtggcaatctggcggatcaatggggaagaagaccagatcaagaaatcatcagtagagtgttcacaggaagaggccagatcggaggaggagcatccggatcgatgcagatgagcagcggcggcgtcggcgtcggcggcggcggagggagcaaggtgatgtcgccgaagcaggtgctcaccgtcgtcctcgtcgtgttctgcgcgctctccttcgtcaagctgctgctcctcaccggctcctcgtcgcccgccgccgccgcgcgccgcggccgcgcctcggcgtgggggaacgggacggacgtgggggacggcggcctcgcgcccaaggaggccgcactgctccggtccgtggtcgccgagcgcgcgccgtgccggctgctcgtgttcggcctctccccgcagctcgccgcgctcgccgcggtcaacgccggggagggcg

SEQ ID NO: 99055 - DNA, 4239 bp, Oryza sativa
  Clone ID: PAT_MRT4530_96903C.1
atggaggaggtggagaagaaacgggaggagagcgagaagcgtcgggagctgtcggaagagaagagccgatctgagtttttggctctcaaggtggcggtggaatcccgaatgccggtggtggagaagcgcgtggatgatttgcacgtttcggtggtgggactccaagatcaagtcgacaaactccagtccttggtgcagcagccacctcgtccttccccttcttctccgggttcgcccgatggtatgcaaactccgccccaatttacttcgctcccctctgctctggaacagtctgcgtttgcctctgctcttttgggtgcttcgggaattgggggtaatgttccacctatgtcttgcccgcaattcaatggtgatagacctcagctctggaagagtaattgcgaggagtactttgaggtttatggtgttcatcctaagaattgggtgcgtgtggctggactgaatttcactggcaacgctgctttttggtcacaatcggtgcgttccaaactggtcggggttacttggcaagagttctctgatcaagtttgtcttcgtttcactaaggataggcaggaggtcttgattcggcagtggtttcacattgttcaggattcttcagtttctgattatgtggagaaattcgatggtattatgcatcagttgttggcttatgatagttctttgtctctgaattattttgttaccaagttcgtggaaggactgaggaaagacattagatctggagttttgatgcagaaacctcaagatttggatacagcgtgttcgttggcttttttgcaagaggaaatactagaaggaagtcaccctgctgtgtacaggaaacctgagccgattttgttgtctaaaaattttgctcgccaacctgcacctgtttctcctatgtccaaccatcctcaaggttctgtgttggaggataggaaacagtctgaattctcgcagtctcgctctgataagttttctgccttgaaatcctacaagcgtgctaaaggcctttgtttcacgtgtggtgagtgttggagcagagagcataagtgtggctcctcggttcagttacatgttgttcaggaactcttaagcgcgttgcaggacgatcagttaaaccatgagtccgtcgatactgtatctgaacctgctgaaccagttttgatggctatttcttatcaggctgttactggtactgaatccttgacttcttttcggttaaatggctgggtacaggggtatgaatcactcatgttagtcgattctggtagttctcattccttcattgatattactgtggcacaaaaacttcagggtatccaatgtttacaacatgctgcttcagttaaagttgctgatggtggtgtgatatcatgctctcagtatattcctggttgtgactggtggactcagggtcaaatttttaaaactgactttaaggaagtttccactgccaagttaggtcacattcctcctgaaattcaatctcttcttactgaattttctgccctatttgatgatcctcaaggcctgccacctaagagagcttgtgaccattccattccactgaaatcacatgctaaacctgtcttcctcagaccttatcgtcataaccctgcacggaaagatgaaatagagaagcaggttaaggaaatgttgttgtcaggggtcattcaacccagcaatagtgcattttcttccccagcattgttagttaagaagaaggatggtacctggcgcttgtgcattgattatagacagttgaactccatcactatgaagggtaaatttcctatgcctgttatagatgaactattggatgaattgtctggatccaaagttttttccaagctggaccttagggctggttatcaccagatcagattggtggagggtgaggagcacaaaactacttttcaaactcactctggacattatgaatatcgtgttatgtcttttggccttactggagctcctgcaacatttcaaggcgccatgaatgatactttggctcctgtgttaaggaagtttgctcttgtgttttttgatgatatacttgtatacagccctgatttagtttctcatgtccaccatcttcgacaagttctgcagttgttgactgagcatcagtggaaagttaaattgtctaaatgttcttttgctcaacatcaattgtcatatttaggtcatattatcagtgatcaaagagtcactactgatcctgctaagattgaggaagtggttaattgggcagttccaaaatttgtcaaaaagctcaggggatttttgggtttggcaggttattataggaagtttgtcaagcaatttgggatcctttgcaggcctttgaccaacctgttaaagaaggatgttccttttgtctggtctgtggaggctgatcaggctttcaaggctcttaagcaagctttagtatctgctcctgtgttatctcttcctgatttttctttgcctttcactattgagactgatgctagtgatgaaggtattggtgctgtgttatctcagtgtggtcatccgattgcatttcttagtaaggccttgggggttaaaactaagggtctttccacctatgaaaaggagtatttagctattttattagctgtggaccattggagatcttacctgcagcagcaagagtttgtcattttaactgatcaccatagtttaatgcacttgaatgaacaaaggctgcacaccccttggcaacacaaagcttttactaagttgttgggccttcagtttaagatttgctacaggaagggatccagtaatgctgcagctaatgcactttctaggaaatatcctgaagagttatctgaactacatgtggtttccagttgcagtcctgtatggcttcaggaggtttctgatggttatcttcaagatgtcttttctgctcaacttttgactgacttgactcttaatgctgagtctcggcccaatttctctttgtgtaatggtgtccttcgctttaaaggcagagtctggatagataacaatccatctgtgcaggataagattatctctgcgttgcacagtagtcctttgggggggcactctggttttcctgttacttatagtaaaatcaagtctctttttgcttggcccaagatgaagaaacagattcatactgctgtcaaaacatgtggtatttgcatgcaggccaaaccagatcactctaaataccctggtcttcttcaaccccttcctgtccctgatggtgcatggcagattatcaccatggactttattgaaggtttgcctaagtccggtcaattcaactgtattttagtggtggttgacaagttttccaagtactctcatttctttccattgtcccatcctttttctgctattgatgtggctcaatcttttatggtcaatgtttacaagttacatgggttacctaagttcatcatttcagaccgcgacaagattttaactagccacttttgggagcagttgtttttgagaaccggcacacaattgcaactaagcaccgcttatcacctccagacagatgaacaaactgagcgtgtgaaccaatgtttggaaatatatctgcgatgttttgttcatgctgttcctcataaatggagttcttggttgtatttagcagaattttggtttaacacttcttaccattctgccattcttcagtctccatttgaagctctctatggctatcctcctggtcattttggtataagggatgatgcctgctcagtacctgatttgcatgagtggttaaatgaacgtaaggtgatgactcagttactgaaacaacacctaaatcgtgcccagcaacaaatgaagctgtatgcagataaaaagtgcagtttcagagaattttctaatgtagattgggtctacttgaaattgcaaccttatattcagtcctctgtggcaaaaagagcaaatcataaactatcattccgttattttggtccttttcaagttttatatcgggtgggcaaggtggcttataagttgtctctttctgcagagagctccattcaccctgtttttcatgtttcacagcttaagcatgctgttgggttcaggcattctgttcaaccgtgtttgcctgcatgttctgaccttaaagttcctgtggctgtcttggcttctcgtcagatcaggaaaggtaactctgtgaaagctcaagttttaattcggtggtctggagatgttacaggacaggaaacttga

SEQ ID NO: 99056 - DNA, 189 bp, Oryza sativa
  Clone ID: PAT_MRT4530_96904C.1
atgtctatccttattgacaagggcggcatacgacatatcaacagcaggtcagacagtagcagaaaagggaggggaatgcacattctgtacaaggatgtcaagtcttgccaggatgaggatgtgcatgttctatggtccatattggtggattcgcaccgtcacccagctctgatgaagctgaagctctag

SEQ ID NO: 99057 - DNA, 1224 bp, Oryza sativa
  Clone ID: PAT_MRT4530_96905C.1
gtcatattatcagtgatcaaggagtcactactgatcctgctaagattgaggaagtggcctttgaccaacctgttaaagaaggatgttccttttgtctggtctgtggaggctgatcaggctttcaaggctcttaagcaagctttggtatctgctcctgtgttatctcttcctgatttttctttgcctttcactgttgagactgatgctagtgatgaaggcaaagtctggataggtaacaatccatctgtgcaggataagattatctctgcgttgcacagtagtcctttgggggggcactctggttttcctgttacttatagtaaaatcaagtctctttttgcttggcccaagatgaagaaacagattcatactactgtcaagacatgtggtatttgcatgcaggccaaaccagatcgctctaaataccctggtcttcttcagccccttcctgtccctgatggtgcatggcagattatcaccatggactttattgaagaattttggtttaacacttcttaccattctgccattcttcagtctccatttgaagctctctatggctatcctcctggtcattttggtataagggatgatgcctgctcagtacctgatttgcatgagtggttaaatgaacgtaaggtgatgactcagttactgaaacaacacctgaatcgtgcccagcaacaaatgaagctgtatgcagacaaaaagcgcagtttcagagaattttctgatggagattgggtctacttgaaattgcaaccttatattcagtcctctgtggcaaaaagagcaaatcataaactatcattccgttattttggtccttttcaagttttacatcgggtgggcaaggtggcttataagttgtctcttcctgcagagagctccattcaccctgtttttcatgtttcacagcttaagcatgctgttgggttcaggcattctgttcaaccgtgtttgcctgcatgttctgaccttaaagtttcagtggttatcttggcttctcgtcagatcaggaaaggacaggaaacttgggaggatcaagttgagttgtgtcagcgttttcctaatgccttggcttggggtcaagccacttctcaaggagagggggttgtcagcagcacagctataccggatgagctacagaacactgtcaagaccaaggaggttaagcagactaaggaaggaagacctgttaggcaccgagtatgtaatcctaga

SEQ ID NO: 99058 - DNA, 1780 bp, Oryza sativa
  unsure (1)..(1780): unsure at all n locations
  Clone ID: PAT_MRT4530_96906C.1
tcatgcaagtgtactcctcgcaaatcttcacaatcggaggaggaagacggattcatcgaccttacttgctcagaccgtccgcttaatctggggaatcattgctagtaatgttctgtagcgacactgttcttgtaggtgggaattgtatctacaaggcaaaagaaacagtttgggtttcctgtttcactttttttcgtcaatcacggcgtgctacgacaagcctcgctacgtgaccaagcaagcggccaagatcatggattaggaaagtaagctcgatctcttgttgaggaagatggaggaggtggagaagaaacgggaggagagtgagaagcatcgggagctgtcggaagagaagagccgatctgagtttttggctctcaaagtggcggtggaatcccgaatgccggtggtggagaagcgcgtggatgatttgcacgtttcggtggtgggactccaagatcaagtcgacaaactccagtccttggtgcagcagccacctcgtccttccccttcttctccgggttcgcccgatggtatgcaaactccgccccaatttacttcgctcccctctgctctggaacagtctgcgtttgcctctgctcttttgggtgcttcgggaattgggggtaatgttccacctatgtcttgtccgcaattcaatggtgatagtcgtcagctctggaagagtaattgcgaggagtactttgaggtttatggtgttcatcctaagaattgggtgtgtgtggctggactgaattttactggcaacgctgctttttggttacaatcggtgcgttccaaactggtcggggttacttggcaagagttctttgatcaagtttgtcttcgtttcactaaggataggcagaaggtcttgattcggcagtggtttcacattgttcaggattcttcagtttctgattatgtggagaaattcgatggtattatgcatcagttgttggcttatgatagttctttgcctctgaattattttgttaccaagttcgtggaaggactgaggaaagacattagatctggagttttgatgcagaaacctcaagatttggatacagcgtgttcgttggcttttttgcaagaggaaatactagaaggaagtcaccctgctgtgtacaggaaacctgagccgattttgttgtctaaaaattttgctcgccaacctgcacctgtttctcctgtgtccaaccatcctcaaggttctgtgttggaggataggaaacagtctgaattctcacagtctcgctctgataagttttctgccttgaaatcctacaagcgtgctaaaggcctttgtttcacgtgtggtgagcattggagcagagagcataagtgtggctcctcggttcagttacatgttgttcaggaacttttagctgcgttgcaggacgatcagttaaaccatgagtccgtcgatactgtanttcgaacctgtagaccagtttttatggctatttcttatcaggctgttactggtactgaatccttgacttcttttcggttaaatggctgggtacaggggtatgaattactcatgttagtcgattctggtagttctcattccttcattgatattactgtggcacaaaaacttcagggtatccaatgtttacagcatgttgtttcagttaaagttgctgatggtggtgtgatatcatgctctcagtatatttctggttgtgactggtggactcagggtcaaatttttaaaactgactttaaggtgttgcctttgggttgctatgatattatattagggatggat

SEQ ID NO: 99059 - DNA, 1443 bp, Oryza sativa
  Clone ID: PAT_MRT4530_96907C.1
atgcctgttagggatttggtcgcatgctcggctgcaatctaccggcatgcgaagagcgggttgtttggcgaggctgtcaggctgtttgttggtatgatgagggtgggggtgagccccaactcgttcacattggttggtgctttaatagcagctgctgggatgggcaacttggtgcttgctgagtgcatccatgggtgggctatgaagagcctgttggaatccaatccttttgttcggaccgcattgcttgattcctatgcgaaatgtggacgtcctacgaaggcctgggcattgtttggtgaaatgagggatcctggtatagttacttggaatgcattgatttctggtctagtgcacaacgatctgtttgaggaagcattgctggttttcaagaggttgctgttttcatttggaccagttcataatgttgtgactatgattagcattgctcaggcttctgctggttgtggtgaccttggattgtgtgagagtgcacatgcttattcagtcaagattgggcttgattcagatgtctcagtgacaaactcaatcttgggtatgtacttgagctttggtagtcttgcgattggaagagagattttcaaaaagatcgctgttaatgatgttgtttcttggacgatgatgatgggtttccttcttgaggaagcccaggctattgaagttatacatatgtttgttcagatgaggttgagtggcatagtgcctgatagggtagcattggttacagtggcgcaagcttgtgcacatctgggtgatggaaggataggaaagttggttcataacgagattgtaatctgtgggttcagtggtgagcttcctgcagttaactcgttaatcacaatccactctggactggtggatgatgggatgctcgtctttagaagaatggttaatgacaagggaataattccatgcccagagcatgtcggatgcatagttgatatgttggcaagagctggccgcttggaggaagcagcaggagtggctagcttgactcacaataaattaggagcaaatgcttggaaggctttgatgggaggagggcatttgcatggtgacatgaaatttactaaagttgctgcaaagaaggtgctcaccacggaatcatttgattatgggcatgttgtgttactttctaatgcttatgcatcatctggcaaatatagagctgctgaatctgtcagatccttgagaataatgtatgacaaaaactctggaaggtcaagaggttttgggtttgtgcacttctcaaacgagtatgaagctaagtgcgccaaggatgctatggatggaaaggtaatgctaggacgaccattgcggataagttttgctcttgacaaggtccgtggtgctccagttgttgttccacgactttccacggtgagtttaacgattgacatgttcattacatttctggaatga

SEQ ID NO: 99060 - DNA, 1794 bp, Oryza sativa
  Clone ID: PAT_MRT4530_96908C.1
atgcctgttagggatttggtcgcatgctcggctgcaatctaccggcatgcgaagagcgggttgtttggcgaggctgtcaggctgtttgttggtatgatgagggtgggggtgagccccaactcgttcacattggttggtgctttaatagcagctgctgggatgggcaacttggtgcttgctgagtgcatccatgggtgggctatgaagagcctgttggaatccaatccttttgttcggaccgcattgcttgattcctatgcgaaatgtggacgtcctacgaaggcctgggcattgtttggtgaaatgagggatcctggtatagttacttggaatgcattgatttctggtctagtgcacaacgatctgtttgaggaagcattgctggttttcaagaggttgctgttttcatttggaccagttcataatgttgtgactatgattagcattgctcaggcttctgctggttgtggtgaccttggattgtgtgagagtgcacatgcttattcagtcaagattgggcttgattcagatgtctcagtgacaaactcaatcttgggtatgtacttgagctttggtagtcttgcgattggaagagagattttcaaaaagatcgctgttaatgatgttgtttcttggacgatgatgatgggtttccttcttgaggaagcccaggctattgaagttatacatatgtttgttcagatgaggttgagtggcatagtgcctgatagggtagcattggttacagtggcgcaagcttgtgcacatctgggtgatggaaggataggaaagttggttcataacgagattgtaatctgtgggttcagtggtgagcttcctgcagttaactcgttaatcacaatgtattctaaatgtgaggatttaagttctgcaagactgttgtttgatggtacaatggagaaaagcttggtttcatggacggcaatggtgtcagcgtatatagaaaatggatatgccctagaagggatgtatctctttgcgaagatgaggcatgaaggttcctttatgattgattctgtgacactggtcaccttattgcttgcttgctatgaggttgctaagtttgaactatgtattcaacttcatgcatattgttacaaatcgggtttgtgtctgtacaaacctgttcttaataccctcattgcagtttatggtaagtgtggatatgcgactttagcgcataaagtgtttgatgagatgatttctcggaatgctgtctcatggaatactatgattttatcctatggtgtaaatggccaaggagagaaagcagtatcacttttcaatgaaatggagaaatctagcgaggatcaagacagtgtgacttatttgaacacattgctagcatgtagccactctggactggtggatgatgggatgctcgtctttagaagaatggttaatgacaagggaataattccatgcccagagcatgtcggatgcatagttgatatgttggcaagagctggccgcttggaggaagcagcaggagtggctagcttgactcacaataaattaggagcaaatgcttggaaggctttgatgggaggagggcatttgcatggtgacatgaaatttactaaagttgctgcaaagaaggtgctcaccacggaatcatttgattatgggcatgttgtgttactttctaatgcttatgcatcatctggcaaatatagagctgctgaatctgtcagatcctgttatgcaaagcgaattacaaggaaaactttagggcttagttccattgagatagtgccgtacagcagaagatag

SEQ ID NO: 99061 - DNA, 247 bp, Oryza sativa
  Clone ID: PAT_MRT4530_96909C.1
aaaaatggttactgctattggctggcaataaattgacttgtgttctttgatcataaaaatgaaacaaccattgggtgtcagcatatccatgttagcccatgctgccaaagatactacaaggagtaaacaatgttgtaccgatgaaacaagttttctccatgctctctgtaatctgctaagctgaaggtgtgccttccaaacttgctggaagctgcaaaggcagtagcgccccttccatgcatctata

SEQ ID NO: 99062 - DNA, 1144 bp, Oryza sativa
  Clone ID: PAT_MRT4530_9690C.1
ttgcgaatttcttcatttaattttcaattaaaaatcggattattgcgtcagccgaggggcgggcgcgcggaccgggtccacgggaagtggggcccacgcgtcagccgctcggtccacggtggaccgggcgcacgcggctggcggcggtcagcgccgtgggtcccgcgcgtcaccgcacccgcggcgcggcggctgacggccgggcccacttggcagccgcgagggcgcgcccgagggcggcctcgccggcacgcgacgggaggaggacgcgcacccgcgccccgatggtcgccgccgggcaaaacggcgcggcggagtggcacccgagagagaggagggaagggggaagcgaacggaacggtcttcggctcaccccgggacaacgacgacgacgaaaacggtggacggagcggaagaagacggcggcgcggctcgggatgacgatggtgacggcgctccgacggtcggcgggcgaagggagcggcggacggggtcggcggcaacacggcgaacggatggaggggtcgccgagtcgggaggaagtccggagcggcggcggcggcggaacggagctcggcggcgacggcggagagagaggagcacggcgcgacacgattccgacggcgagagcgagcggcgagcagcggaaacggaagagcggagtcgggagcgagcaattatatagcaccgagagggggagaacgcggccggagaggaaggaaacgggcgcggggatctcggccgccattgattgcgccggcgacgaatgcgggcacgattcgaacgaatccgagggagagagagaggggaaaacgagggaaacgggagagggaatcacggggagtgattcccctctctttaatgcgcgcggggacggcgggagcggcgggattcgcggcggcggcggcgctagggcacgggcgcggcggcgggcgcggcgggaggagggcgatgacaggtgggccccacctgtcagcgagagtggcgggcgggcccgcctgtcagcggcgcgcgcgcgcgcggggagccgatgggccgcgggagaggagagagagagggagggagaagtgggccgagccggcccaagaggaaaggggggggaaaaaagaacttcttttagggttttctttttataaaacctttt

SEQ ID NO: 99063 - DNA, 210 bp, Oryza sativa
  Clone ID: PAT_MRT4530_96910C.1
atgcgcgccgttggcgccttgcttgctgctgcatcttgcctgccggccccgcgcgcgcccacctgccccaccacctgctgcatgctgcgtctaccgcgcgccacggtgacgcaccggcttgcgcaacaacgctcctcgcgatgcgtacgcacaagtgatgtggctgccgcgtgcaggtgcagtcggcagtcgcatcgatcagttgcttaa

SEQ ID NO: 99064 - DNA, 3483 bp, Oryza sativa
  Clone ID: PAT_MRT4530_96911C.1
atggccgcactgctcgagtgcttcttgctcgccgtcgccgtcgtcctcgtcgctcatgcggcggcgccggcgccggcggcgtcgtctcggctgcctctgcctcctcctcctgctgctgctgctggtgatgtctccggctccgactccgaccgccgcgcgctcatggcgttcaagaagctcgtgagcggcgacccgtcgcaagccctggagtcatggggcgacggatcgacaccactgtgccggtggcacggcgtgtcgtgcggcgtcgcggcggggcgccgccgcggccgcgtcgtggcgctggacctcgccggggccggcatcgccggcgaggtgagcccggcgctcggcaacctcacccacctgaggcggctccacctcccggagaaccgcctccacggcgcgctgccgtggcagctcggccgcctcggcgagctccggcatctcaacctcagccacaactccatcgccggccgcatcccgccgccgctgatctccggctgccggcgcctcaagaacgtcctcctccacggcaacaggctgcacggcgagctccccggcgagctcctctcctcgctgcgccgcctcgaggtactcgatcttggcaagaacacactgacaggaagcatccctcccgacattggcaaccttgtaagtctcaaacagctcgtcctagaattcaacaacctgacaggacagatcccatcacagataggcaaacttggcaacctcaccatgctaagcctcagctcaaatcagctgtcaggctccatccctgaatcgatcggaaacctctcggcattgaccgccattgccgccttttcgaacaacttgacagggagaattccgccattggagaggttgtcatctcttagttaccttggtttggcaagcaacaaccttggaggcaccattccttcttggttagggaacctctcgtcactgacagctctggatcttcagagcaatggctttgttggatgcatccctgaatctttaggtgaccttcagtttcttgaggcaatttcactggcagataataagcttcggtgtcggattcctgattcctttggaaacctccatgaactcgttgaactctatcttgataataatgagttggaaggatctttgccaatttccttgtttaatctctcctcccttgagatgctaaacatacaggataacaacctcactggtgtttttccacctgacatgggttacaagcttccaaacctgcagcaatttcttgtatctagaaaccaattccatggtctaatccctccatcattgtgcaatctctctatgatacaggtgattcagacagtagataacttcttgtcgggaacgattccgcaatgcttgggaagaaaccagaacatgctgtcagtagtgaacttcgatggaaatcagcttgaagcaaccaatgatgctgattggggcttcatgactagtctaaccaattgcagcaatatgatactgatagatgttagtatcaacaaactccaaggtgtgctaccaaaagcaattggtaatatgtcaacacaattggagtatttcggcataacaaacaacaatataacaggaacaatacctgaatcaatagggaacctcgtcaacttggatgaacttgacatggaaaacaatcttctcatggggagccttcccgcatctctcggcaatctcaagaagttgaatagattgtctttgtcaaataacaatttttcaggatccatcccagtaactcttggcaatcttacaaaacttacaatccttttgcttagtaccaatgcactgagtggagctataccttctactctcagcaattgtcctttagaaatggtggacctttcttacaacaacctttccggcccgataccgaaggaactttttcttatctccacaatatcaagtttcctgtatcttgcgcacaataaattaactgggaatttgccttcagaagtgggaaatctcaagaatcttgatgaactcgacctctctgataatacgatttcaggaaagatccctaccaccattggagaatgccagagcttacagtatctcaatttatctaggaacttcatcgaggacacaattcctccgtcactggaacaattaagggggctcctagtacttgatctttctcaaaataatttgtctggaacaatccctagattcctaggtagcatgacaggtctttctactctgaatctttcaagcaatgatttcgaaggtgaagttccaaaatatggaatatttcttaatgcaactgcaacctctgtcatgggaaacaatgacttgtgtggtggggcgcctcaactgaagttgccaaaatgctcaaatcaaactaaacatgggctgtcttcaaagatcatcataattatcattgcaggaagcacaattttgtttctcattctattcacatgctttgcgctacgtctaaggactaagcttagaagagcaaacccaaagataccgctctccgataagcaacatatgagagtttcttatgctcagttgtccaaagcaacaaatagttttgcatctgagaacctcattggagtgggcagctttggtgcagtgtaccaaggaagaattgggatctctgaccaacaattggtggttgcagtgaaggtgctcaacttgcaacaagctggtgcgtatcgaagttttgatgcagaatgtgaggctttgagatgtattcgccatcggaatcttgtaaagattcttacagtttgctcaggtattgatttccaaggtagtgacttcaaggcgcttgtatttgagttcctgccaaatggaaatttagaccagtggctacacaagcatcttgaggaagaaggtgaacctaaggtgctaaatctcgttgaaagactccaaattgcgatagatgtggcttctgcacttgaatacttacatcagcacaagccatgtccaattgttcactgtgatctgaagccaagcaatattcttcttgacaatgacatggttgctcatgttggtgattttgggcttgcaaggttccttcatcaagaacacagcaatagttcagataaatcaactggttggaatgcaataagaggaacaattggctatgttgccccagagtatggattgggcaatgaagtctcaatccatggagacgtctacagctatggcatacttttgctggagatgttcactggaaaaaggccaacaaacagtgaattcggcgatgttcttactcttcatgagtatgtagaaacagcgctgccagaccaaacaactagtgtcattgaccaaagcctactagatgcgacatggaatagcgaaggaacagctcaaaagtaccacgacatcgaagagataagaactgagtgcattgtttcaattctgaaggtcggaatattgtgctcaaaagagataccaactgatcggatgcaaattggggatgcattgagagagttgcaggcaattagagataggtttgatacacatcagctatag

SEQ ID NO: 99065 - DNA, 313 bp, Oryza sativa
  unsure (1)..(313): unsure at all n locations
  Clone ID: PAT_MRT4530_96912C.1
attcgacccgcgcagagnccccaaccccacatcgccgcgcgcccccgatggcgtcctcctcgtcggcggcggcgctctggacggcggcgccccacncccacggcagctgcatcaggatccacgccatcttccaccagcgtcaccagcggagggggaggaggccggtcgtcgtcgcctcgtcggtgaggncgctgcaggncgcgagcctggnggtggccacggcgccggtggccgtggcgtcgaggaggacgnnggcggaggaggccgtctacgaggtcgtgctgcgganacggcgttggtggaggaggccacc

SEQ ID NO: 99066 - DNA, 184 bp, Oryza sativa
  Clone ID: PAT_MRT4530_96913C.1
ggggaaaaaatgcaaaggggttggggggggaatccatccccattaatttttccaatgtggcaaggggggaattaattaaaaaggggggttttagggggcgttacagggacaggaaaggggtaggaggggtgggtaggtaggggtaactaaaggaccggcggaaaagggtgcgcaccctggggtc

SEQ ID NO: 99067 - DNA, 396 bp, Oryza sativa
  Clone ID: PAT_MRT4530_96914C.1
atggccactcctctcaaccttctcattgctctcctcttcatcgtcgtctccgttcaagggacaaatggggccgatcgctgcgccgcgtcgagcagcatcgatgtgcagaccatcaacaccggcgaggccgcggccggcggcggcgacacggtgttcgaggtgcaggtgaagaacctgtgcggctgcagcgtcagggacgtccggctcgacggcggcggcttcgcgacgacggtggaggtcgacccggccgtgttccgcgccgccgacgacggcggcgactactacctggtgaacggcggcgggccgatcgccagcatggccaccgtcagcttccgctacacctgggaccacttcttccagatcactccccggagcatggaggaagatcagtgctag

SEQ ID NO: 99068 - DNA, 664 bp, Oryza sativa
  Clone ID: PAT_MRT4530_96915C.1
ggttgcttgggcattgcgtttgcatgcggaggctgtcatgctccaggggcacaaccccgtcctgtcacaatgatcattagcatgtcacataattttgcatatactataatactccatttcatacctccatccatcgatcgcatgcaacgcaacgcaaaagctggctatctcttctctctctctctagatcgtctaaagcttacttgtgcatcatgcctccctgccaaagaatgtttctctctctctacactaatcttagagagagagagagagagagatagagagaaagagaatgagagagatgaatgtgtgtatgggcctgtgcgtgcagctgcgattctctcacttttgcataaggctgaccgacctagtttgcaaatgcatgcattccctgggcctgcatctgcatatcctttctagtttttacactgtccagccatcgcacgcgcctgcttgctttcttccctgctttctttgaccattttttacgtaacatatgcattgcatattttgcggttatctcagggatcttcctgctaacttcacaaggtcggttaattagatgatctggattcgaaacctcaccccttctaattatttgatattaggtcatttctaatattcgtgtctttttgcattgcttatcgtagcgcatcacattttt

SEQ ID NO: 99069 - DNA, 1473 bp, Oryza sativa
  Clone ID: PAT_MRT4530_96916C.1
ccggccgggccttttccccttctcccctccttcctcactaaggttcccttgcttcagcagaacccctgctgggcaccctcctttttcaaaacatcctttgctctccagccacttcatcttgatgttcttaatctccaatagtcttgccctgtgcgaattttttctttgagaaccaaagtttcctggggaaattctgttgaatttttcctttgagaaccaaggcttcttggggagactctgccaaaatttttatcaactagcaagttgaaaatacatcattgtacatatattttgtctgcacatttatatacagtagcaaaacctgtttgtagaggaaattattatagtgtttctggctggttgatccatgatagattaaacaagggaaggttgtgacttggtagatgtcaccaatcctctccgaggtcatcctctccggatttatgatcagctcgacgctccggcgaggctctcatcttgtcctctctttctccgtcgtcttcctttactggttctatgtcttctcagtaacatcctagctactgttctcttttatttgatccatccaataccagagaatagaccaccatattctacataatacttctcattggaaattatagcttatagacaaaactgagggtgacaatactgtaaggtattttcctaactgtagcaccaaggagggtactcaggacttttattaggatgaccctgtcaggtgggaccctgtcaagcgggataacctctggctcaagccatgggacccggagctcagggtcagagggtgatatccagctgcaggtccaaatggacctgaagcggaaaagaaggaaggaatcaaaccgagagtcggcaaagaggtctaggttacggaaacaacagcacctcgatgaccttacctcacaggtgaaccagttgaagatggagaaccagcagctcaccacaacattgaacatggtcacccaaagctgtgccttcgcagagtctcagaactcagtgctgcgcactcagatgatggagctggatagcaggctatcagcgctccgtgagataatcttctacatgaacaatggaaaccaatcaccttctaatcctacaatagcagcgactacatacccatccaccactacaatgactgcagcaactactggccattacgattattatgatgttttcactgcaaatgcatggggctcagggatgcaaatgatgcagcagcccatagatcagtttctgtaccagtgctagctagcttctagccaggaagtcgatagagatagtggaccaaattaagaaacagggcattgagatattgggcgtggtgaatgttgtagctaggtccatattaattatattgtgtcaccagtggttgtttatcttttgctttgatttgtgatcggttgtgggggcaggaaaaaaatggtgttgtacctttctgctgttggtggtaagaggccaaatggctattgg

SEQ ID NO: 99070 - DNA, 344 bp, Oryza sativa
  Clone ID: PAT_MRT4530_96917C.1
gggcccggaaaaaaccctgggaccccccttgggggacccccctaaaccctgggaaacacattggggtttaattttgggaaaaaaaaaaaagggtaaaccccttttaacaaattgggcctaaacaaaggggaaaagggcccaagggggcggcaaagcccccaaaaagggaaacaagttgggttttcggggcttggcgaaggaaccaaaaccgggggggccaccccccccgggaaaaaaccatggatttgggattggcaaaagttcacccctccccggggggttttttcctttggagaaaaaaaaaaaaggggggcccccttttttggagaaaccaacccggggcc

SEQ ID NO: 99071 - DNA, 724 bp, Oryza sativa
  Clone ID: PAT_MRT4530_96918C.1
gaagtacccaagccacccccaattctcctcctcgtcgtcgtcctcctccgcctcctcaccacgcgcgacgcccgccgccaaccagttttggtcgcaggtggctgaggaagcagtcttcgggtggcctttgcgtggtttgcttcatcaatctctccatcctaaggataggcaacagagtgctttgctaattgctatggaccggcaagtcaggggtgaccatgaagggatcaacgttgttgggtttgaagtgccaacatcaccagattcaagctacaacaaccctgttcctggaaatgaagatgaagctcgagagcccccattggttcctcctcatctgcagcatacattattgagcttcccaccaagccaagatgattcaagcagccttcctccacctcaaaacgtggtactcaaccacctctacatagagaaagagaactctagatccgtcgtcgccctggggattacccatcggttcagggcaaagtttgtgactgttgtgctgtacaagcccgtacaaaggcggtagggtgaaacattttgtgtacctgcattcctgcttcctttcctcgtgcagggactacccacccacgaggttgaactgccaaacaaatagaaacctccctgttgtagtctgaggaaacagaggaacattctagctgcccatgattttcaaatgatttcaacccttgtacttaattggctgttggttgcggttgaaaaa

SEQ ID NO: 99072 - DNA, 1705 bp, Oryza sativa
  Clone ID: PAT_MRT4530_96919C.1
atggcggcggcggatgggctcctcccgggcctcaagttcgatcccagcgaccacgacctcgtcggaaggtacctgctccggcgcctccagggccagcccctcccgctcgacggcgtcatcctcgaggcggatcccctgagcgcgccgccgtggaagcttctcgcggatcacggccgcggcgacgaggccttcttcttcgcggaggcgcatgccaagaatgggaaggggaagcggcagaagcgcaccgttgagggcggcggattctggcaggggcagcccacgtgcgtcgacggcgagaggctttgcgtccccgacgacggcgtcggcagcggcggcggcggcggcggcttgcagatcgcgtggcgcaagtacgtgctcagcttcttcgcgaacggagagaggggcaagttcgggatgggtgatgcacgagtacccggtgacggcgccggatggcctcgcctcgtcccaattgcggctgtatcgcgtccgattcagcggctacggcaagaagcgcaagagggagccccaatgtccgggagcccacggcgacgacgacggcgagctacaatgcgcgccgcccccgcgccccatggcggagacggctctgctcgaggagcgtgggccactgccccatcccgttcttggccctgcatcggtggtggatcagtgcaccgatcagggctcatccggcgtgatcgacgattcttcgctggtgtttcgtgatcttcccgacctgattgacctgccagttgcggaggaagcagatgccagccatggtgcagagactgctctgctcaacgagcacctgccgctgccgccgccacagttgttcgttccccctactgcagtgccgctggacctcgccgatgactctaatggcgccgatcagaactcctatggcatgatgggcgacgatcagctgctgcttcctgaccttcccgggacaatcaatgacgacatgccagacctgttcgtctcccaagcagaggaagccagtgcagtgcccgcgatcagctaccactcgtcgggcttcatgggcaacgaggttgcggcattgtctgattttgagttgccggagagctattcctcatctgatgccatggacggcgaggcgctggcattgtcgaattacgagtttccagagagcttcgaggaggatctgagctgcatcgacttcgccactgccaacgcgagcagcctcggcttcccaatggacggataccccatggacgagctgttcgatgatatgcctgaccagggctcttccggcgcgatggacgattcatcggtggtgttccgtgatcttcccggcctgatcaacctgccagccgcagaggaagcagatgccatcggcgatgcagagactgctctgctcagggatctcgccgatgactctaatggcaccgatcgaaactcctatggcgtgatgggcgacgatcaggatcggctgctgcttcctgaaattcctcggagaatcgacatgcccgacttgttcgtctctcaagcagaggaagccggtctcggtggcggtgcagcgctggactcctcatcgggcgccatggacggcgaggcgctggcattgtccgactttgagtttcccgagagcgtcgaggaggtgctgagctgcatggacttcagcacggtcgacatgagcttcttggacgtccccattgacgagctgctagatgatctgcccgcagactga

SEQ ID NO: 99073 - DNA, 355 bp, Oryza sativa
  Clone ID: PAT_MRT4530_9691C.1
tttttgtttttttttttttttgggttttttttttttttttttttttttttttttttttttttttggaaaacatccacattttaccccctgggtcaaatttgggggtcccttctgtagttaatcccattgatggtcaaaaaaggcatccggaacccccatggcctaaaacagtttacactaaaaatgcttggttggggttcgggggtaataattaccaaattcaacttccaaatcaaaacagttgtttccattggggacagcaacctttttaaaagaattgggggccatcctaaatgggcccttaagaaggccaacatactaaagtgctttagggccccttttttgttctttgaaa

SEQ ID NO: 99074 - DNA, 2985 bp, Oryza sativa
  Clone ID: PAT_MRT4530_96920C.1
atggccgccgccggactccgccgcttcggtagtggtcgtcttctcatctgccgcccccccgaaccgaaccctagctctccgccgccctaccctaggtctccgcagcagcagctgctgctcctcctctaccagaaatccccgctatcggccgcccccatgccgcgcctccttccccctttgcctcgctcgccctgtgatttcgcctttcgaaatggagcctctgtggctgaggaagcagtcttcgggtggcctttgcgtggtttgcttcatcaatctctccatcctaaggataggcaacagagtgctttgctaattgctatggaccggcaagtcaggggtgaccatgaagggatcaacgttgttgggtttgaagtgccaacatcaccagattcaagctacaacaaccctgttcctggaaatgaagatgaagctcgagagcccccattggttcctcctcatctgcagcatacattattgagcttcccaccaagccaagatgattcaagcagccttcctccacctcaaaacgtggtactcaaccacctctacatagagaaagagaactctagatccgtcgtcgccctggggattacccatcggttcagggcaaagtttgtgactgttgtgctgtacaagcccgtacaaaggcggcagcagcagatgacagttcagttagcctctctgaaacggctgctccagctctctcagctttgggcaatgcctgatatcaacactctccaccctagcaatggattcttctcctccgatggagctcagctcctggcagcagaagatcttcagcctctggagagacggcatttcgctccatatctcaccgccgatgcactccaccccggagcaaaactgcaactccaagctcacgagcacagggagttcacgcaggccgcatcggagaactgaatccgtgagctctccgcaagcttccagcttgagcgatttcagggatctgggcagggtcaggccttgctcccagctcaggctccagcagtgggacacctccagatcctccaggtgagtgaatttgatgagctgattcgtcggcaatgatgctaactcctcgcagttggagatccgtatcaccttgatttcaggtagaagctctggctgcaggagattgtcgaggctcattagctttctgcaccaggtgacgctcagcttggtgagtgatctgaacactacaggtgagctgcctctgctgctgctccccgtcacggtgatgaacaggctcgctatgttagggcaggagctgatcgagagcgattccaacctgctactgattggctcatcgtcgaggagccaacttggatgaaatccggagcccatgtagaacctcacttccagattcttgatgctggggctagggcgtaggctttcgagcacctccatctcctgttcgccgttgtgtttgtcaggcctgatcgagtcatgccatgaaagagtcaatgtgttgagatgggttttcttgtctagatcagcctcaactgcttgctccttgcttgtgacattgtgaaggccactgatctctagtgcacctcggagattgttcaggttcttcagctcttgaattccccttcctggtgtatcatcaacagcatagtaaggcatatcttgaagatagataagattgcctactccaggcacatgtccgagctggttgttaagatcactcctcagtctagccttcctcaatttcacgagcttgacaatgtccttgggaacactatcaaatctgcagttttgagcatccaggatttccagattacgaagacgccaaaaagaatcaggaagtgcctcgaagtcacaggaggaaatgtcgagatagcgaagaagtatcaggttaccaacattccccagtagctccttcagccggcatgatatgaacctcagcatccggatgttagtgagatgacagaaccatgtttcaagtacagaagtagtaatgacatcagagtcaatgctaatgcaaacaactgaccgcaatgtcttgtacttgtgcaggctttctaaatcgctcttaatcagcttcttgtcatcaaagccatctgagacacatatccaaacaagaagatcaaaatgatcctgaactttctgatcattgaaagaacaatgagccagggcagtcttcccgataccaccatctcctactattgtcaaaacggacagattcttctgtccagctcgaccactgctgggcacctcagagacttgctcgctggtcagactgttcttgtccaaaataaatgaatcaatcaacacctgcaactcttcctgatagccaaagtttgttctgtcgtacatgagattgccgtatttctggctgaccgattcaaaaataaaatgctgtggttgcatgtcatgcaagcccaaatgccccatttgttctttgagagaattgagctttccatggatttccgtcatcttgatgtcagaaaactctgggcatgaagatctattcgcactgaacccaactccgtcctggagctcatagtaattgagctcgtccaagagatcttcagcacagtacactgtatccttggcttcttggaggagattagcaatggaataatccttgcgaacccaacactccgcgagcttaataagttcgtacataccacggagagtgttctcgagcacaaaccgttcatcctgtttcgatgagttgaaaccgggtgaatgaaattcgtccggcgtccatgtgacgaagctggatgaatgcggaagtgcgctgggatcacgagtctgctgcatggtgctgttctgcgccgaagccgtggggagcttctgcgcgatggggcggaggaggtacggcggcagcgaggatgccggatcgccggcggcggcggagcggagggcggacgccggcgaggggaagaggtggtcgaagcgcgtgcggagcgaggcggcgggtgccccgacgcccgcgacgaacggcggcgaggggatcccggtgaactcctgcaccat

SEQ ID NO: 99075 - DNA, 429 bp, Oryza sativa
  Clone ID: PAT_MRT4530_96921C.1
atggacgcggaggatatcgtggactgtctcatgtggggcatcatctttttcttcctcctcgcctgcatcggcgtggccctctgcttcctcgccctcaccatcgccacggtggtcggactcatccgccgccgcaacgacgacgccaataacaagtacgacatgctgatcgagaggctgctgctgctacgacctaaagacgaccaagacaacgagcagtgcgtcatctgtctgtcggagaacgaggacgatgtcgacggcggcggcggcgagcgggggagagggaggatgctgccggggtgcgcgcacgcgtttcacaaggattgcgtcgtcaagtggctgcgcaaccgcacaacatgcccgctctgccgttctgacgtcgccgtcgccgccgcagatgacattattagcaccgcagataacatggtctga

SEQ ID NO: 99076 - DNA, 470 bp, Oryza sativa
  Clone ID: PAT_MRT4530_96922C.1
cttcgtgttgacctttttgggggggggactgaagaggagaaaaagggagcttaagagcgtggcggttgtggcaagggttttggccaaaagaagggatttgggaaggccttaatggtggttggtggcaaaccctgggaccattaaacttgccttgcccaattggaaaaagccggggaggatggttaaattggagggcctctttgggggcccttccaacctggcccgggtggtttccggtttcagaaattggcaattcttgtggaccttggccaatattcttgtttcggtggttagcctgttggaggactacttttacaccgacccagcgattgagtccttccagagctgcaactttgttgcttccaccagaatctaaatcttccttgagtcaggtgatggcgatcggggcacaaagataaaaaaaaaattccggaggttggatttaccgttgatactccattctaaaagtt

SEQ ID NO: 99077 - DNA, 399 bp, Oryza sativa
  Clone ID: PAT_MRT4530_96923C.1
attataaaatgtttaaatgacggggccgaaacttcaaaacgaacacaaaaaccgggatttgggcccgacagaacggggcctccttgtcccttgggcatcaaacaaactttctagaccaacaagagctaaaaaaaagagcctggggggggacaaaagcagactaggttaaccaacaaaccctagcaattaagcccaaaagaagcaaaaatacccaagaacctgggatgtaactctaccagcccattgggactccaaaggggggccgcttgaggctgcccccaaaacaatgaaacagggaagggacaaggccaccaaacaggattgggagcaggacattttccttccccggaacaaggacatgatagaggatccgtggcgggaatactttttctttttttc

SEQ ID NO: 99078 - DNA, 315 bp, Oryza sativa
  Clone ID: PAT_MRT4530_96924C.1
atggtgatctactccaccacaattgagtacaccgtatgcacaaacaacacggcatgctcggtgatggcactggtgtgggtgtactgctacctgaaccgacgagcaaagccaacaatgatgcagccgtacatgaacgccgggatgatgagaagcaccaccgacgacagcaccattagcatgagctgccacgtcaacctgaacatgggcgaaggccgacatgattggcaaagtctaaaatgttcggcgaagcacggcaagttctgcaaagaccaaacattggtgaaggccgagatgttcggcgaagagcgaacatga

SEQ ID NO: 99079 - DNA, 3456 bp, Oryza sativa
  Clone ID: PAT_MRT4530_96925C.1
atggaggctgcccgggtcggggcgcagagccgccacctgtacggcggagggctaggcgagcctgacatggacaggcgcgacaagaggctgttcggctgggacctcaacgactggcggtgggacagtgaccgcttcgtcgctacgccggtgcccgccgcggaggcgagcggcttggcgctgaacagctcgccgtcttcctccgaggaagccggggccgcgtcggtgagaaatgttaatgctagaggtgactccgataagaggaagcgggtggtggtcattgatgatgatgatgtggaggatgacgagctggtggagaacggcggcgggtcactgagcttgagaattgggggtgatgctgttgcccatggagcaggggtgggtggtggtgctgatgaggaagacaggaatggcaaaaagatcagggtgcagggaggcagtcctagtggccccgcgtgccaggtggagggctgcactgcggaccttactggtgtgagggattaccatcgacgacacaaggtctgcgagatgcatgccaaggctaccactgctgtggttgggaacactgtccagcggttctgccaacaatgtagtagaaagtcttacattgtgaaacggagggactattatggaagtaatgattttggatcgtaccttttgattttgaagaataattttagattccaccctcttcaagaatttgatgaagggaagcgaagttgccgccgacgtttagcaggccacaacagacgaaggaggaagacccgccctgaagttgctgttggtggttctgcatttactgaggacaaaattagcagttatttattgttgggtctccttggagtatgcgccaatttgaatgctgacaatgctgagcatttaagaggtcaggagttgatatctggtcttttgagaaacctgggggcagttgccaaatcattggatccaaaagaactctgtaaactcttggaggcatgccaaagcatgcaagatggatcaaatgctgggacctctgaaacagctaatgctttggtaaatactgctgtagcagaggctgcagggccatctaactctaagatgccttttgtgaacggtgatcaatgtggcctggcatcatcatctgttgtaccagtacaatcaaagtctcccactgttgcaactcctgaccctccagcatgcaaatttaaagattttgatttgaatgacacttatggtggcatggaaggtttcgaggatgggtatgaaggttcacctacaccagctttcaagacaactgattctcccaattgtccatcatggatgcaccaagattctactcaaagcccaccacagactagtggcaattcagattcaacatcagctcagtcactgtcaagctcaaatggagatgctcagtgtcggactgataaaattgtcttcaagcttttcgagaaagttcctagtgatttacctccagttttgcgatcacagattcttggttggttgtccagtagccctactgatatagagagctatattagacctggttgtattattttaacagtatatcttcgcttagttgagtctgcatggaaagagctctctgataatatgagctcatacctggataagcttctgaatagttccaccggcaacttttgggcatctggtttggtatttgtaatggtacggcatcagatagctttcatgcataatggtcaacttatgttggacagaccacttgcaaacagtgctcatcattactgcaagattttatgtgtgagaccaattgctgctcctttttcaacaaaagtgaatttcagggtagaaggcttgaacctagtcagtgattcctcaaggctaatttgctcatttgaagggagttgtatattccaggaagacaccgataatatagttgatgacgttgagcatgatgatattgaatatctgaacttctgttgtcctctccctagttcaagagggagaggatttgtggaggttgaagatggtggatttagcaacggcttcttccctttcataattgctgagcaggacatatgctctgaggtctgtgagctggagagcatatttgagtcctccagtcatgaacaggcagatgatgacaatgccaggaaccaagctttagagtttctaaatgagctgggctggcttcttcatagagcaaacataatatctaaacaggataaggttcctctagcatcctttaacatatggagattcagaaatcttggtatatttgccatggagcgggaatggtgtgctgtgaccaaactgctgttagatttcttatttactggactcgttgatatcgggtcccagtctccagaagaggtggtgttgtcagaaaatctgctacatgctgccgtgcggatgaaatctgcccaaatggttaggtttctgctgggatacaagccaaatgaaagcctgaagagaactgcagagacattcctattcagacctgatgctcaaggcccttccaaatttacccccctccatatagcagctgccacagatgatgcagaggatgtattggatgcacttactaatgatcctggactggttgggatcaacacgtggagaaacgcgcgagacggcgcaggcttcaccccagaagactacgctcgccagaggggcaacgatgcttacctgaatatggtcgagaagaagatcaataagcatcttggcaaaggccatgttgtcctcggcgtccctagcagcatacaccctgtaataaccgatggtgtgaagcctggtgaagtcagcctggagatcggcatgaccgtgccgccgccagcaccgagctgcaacgcctgcagccgtcaggccctgatgtaccccaactcgacggcgaggaccttcctgtacaggccagcgatgctgaccgtgatgggcatcgccgtcatctgcgtctgcgtcggcctgctactccacacctgtccaaaggtttatgcagctcctacattcagatgggagctgttagaacgtggaccaatgtgaggaggagcttagaatggaataagtgtagttgtgttttacgtaagtcgagagcttagtgtgctggctaagatcaaaataacagtactatgtgaggaggatgatcctttgtatttaaagcaggatcgtttcgtttatataaaagcttacataccgtcattattaattattattgattagttattattatttatattatatttaccgcctaacatgtaaacagaacatatgttccataaaattcatggtgtggttgtagaaaaaaaaaaaaaaagagcttcttaatggaggcatgcttctggctgctttcggttcactctagacatctagttttgtggctacaagattttgtcggtgttgtattgttgtaaactcggaataaaacttttttttttcgtcagcgttgtattgttgtaaactccgccataaaacatttttttcatgcgctttaaaaaaaaaaaaaaa

SEQ ID NO: 99080 - DNA, 441 bp, Oryza sativa
  Clone ID: PAT_MRT4530_96926C.1
ccaaaaggaattgaaatgccttcccaccccaaatgggggtctggaagctaaataaaaataccattttgtttttttttaccaagcatggggtaaaaagtacatgcaattgctaaaaattaaaactacacagtagttctgacacagggggaaactcaaaaaacggggtgaaacagaggcaaaagcctcagttttaaaatttgcaagttctgggtttgtttctccagccccaaaaataaccttgacaaccattcatggttttttgattgcacacataacaaatggttttagtttgcagggcaaaataaaaccctgacgggaaaaaaccgatttttttgttgtttttgcaccatgggggaaaactcccggcttggtaaaaaatcgaatccgggatcaaatttttgcaccttattttttgccaaattttgcactgtagggggccct

SEQ ID NO: 99081 - DNA, 577 bp, Oryza sativa
  unsure (1)..(577): unsure at all n locations
  Clone ID: PAT_MRT4530_96927C.1
cagcgatggccgtntgtgtgccaggaatgtgcaaattgtaatggcaaggctgggcancggacaggtttgcccggactgggaaagcgggncaantggagcggcaaacgcaaatgtgaatggtggagttgagctgcaactgcaattgagggcaaccaaggctgttgacaactgtgtgatggcttgccgggctcgtgatgnttntggtgggatatgtgtggacgcggatgaacaaatttgcacacagggaaacnagctgatggaccaatggatgtgacagccaagctgctgaatgacggacttgcaactgatgaggggaaagctggntaacagccctgcaggtaccggtccggaattgccccggttccgacccacacgccgtgcccgcgaacgcgtggggcgaacgcgtgggggaaccgtggtgtgtgccctgggacctgcgtgctgtccatcttggtggttgtggtaaatgtcagtgctaaacctactctaaaacccccaaatccggcaggtaatcttcaagcacggaactattctcggctttaattaatgactatcttatgttaaaaaaaaaaaaaaa

SEQ ID NO: 99082 - DNA, 804 bp, Oryza sativa
  Clone ID: PAT_MRT4530_96928C.1
atggcgtccctcctctccctcccgcgtctcactctcaccccgaccccacgcgcgaaccccggccgccgcagcgcccgccccacgccggcgagcatcacctgcggcccgcgcgacaaccgcggcccgctccagcgcggccgctccctctccacggaggccatcctcgccgtgcaatccctcaagcgcctcacctcctccgaccgctccccggccgccgccgccgccgcggcctcgacctccctcggccgcctcctcaagggcgacctcctcgccgccatggccgagctccagcgccagggccactggtccctcgccctcgccgcgctccacgtcgcccgcgccgagccctggtaccgccccgacccggccctctacgccacgttcgtctcctcctcgccggccaccgaggacggcgccgccgccgtggacgcgctcgtggaggcgttcctggaggagaaggagcggggcggcgggttcgtggatggggaggaggacgtgtacaagctgacgcggctggtgcgcgcgctggtggcgaaggggagggcgcgcgcggcgtggagggtgtacgaggcggcggtgaggatgggaggctgcgaggtggacgagtacatgtacagggtgatggcgagggggatgaagcggctgggcttcgaggcggaggcggcggaggtggaggcggacctccgggagtgggaggccaggatctcgccgccggccagagacgtgctcgacgaaatgcgcgcgcgagaggagcagcacaactgcggcttaactgtaaatctgattatcgttttagaaacctga

SEQ ID NO: 99083 - DNA, 616 bp, Oryza sativa
  Clone ID: PAT_MRT4530_96929C.1
ttttttttttttttttttttgggtagaaatcctccacatatttgtccctcgggaatcagatgtgtcttacaaatttgatggcaactggaaaggaggaatctcctcttctttttttactgtacatagttcttttatgtactctttcaactcttgaaatcaaatggacagtgctcagatgatttccatcttataggtttttacagacggccgatatcaaaacatccacacaagggtctttcttgaactattgtatacaaatatatgtggtgcccatcctatacagtagaattctatgcacatttcagcatttggtcctacctcagtcagacccgccgcagcacagagagcagcactcgaagcatgcgaggcacgagagcgcgccgcacagctgcaccatgacgatggcgcaccggtcgttcatcttgctgcaggtgttgatgaagcacatgcagcagcagcagtccgtgaggcggctgcagcagccgacggccttgtcgaacatctcgaacctctctggtggtttcgtgtccccgaacccagcggaaaggttctccctcgttgcagctgtgtcaccgaacccgagcgtcagtccgttgagcgacgtcgctgattgctc

SEQ ID NO: 99084 - DNA, 464 bp, Oryza sativa
  Clone ID: PAT_MRT4530_9692C.1
gagatcgctaggagcttgtgcttttttcggtagcactgagcgtgtgtgagcagaactcttcatacatgaatcagagcaccgaacggcggtcgcagcaggtgtcctaatatgccgaggtcactcgcccgcttatagcaaaagggtattctaccttatagccatgaatctcatcaacgtggagaacgcgttcgcccagaagcactactgcgatctgtcctccaagcccttcttcagagggcttgtggagcacatcgttttcggccccggcggcgccatggactgggagggcaagcatggcgtttccaccgaccggaagctcgtgggtgccaccaaccacctcgccgttgagcgcggcaccatccgtggcgacttcggctgtctacattcgacaggatggcatccacggaagcgactctatcgagaacgccatgaaggagattgctctgtgtgttcctgagggcatc

SEQ ID NO: 99085 - DNA, 215 bp, Oryza sativa
  Clone ID: PAT_MRT4530_96930C.1
gaaacaggtggcagcctgacagctgaaagatccatctaatgaggacctgctgcattggtgcatgttgtcctgcatcaaaacggactcgcgttggttgctattctgaatcttattagggtgacatgtgtttgcgaactgcatacgatctataacacagtcctagtgagcgcatgacatacagtgacacaagacaaccgtttggtgcttcgaaaacg

SEQ ID NO: 99086 - DNA, 246 bp, Oryza sativa
  Clone ID: PAT_MRT4530_96931C.1
gggacaaaatcatttgatgaaaatgggaaaaatggaactgaaaaagtaagaagtattaaaaacaacaacattcagctatatctgaaaccccacatatggaaagaatctttaaaacttgaatgactttacttgtaactatacaagacacttgctgataattatacctggcaaaaatgtccttcaaaggaatcaacccaaacaggtgtttcaaatacaatgaaataatggtttaaaactacataaaat

SEQ ID NO: 99087 - DNA, 3399 bp, Oryza sativa
  Clone ID: PAT_MRT4530_96932C.1
atgaactttactagaaggtatgatgttgctcgtttacaagttttggtcctagatccatctttgatcccagatgtggttgatgtggttattggggaccacttgtacgagttatcttttatagtggagcctgacaatgggtctgacgagcctgtaccaatggatatggagaatctggatgatgggactttggagaaggaggaggggaatctgaaccaggatttggggaagggatctggaggtgatcctggtaacgattccttaataggttctggtggtcaggttagtgagaggggtggtccttctataccggctgctcatttgagtctgatacctgaatctgatggcttgactgtatctgatgaggaatttgatggcttagatgaggattctgtaatggttaagaaggcaaaaggtaactttcatgataatgtttcttttttacaatttacaaatgaacaaatttctgctgctcttgataatcttggtgtgatcactttgggtacgaattttatcttagatgatgttaaaaatgatttaaagagtatagaggaaaagaggttaagtaaatatgttagttcttctgttaatcagagactattaagaaagattttagtccggctgttcttaaaaatctatgtgctggcaaagaatttttgtggcattgcaaacctcctagagggagatttctacattaagtttcatttatgtaataaagttgataagtttaagtgggctttagttctggtgtatgggccagcacaaagtgaatttaaggatcaattccttgctgaattagttaatatgtgcagtcatgaaaccttaccaattcttattggcggtgattttaatattctacgtagctctgatgaaaagaataatgataattatgatgatatatggcccttcctttttaatgctattattgatgggttatgtctctgggagttacagatgtctggtaggaaatttacttgggcaaacaatttagtgaatccaacatatgagaaacttgatagggttttaatgtccacggagtgggaacataaatttcctttatcttctgtggtggctcttaatagagatatttctgatcatactcctttacttttaaatacaaacacttcttctttgagtaatgctcaacatagtttcaagtttgaacttggttggcttttacgtgatgactttgttgatatggtaaaggagatatggtctagtgttgatgaaggcaattctgccatggagcggtggcaggcgaaaattcgtcgtttaagacagcatcttaggggttggtctaaacatactagtggcttgtacaaaaaagaaaaaaaaaaggagattttagataagttggatttgctagataaaaaggcagaaactatgcttttgagtcaggaggaattggattttagatggttttgtagaaatagattatctacaattctgagagaagaggaagttaaatggtatcagagggcgaaatctaaggatattttagagggtgattctaacacaaaatattttcatttggttgcaaatggaaaacataggaagactagaatttttcaattacatgatggtgaccaattaataaatggtgatgcaaatttgaaatcgcatattaccacttattataaaggtttatttgggcctccttatgattctactcttcagtttgatgagaataaatttgctgacattcctcaagtttctcagttggagaatgaggctttaacgcaggtttttactgaaaaagagattaaggaggcgatcttccaaatggaacataataaagcaccgggtcctgatggatttcctgctgaattttatcaagttttctggaatgttataaaatgtgacttattagatctttttaaagaatttcataatggtactttgcctttatactctcttaattttggtacgatcattcttttacctaagtgtgttgaggctatgacaatccagcaatataggcctatttgcttacttaatgttagttttaagatctttaccaaagttgctacaaatagagtcatgactgttgcccaaaagatcgattttgagaaagcttatgataagggagtcataaacaaaaagagcaaactgatacttgttggagtttctgccttgtgttgggcactgtggctgagtaggaatgatagggtttttgataaatcacctactattacttatatgcaggtcattttcaaggcaacatattggcttcgtctatgggcacagttacaaaagtgtgatgaagatgcagatttcttaattgttgcatgtcaggattttgatgatgatggattgaatgatgatgatgacaatgccggtgacgatgactatacatcgcaccggatgctgatgagatcggcatgtcacagctgcccgatgcgcctcaggcgtcgtagcccactacatacaacttatgtcccactcagcaagggaaaaagagattgcttttatgttgttcttgcttgtttctgtgatttgtttgcaagaatagggttgatctgcaccggcaagatcaacaacccacgaagaggtgtatcgatcactaagccgtacgacaagtgtttgccaaggcatcgatacatccaacctccatttgggtgcttggttgagtcggtgtatgtcacctttccgcttgcattggaagtacataatcatgaaatggaggatagagacatgaaagagccaccagtcccattgttcacactcaaagtcaaggcacctccatcatatgaagagggcattaaaggtaaacttaatggtgctgaaattattcaagaagagttgtgtgataatgcttcacttatatcaatgccacaactagtgaatgaacatgctatttctaatgttgttttaaatcgaccacgcaatgagcaccatatggaaaaaccgagaacgatttttcatgaagaaggggaggatgatgtgaccttggctgctacggatacaaccattgctcacatcatagatgaacaagaagatataaagatcaagtcctccaagtgctgtaatccgattcggccaccagctacactgctgacttcaaacggccgccgaatttgcatacgacctccgttttcggcccatgagtacttgatggaaagctctcgaagccctctttccaacagatctagcctcattgccaaattccttgtcgtttggctgcaatcacataaacaaggtgctacatcacgtgtcttgggcctatgggcttgtaactttgtttgggaccccggccctagtgggcccatgtggggtgcgccccaaccaggtggagaacaacccttggcatcccttggtcgtcctcccacccctataaataggaatagggttgatctgcaccgacaagatcaacaacccacggagaggtgtatcgatcactaa

SEQ ID NO: 99088 - DNA, 2063 bp, Oryza sativa
  Clone ID: PAT_MRT4530_96933C.1
tttttttttttttttaaccaactttcgatgccatataaccaattctaccaactattaaaaatattactccagtctttacagttgtaatgggttctaatgtgagcaacaaactggtgtactcagtactcctatgacgacagtgaataataaaataatatcatttctctaatttatcggacatcaaggatgcccggaagtgacccgtgatcacttcacctaagaaagagcaattcaaattgctaacagtataaaaaaagaagatattcaatgcgctagcatagcgcatcagtctctagagacgatgcaaaggtaaagtgaaacaaaacagcaatctgatcctacaacaaaaatccttcagaaattttcccttcaactcggcacaagcgttaattaggtggcatgtcacgtttctcatcaatcttagggttctccctgcggcgcagttcaaagcgctccccatcagcagaaggatcaggctgtccatgagaatctgttgtttccatgctcggctcaggagatgtctctgtgttaaactcttcatcatcttccacatttttttctcccgaatcagcggtttcatcactgctactggtactgctgctgtatccttggttggacagcaggatatcaccttcactgactttagagtccacctcatcaatcgtcacttctttctgaggaagtctctgctggataggcaccgcgttgctgattggctggcctgttctctgttctctgtaaagagctaactgtctctggtaccttgccttgtcctctacacctttttcttgatatactgctttatcttcagggcctaaattgttccatcgttcaccaatcatcttgctgataagcctgtcttgtccaggatattctggcttgagcttcctgtgctgatcttggaagaagaaattgtagccgctcctgtttggtttaggatggttggggtctgttgtacttaacttcttcctacggcggcggcggcgaggacgtatgccctcagcgctgtcaattgcaacatgaggcaccgcagttggcactgcaggttcttcggtgcaattatagagtaccgctttcgttgattttgagcccatgataacggtaactatgtagccatgttcaaacttaccatcaattatcacttgtacatcattatccaaagaagcagctaggtctgacaaagtcaaaggaactaactcttggcgctgaccatataggaagcttaaaaggcttgtggggtacaataggtaacaagctgataagtggtctagtggtttgatggcctcatgatttcctcgacatcctgggttcgagtgttcaagctgtgagtttttcccttttatttctcttattttaatggtcagcttttggccaattagcgccaacaccttctgcgcggaccatgtggacttcatgccagcttggcctttctcagaaccgaagtgtatggttggcgccaagatgttgtacctcggcaccttcatcaatggtgttgaacaaagggtccactctaagttaattggagggtctgaagaacaagaattgcttcctcttttccttttccgggaagcttgaccttcagctttcatttctatacaggaaatgcttctggaatctgcagtttcttgataccagccttgtgcctcaaacaagtatagcctctcaaaatggtataatagtgacatgtagtatttcttatcaatgccacctcgtgaagtgacctccttaaacagctgatgaagatcaaggtcttttccaccaataattggcaccttgagctttgtccccatctgggcgtgcaacccctcgagcgccctcctgaagaccgccgcgtccgccaccacgtccttgtaccccgcaacccgcgccgggtacgccaccaacgtcctcctcccgcctccgcttcccccggagcccgccgccaccgcagaatcctcctccgccaccaccaccttctccttccccttccccttcgcatccgccacgcccttcttccccgcctccaccccctccacctcctccgccgccgccgccgcagccgcctcctccgccgccgcgctcat

SEQ ID NO: 99089 - DNA, 346 bp, Oryza sativa
  Clone ID: PAT_MRT4530_96934C.1
tggactcatgggcggacgcgtggttatttttatacaacgcatagtattagctgcaactagacgcaagcatgaagcgatggggatggtgatgaggagggagaggtatctggaggcggagcttaacctgcctcctgggttcaggctccaccccacggacgactagctggtggagcactatctgtgcaggatggctgcggtgcatcgcctgccgcagccgatcatgggctaggtggatctctactagttcgactcatggaatctgaccaatcgctctctgtacggccccagagagtggctcttcttcatctcgcgcgatcgcaagtatactactgggtaacgctccaac

SEQ ID NO: 99090 - DNA, 816 bp, Oryza sativa
  Clone ID: PAT_MRT4530_96935C.1
atgacggttgcccaaaaggcaattagtcctactcaaactgctttcattcctgggagaaatattatggaaggtgtggttattttgcatgaaactttgcatgagttacatcgtaaaaacaaaagtgctgtaatttttaagattgattttgagaaagcttatgataaggttaaatggtcatttgtacaacagactttgaggatgaaaggcttctctactaaatggtgtgagtggattgcctcttttattcaaggtggtcatgttggtattaaagttaatgatcaaactgatgataccatcatttttctggagtatgatttacaacaagcaaagaatttaaaattgattatgtctatctttgagaaattatctggcttgaaaattaattttcacaaaagagatgaccataagaaaaattatagacttactagatgggatattatttgccaacccaaagaacaggggagtttgggggttcataatttagatattcaaaatagatgtcttttgagtaaatggttgttcaagttaataaatgaaaatggtgtttggcaagacctattgaagagaaaatggaactatcatcagaatgaccaattctcagttagatcaatgtacttagctttaattaataatggttacattgacagaaataagttaatttggaaactcaagatgccgcttaagatcaagatctttatgtggtatttgcttaagggagttgtgttaaccaaggataatttagcaagacggaattggaatggtcattttcaaggcaacatattggcttcatctgttgtcacagttacaaaagtgtga

SEQ ID NO: 99091 - DNA, 2127 bp, Oryza sativa
  Clone ID: PAT_MRT4530_96936C.1
atgtggagactgaattatcgtagcgcagttgcagaccgatcagctgatttggcaacagtgatttctagagcacggaccattttatggatggaccgagtccctactaggatgggccctaaatatcccggggagtgccagtgtccagtgtccaatttccagcaagaagaatattgcgaacgatcgtctcaccgtgcaaccggcgaaagaacgatgatgccaaggatcgagttccgagacaaggcggcagcagcagcagctgggcagtttatcccagatgtggttgatgtggttattggggaccacttgtacgaattatcttttatagtggagcctgacaatgggtctgacgagcctgtaccaatggatatggagaatctggatgatgggactttggagaaggaggaggggaatctgaaccaggatttggggaaggaatctggaggtgatcctggtaacaattccttaataggttctggtggtcaggttagtgagaggggtggtccttctataccggctgctcatttgagtctgatacctgaatctgatggcttgaatgtatctgatgaggaatttgatggcttagatgaggattctgtaatggttaagaaggttaatacccagcaaagtctaggggaaaagctcgctgctattcctgaagcagtaatttctctctccaggaagagcaagagaagggcaagtgacagtgatcaacttgttctccaaagagctgagaaattgaaggctgataagaatttggacaacttgcaggcaaaagagactattaagaaagattttagtccggctattcttaaaaatctgtgtgctggcaaagaatttttgtggcattgcaagcctcctagaggtaggtccggtggtttgcttttgggcatcaatttaattaatgttgatattggtttgattgatgagggagatttctacattaagtttcatttatgtaataaagttgataagtttaagtgggctttagttctggtgtatgggccagctcaaagtgaatttaaggatcaattccttgctgaattagttaatatgtgcagtcatgaaaccttaccaattcttattggtggtgattttaatattctacgtagccctgatgaaaagaataatgataattatgatgatagatggcccttcctttttaatgctattattgatgggttatgtctccgggagttacagatgtctggtaggaaatttacttgggcaaacaatttagcgaatccaacatatgagaaacttgatagggttttaatgtccacggagtgggaacataaatttcctttatcttctgtggtggctcttaatagagatatttctgatcatactcctttacttttaaatacaaacacttcttctttgagtaatgctcaacatagtttcaagtttgaacttggttggcttttacgtgatggctttgttgatatgtttgatgagaataaatttgctgacattcctcaagtttctcaattggagaatgaggctttaacgcaggtttttactgaaaaagagattaaggaggcgatcttccaaatggaacataacaaagcaccggatcctgatggatttcctgctgaattttatcaagttttctggaatgttataaaatgtgacttattagatctttttaaagaatttcataatggtactttacctttatactctcttaattttggtacgatcattcttttacataagtgtgttgaggccatgacaatccagcaatataggcctatttgcttacttaatgttagttttaagatctttaccaaagttgctacaaatagagtcatgactgttgcccaaaagatcgattttgagaaagcttatgataaggttaaatggtcatttgtacaacagactttgaggatgaaaggcttctctcctaaatggtgtgagtggattgcctcttttattcaaggtggtcatgttggtattaaagtgaatgatcaaactgatgataccatcatttttttagagcatgatttacaacaagcaaagaatttaaaattgattttgtctatctttgagaaattatctggcttgaaaattaattttcacaaaaaaagctatgtaataatgattggaaagttatcgatcaaagaatag

SEQ ID NO: 99092 - DNA, 4789 bp, Oryza sativa
  Clone ID: PAT_MRT4530_96937C.1
aacatggactctgttttttttagataatggaatgaaatagcatcccgacctttactcaaaagagctacagccaattattacaaactagcactctgtaagagtgaagttcaaatagaagcaaacacaccaaccaaactagacaaaataacattattccagtctattggtaaatctccatccatgattggcaaacagttgcataaccgtcgtttcaaccttacgacatgcaacaattaagaaatctgtatcttcatcacacttttgtaactgtgcccacagacgaagccaatatgttgccttgaaaatgacctgcatataagtaatagtaggtgatttgtcaaaaaccctatcattcctactcagttacagtgcccaacacaaggcagaagctccagcaagtattagtttgctctttttgtttatgactccctgaagccaatcataaaaaatatgagatatgctagtaggaatatataaaccaaaagaaaactgaactgccctccaaataaactttgcaaaatgacaatcaatgaacaaatgttggatagactcatttttcgtacaaaagcaacatcttaaattaccattccaattccgtcttgctaaattatccttggttaacacaactcccttaagcaaataccacataaagatcttgatcttaagcggcatcttgagtttccaaattaacttatttctgtcaatgtaaccattattaattaaggctaagtacattgatctaactgagaattggccattctgatgatagttccatctaaaacaatcagaagtattattcaattgaatatgaacaatagatgcacacaattcatgccaaagtgttaaattctgaccaactaaagctctcctaaaagaaacattgagcggaacagaagctatcacactagcaacagaagaacttctccttctgacaatagcatataaagatggatacttttctctaaaggccatatttcctagccatctatcttcccaaaatcttatttgttccccattattcacaatccaagaacccatagttaagaaagtgtttttgacattcatgagtcctgaccaaaaatgtgagtcaccttgtttcctgtcaacttgggttatagacttattataaagatactttctcttcaataggtcttgccaaacaccattttcatttattaacttggagaaccatttactcaaaagacatctattttgaatatctaaattatgaacccccaaactcccctgttctttgggttggcaaataatatcccatctagtaagtctataatttttcttatggtcatctccttgccaaaagaaacagatctataataatcaatcttttgaagaacccctttcggaatctcaaagaaagatatcataaacatagctaaacttgaaaggacagaattaatcaaaaccagtctacccccaacagacatatgttttcctttccagctgctaagttttttctctattctttgttcgataactttccaatcattattacaaagctttctaaaatgaattggaataccgagatatttaactggaaaagaccctaacttacaaccaaagatattagaatattgctcataacactcctttgcctgaccaaagcaaaataactcacttttgtgaaaattaattttcaagccagataatttctcaaagatagacataatcaattttaaattctttgcttgttgtaaatcatgctccagaaaaatgatggtatcatctgcatattgcaaaatagacaaaccatcatccactaggtgaggaaccaccccatgaagagatccattatctttagctcttttaattagtaaagctagcatatcagcaactaaattaaagagaattggagatagaggatccccttgtctaagacctttatgcgtttgaaaattattaccaatttgatcattaactttaataccaacatgaccaccttgaataaaagaggcaatccactcacaccatttagtagagaagcctttcatcctcaaagtctgttgtacaaatgaccatttaaccttatcataagctttctcaaaatcaatcttaaaaattacagcacttttgtttttacgatgtaactcatgcaaagtttcatgcaaaataaccacaccttccataatatttctcccaggaatgaaagcagtttgagtaggactaattaccttttgggcaaccgtcatgactctatttgtggcaactttggtaaagatcttaaaactaacattaagtaagcaaataggcctatattgctggattttcatggcctcaacatacttaggtaaaagaatgatcgtaccaaaattaagagagtataaaggcaaagtaccattatgaaattctttaaaaagatctaataagtcacattttatgacattccagaaaacttgataaaattcagcaggaaatccatcaggacccggtgctttgttatgttccatttggaagatcgcctcattaatctgtttttcagtaaaaacatgcgttaaagcctcattctccaactgagaaacttgaggaatgtcagcaaatttattctcatcaaactgaagagtagaatcatcaggaggcccaaataaacctttataataagtggtaatatgcgatttcaaattcgcatcaccatttattaattggtcaccatcatgtaattgaaaaattctagtcttcctatgttttccatttgtaaccaaatgaaaatattttgtgttagaatcaccctctaaaatatccttagatttcgccctctgataccatttaacttcctcttctctcagaattgtagataatctatttctacaaaaccatctaaaatccaactcctcctaactcaaaagcatagtttctgcctttttatctagcaaatccaacttatctaaaatctcctttttttttcttttttgtacaagccactagtatgtttagaccaacccctaagatgctgtcttaaacgacgaattttcgcctgccaccgctccatggcagaattgcgttcatcaacactagaccatatctcctttaccatatcaacaaagccatcacgtaaaagccaaccaaattcaaacttgaaactatgttgagcattactcaaagaagaagtgtttgtatttaaaagtaaaggagtatgatcagaaatatctctattaagagccaccacagaagataaaggaaatttatgttcccactccgtgaacattaaaaccctatcaagtttctcatatgttggattcactaaattgtttgcccaagtaaatttcctaccagacatctgtaactcccggagacataacccatcaataatagcattaaaaaggaagggccatctatcatcataattatcattattcttttcatcagggctacgtacgtagaatattaaaatcaccaccaataagaattggtaaggtttcataactgcacatattaactaattcagcaaggaattgatccttaaattcactttgagctggcccatacaccagaactaaagcccacttaaacttatcaactttattacataaatgaaacttaatgtagaaatctccctcatcaatcaaaccaatatcaacattaattaaattgatgcccaaaagcaaaccaccggacctacctctatgaggcttgcaatgccacaaaaattatttgccagcacacagatttttaagaacagccggactaaaatctttcttaatagtctctgacaaagcaataaaatcaaggtgatgttccttggttaagtcagaaataaacttgtgttttttcgggtcctgattaatagcagaacaatcatattcacttaatctcttactctccacacatttcaaatcattaattacatcatctttagtatgcagattctccaagttcttatcagccttcaacttctccgccctttcaagaacaagctgatcactgtcacttgctcttctcttactcttccttgatggagagagtactgcctcagggatagcagagagttttgccaccaaattttgctgagtctgaaccttgtcaaccattaaagtatcttcaacaaagccatcaaaatcttcatcagaagcagtcaagccatcatattcatgtatcagatttagctgtgaggaaggagcaggtgggcaacccctctcactaaactgaacaccagaacccaacttagaaccgtttcctgaatcatcaagaccagcttccttcccaactttctgatttatattcccctcatcattcttctccacatctccatcctccaaattttccatctccatgggcataggctcctcaggcccattttcaggttcaactctaaaggttagctcatacaggtgatccccaataaccacatccactacatccggaatcaaagatgggtcaaggaccaaaacctgcagacgagcgatgtcataccttctagtgaaaaccatatccacggctttagtaatgccaagaatggaaccaacagcccaaataattaaaaactccctcaattcagaaggaaggcctttgcactgtacccacaccttcggaaccacatatttcacctcatttcctacaccccattctacaatctccatctgagcctcactaaccttagtgtgtaccttgccccactccaccatgcgactcaatttagcagggattaatctatgtagctcagatatgacagcatttattgtcatctgaccgttagtcactttaaccaaaacagcctttggatcatgcctaatcctctgtccagctgaaagtggaatatggaaaaaaccaagaccat

SEQ ID NO: 99093 - DNA, 510 bp, Oryza sativa
  Clone ID: PAT_MRT4530_96938C.1
ctacttctcctccttcacctcctcgtccggcgccggcacgggtgcgggcgcattgctgcccgccgtggcggcgtacgcgacgatgacgatgatgccgccgtgggcggtggcggctgaacagatggtgatgatggtgccggcggcggcggagtccatggcgcacttcgactccgcgctcagctcgctcgtgtcgtctccgcagggcagcggtgatgagatggcggccatcgggagcatcgcgtccacgaagtcggagagcgggacggtgggtgcagctcgctggaggaagcgccacttgtgctgctccatggcatggtgctcgtcccgaccgcggtggtagggcctgatggccaccagccggggctcgtacagcttcctacaactgctgttgtcgtcgcgacgggagccgacagggacacggaatggcgcgcggctggggacggggatggcggcggcggggatggggacggggatcgtcgccgcgtcgcagtttggcgatggcgccgtcat

SEQ ID NO: 99094 - DNA, 478 bp, Oryza sativa
  Clone ID: PAT_MRT4530_96939C.1
tcttccccctcaaaaccctaacgagcggcgagccgcctctctcgagcgcttgcctccctcttcctcctcccctcccctcgccggcccccccccttgccccaacctccgcgcgcgccatcgcggcgccgccccgaggaggacgacccccctagccttccagaaccttctagaacgcccggatcgccctatcgactaccaccgacgcatcgggccctgccgccgccgccgtggggtatccatggagaagctccgcgtccaccgatgcggcgggggcgcggtctcctggaccccgtcacccatcgtcgcgctcgtcggctgcccctgcaaggcccaggtcgccgccgaacgcgccgacggctccctcgagcattggctcggctcccccggctgcgtggggcggcaccaccagctcaccattcagggggatgccgagtcgaggggcacctcgctggtgtaggcgcggagcggtgccaatggg

SEQ ID NO: 99095 - DNA, 308 bp, Oryza sativa
  Clone ID: PAT_MRT4530_9693C.1
tcgacaatactgtttggcagtacaggatatatccaggatatgcaggtcggcatgatggggatatatggaaatctgcgtcactgaagaggaagagcgaaggctatcgtggtaattcttcaagtgattcaaggaaacggtaaattttctcaatttatcgaagaatccaatttcacttggcaagacgactgagatgataggtgagaaggtggagcactgttgcaggtggagtctaagaggaagaaattacagggatagcagagtatcttgaaggcggcgggtctggcgcagactcgcccggcagcttgcgg

SEQ ID NO: 99096 - DNA, 1242 bp, Oryza sativa
  Clone ID: PAT_MRT4530_96940C.1
atggggtcgccgcgaggacgccgccgcggcgacaatggccgcctcctcctcctcgccgccgccgccgtcgtcattgcctcgctggtcggcggcggcgcggcgcagccgacgacgtccgggcccggcccgaactacttcaaccccaagagcttcaacccgtccatggccgtcgtgatcgtggtcttggtcaccgccttcttcttcctcgggttcttctcgatctacatccggcgatgcgccggcgggccgttgggtgggcccggggggtatggcgtcggcggcggcggcggtggacgtgtgggtggtgggttcacgtttgcggcggcgcggtcgaggagggtgagggggcttgaccccgccgtgctgggcgcgttcccgaccatggcgtacgccgacgtgaaggcgcacaaggccggcaagggcgcgctcgagtgcgccgtgtgcctcagcgagttcgacgacgacgagacgctccggctgctgcccaggtgctcccacgcgttccacgccgactgcatcgacgcgtggctggcgtcccacgtcacgtgccccgtctgccgcgccaacctcgccttcgacgccggcgtcccgccgccgccgctggcgccgccgcatgcgttgaccaccgggcaagatgttgcggctgcgccgccgcagccggcggcgccagagcaggtgacggtggacgtcgtcgtcgcggatgccgaggagacggaggagaggatcaggagggaggaggcggccgagctgatgcggatcggaagcgtgaagcgcgcgctgcggagcaagtccggccgccggccgccgcagttcccgcggtcgcacaccacggggcactcgctcgccgccgccgccgccgtgcccgccaccgccgacgacgccgcggagcggtacacgctgaggctccccgatcacgtgctccgggaaatcgtcacctcggcgaggctacgccgcacgacgagcctccaatcgttccgcaccaccgccgccgccggcggcggcgcccgcgccgggaggagcgtccggctcggccagtccgggaggtggtccaacgtgtcgtcgctgatgcgcacgttctcggccaggctgccggcgtggggctccgctcgacgcggcgccgaagccgactctccggggaaggacggcgccaaggtcgccggcgactgcaccgcctccgtggagcaacactgcgacggcggcggcggcggcgcgtgcccacgtccacttggtgaccatgtatga

SEQ ID NO: 99097 - DNA, 456 bp, Oryza sativa
  Clone ID: PAT_MRT4530_96941C.1
gacttaaacctactggaccaaggggtgcagccaaaacttaagaaaagccccccctgaggtgagcggcccgaccacaaattggttgcttgacacaaaaaaactggcaacagcacaaaaggggaatttcctggttgcgtattcccccacagggagggattaaaccggaggcggacactttgaatagatagcccgaagccacgacccctagctcccagagaccatatcggtgaggaggacggcgccaaaagagggcttgattttttttgcggtgacctcggaaaagataattggcctggacaacgatgggcctatgtggggggagcaaccccttgccgagcaccttggagtaaccgaactgccagacttagataacgggggccttgccggcgccggccccgtgctttatgccaccaaggaccaggggcgctcaacttatacggcggggcattggaacct

SEQ ID NO: 99098 - DNA, 1386 bp, Oryza sativa
  Clone ID: PAT_MRT4530_96942C.1
gatgataggtgacactatgaagagctatgacgtcgcatgcacgcggtacgtagcttggatcctctagagcggcggcctcgccggagctcagcgagcaggccttcgacgccgcctccgcgaacgccgccggggtggtcacggcgctcggcgcgtcgtcgacgacgaacccgccgtgcaccgccctgtcgtagaagtaggacgccacgtagaggtcggccatgccggcgccgccgccgccgttccacacgccgttgaagctgcagttccgggactcgcacggcgcgtccaggcccagcgccgccgccgcctcctcgccgcacttgccgtggtccgccccttccggcgacgccgccgcgtcgtactcctcgccgttgtacttgtatgtaccattgaatccgcgaagcatgcaggagctgaattgcccattcttcgtcttaagaatctcgacgcgagaagcttggagcccataatgcaagtaactgtgaacataaaggttataatcttttcccttgagatactcctttgtaacataaggatctttgccgacagggactggaggagcgttttctgcagcatctgaagaaatggcataggccatttgaactgaaccacctccgagatcgatcactcctacggtttttgagtaatcccctcctaacttccccaaaagatagttcagagcaacccagaggttggatccttcttgagaacccccaaggacactgatccattctggtttgtactggaaattgctcttgctgtggacaagatctcgaaccgcttcaagaatttgctctgacttctcatctccaatcagtcttagaccagcagtggccccaagtttgaggggagttcttttctgaagctgcttgggaacaacacctttagccttctctagcagaggagcaatggagtttgcagcttcctgtggtttgccagcatatgagctcaacccgggcttcaccttggcgaagagctccatgtcgtcgccgatcttgacgaggtccatctgcttgtcgaacctgaagacgtgaacccggctcccggtgctgccggcgtcgaagatcacggcgtacttatcgttcccggcgccgtccttcctcgccgagatctgcagcgccggcaggtcgtcgtcggccgacgacgacgctgcagcactactcatcccggcggccttccggccgagcaccaccgccgcgtcgccggagaccacgccacgccacgacgacaccgcgacggcgaggacgaggaggacggcgtgcaacaacacggcggagcgtgccatcgctgccgccgccgatcgatgaaagcgcctccgatcgagctggcagactgagccgcactcagctacgagctaatatactccgatggagtcaggcctcgtgc

SEQ ID NO: 99099 - DNA, 172 bp, Oryza sativa
  Clone ID: PAT_MRT4530_96943C.1
gttacaaagagaacgatggaacttgtcggatccagcgagatcttagtcgaatctggtggtctccaagtagaacttggaggtaagttcatcgcccttgaggcctggacccggtcgtccttctatgagccagtgatgaactggatcaccggaaggccgaagcaactcgagctag

SEQ ID NO: 99100 - DNA, 231 bp, Oryza sativa
  Clone ID: PAT_MRT4530_96944C.1
ccggggggtgccgcgccgtaaccgccgggaccaaccccgccggcttgtatccatggatggggcaagggccccaccgggggggaggttgaagaccaactccgccttcccccaacgccagtagacaagcctgtgccactctctcttcaggacctgaccacgatcgtgcgggaatgggaccgtgcctgaggggcccgtccggactgcacccctcacgcctgggagggcggggac

SEQ ID NO: 99101 - DNA, 396 bp, Oryza sativa
  Clone ID: PAT_MRT4530_96945C.1
atgttctccaatgctcccgcagttttggcacaccgttactccaacacagtccacaacaacgaggtgcgcgaccacgacatggcgttcctgcacctcacgaagcacagtagtacgatccgatccggtttgatcccccggatcaaataccactccacgccccgtcggtttagcatcccaccgcggcatctccgcatccgctcgccggatcgcgggagcccaaccggtggtatatccacgctgattccccgcgcgctgctcgctcgggcacccaccagccacacgatggcccccaagcctccctcgaatcagacccgcgtcgcgccgtgccgtgcgcgtcacatggcgccgcgcgtggcgtggtcctcctccagcccgaagcggacaaaacgccaataa

SEQ ID NO: 99102 - DNA, 366 bp, Oryza sativa
  Clone ID: PAT_MRT4530_96946C.1
atgccaaaccccaggatcaacggtgatcaccaggatttggccgaacctgtgctgggccctcctggcctaggcttcggcctggggttcggcccgaggcagggcggcggccgttccccacgtgccccagggttgggtcaccccgacccccaccacgtggcggcaaatgtgccgcgccagacaggcgctcctagcacccacctaaccgcatttaaggcggcaggaggatttgaaaatcgccatcattatcgtgcacgtgcaaggcacgttttgacagtcacatatacactggagaaggagcaagacaagccaaaaagtaagacagcgcagaatgaagaagatgtggcattgctgcacggctacacctga

SEQ ID NO: 99103 - DNA, 1017 bp, Oryza sativa
  Clone ID: PAT_MRT4530_96947C.1
atggtgttgccggcgtcggctctcgataatggtggtggtggtgctgccgctgtcgtggtggtgctgctgccgccattgcctggtgcagctgttgctgccgccgccgacgccgtctggtgctgctacggcgttgtcagcgtctttgatgttatttttttcttgaaggcttcacttcgaagcgcgtgctccaccccgttcgtcagcgcgccgtccagccccgccgcccgcgacgcccccttccccggcggcttcttcagcgcgccggcgagccccgcccaccaccaccaccaccacggcggcgagggcggcggcgacggggaggagtatgagttcgagttcgatttctcgtcgaggttcccgtctcctgctcccgcggcgatgtcctccgccgacgagctcttccacaacggccagatccgcccaatgcggctcctgccgctcgtcggcggcggcgagacgccgcgggaggagctggaggttggggcgggggacgagcgcggcggccgcctccggtgccggtccgtgcgccgccggagccgatcccactccccgttccgcacatggctgtcaccaccgccgccgccgccgccgccgccgtctgctgctccggtggcgaacgcggcggccccatcggcgtcgcggtcgtcgtcgtcctcctcgacggcgtcgtccgcctccgcctcctcctcctcctcctcctcgtcgagaagctcccgcagatggagattcttgaaggatctcctccaccggagcggctcggacgggggcaaggaccagcggccgcctccgcccatcgcgccgccgcggtcgccggcgcccgccgcggcgaggggcggcaggaggaggtcggcgcacgagcggatgtacgcggcgaggcgagccgaggtggaggagatgcggcggcgcacgttcctgccgtaccagcaggggcttctcttcggctgcctcggcctcacctcccgcctctccggcgccgccgccgccgccgccgccgccgccggcaagtccaggtcatga

SEQ ID NO: 99104 - DNA, 658 bp, Oryza sativa
  Clone ID: PAT_MRT4530_96948C.1
atggcgcggcggtgcaaacggagggcatctacgcgtaaagctcggctcggcgaactcaccagcggtttggatgacgacggacggcgacgattgatgacggcggcgaggtcgaggcggcggcggtcttcgggtcgtcgatggtggcagcgctccggtagtcttcggcggaaacggaggacgggacaaggacgacggcgaccttgcgaacctggcgacggccttcctgagcgacggcgacgactggagcagcggcggcgcttggctggacttgcggcggcaatggcggcgcaagggttgacgcggaggcagcgctttcgccacacgccacgcccttcgccatagtgccaataaggcacggcgtcaagggctgtgggcgaagaggtttcgccacacccacgcccttcgccatagtgccaataaggcacggcgtcaagggctgcgggcgaagaggtttcgcccacccacgcccttcgccatagtgccaataaggcacgacgtcaagggccacgccctttgccatggtaccaataaggtacggtgccaagggctgcgggcgaagaggtttcgccacacccacgcccttcgccatagtaccaataaggtacggcgtcaagggctgtgggcgaagaggtttcgccacacccacgcccttcgccat

SEQ ID NO: 99105 - DNA, 768 bp, Oryza sativa
  Clone ID: PAT_MRT4530_96949C.1
atgaggccgcccaagcctctggacacctttcgccacactcacacccttcgccacagtacccgcgaggggctgcgggcgaagaggtttcgcccacccacgccctttgccatggtaccaataaggtacggtgccaagggctgcgggcgaagaggtttcgccacacccacgcccttcgccatagtaccaataaggtacggcgtcaagggctgtgggcgaagaggtttcgccacacccacgcccttcgccatagtgcccataaggcacggcgtcaagggttacgggcgaagaggtttcgccacatgccaagcccttcgccatagtaccaataaggggcagcgggcgaagaggtttcgcccacccacgcccttcgccatagtgctaatgaggcacggcgtaaagggctgcgggcgaagtggtttcgccacacccacgcccttcgccataatgccaataagtgttccgaaagagttcattaccggcaataacaagcggtttgactccgagaagtccaatgaaatgtgcgaggggctaaaacttgaaatcgagttcgcatcggttgcacacccgcagacaaacggggcagccaaaagggacgaacgacaaaaccctagcagcactaaagaaatgaccgtaagccggaaaaacggggataatgctgcgtcgacgctgggcaatggcaaactgacgcttagtcatataaaattcatgggtgtcttcgccatttttgtgtatgatatttcgtggaaaaaccccaaggcaaacatttga

SEQ ID NO: 99106 - DNA, 462 bp, Oryza sativa
  Clone ID: PAT_MRT4530_9694C.1
atggtgaggaccgggactatgctcagggaggagcagaggtctagtgcggtcgggataccatgtgagaaggtgactagagtctggattcttgaaggtcaacttcggtcaacggtgggaatcgggactaaactcagggaggagttgaggtccagacggtcaaggatactgggtgaggaagttggatacgagatggcacacggtggatggacaccgtgtgggagagatcttcgcaacaggcttcacgtgtacgtgcaagtgtcggtgttcgtgaaggaaatacgaagaaaagatgtgctaaagtacacgaggcaagcatcagtgcctcggctgggatgtgcacgtgggcttgcttgtgttgtagaccggccggcccaggtggcggcagcaaggtggttcaaccggcggtgtgtgagcggtctgaccggcggcgacaggactacgtcgagatttccatcaatttga

SEQ ID NO: 99107 - DNA, 536 bp, Oryza sativa
  Clone ID: PAT_MRT4530_96950C.1
gggaattgggatctgttttttctgagcagacgctccaatcatttacggtggagaagttgcgtattcttctgaaagagagagggctctcaccaaaaggcaaaaagcaattggaatttcgatctctggtgactggtagcctagcggtgggtcatcaggtagagcagtttgttatatgcttgggtgagggtgtttggcttcatcagaagcatgcacaatgtactgttggcgactgttgctgtggtgctgaccattatggtgttggaattaaagggaaggaaccctcagattgtggtggtttcctagcggaatctgtaatttgttttgttattagattacgtttaatacttcaaatgtatatccgtatatccgatgtgacaaccaaacccgaaaatattccccaactaaacaaggccttagatggacttgagaggggtggattttgcttagagggtatacagaagggtaatgattacttgaatagacatggtggagaggatgttggtttgggtgcgctgacgattgaggatatatactga

SEQ ID NO: 99108 - DNA, 699 bp, Oryza sativa
  Clone ID: PAT_MRT4530_96951C.1
atggctggagttatggaggacagctcgcaccgtcgtggcagcctgttcggggtcgggttgcgcgggatttttctgttgctttccttcggcgacgcggttgggaggggaagggaatcgtgcccatgtgcgggagacgggcccaccggcgagcggcggacgcggacgcggacgcgactgatcatggccaggtggcagatgacgaaggtggcgacccaagttgccaccgaagagcttttcgtcatcgcaagggcaaggccgagaggcgcacgcgcactgacggcgctgctgctgctgctgacgctcatcaccaggacagcggtggcacaggacgtgaggctcggggacgtggcgccagaggagaccacggtggtggcggcactcgcagttgagctgggccagctcagggcgaagatgaagggggtgcgaaggctgaaggtggagaagaaggagaagggagggccggcaatccccgtctacgggctccggcgagggctccctcgacaacaattccgcctcccttctctgggcctctacctggtggacgcccatgccacctcgatcgatggcttcccgaggatggaatcactggggtcgttggctgcctcattgataggatgcttgttgggtttacgagggccgagcgtgatcaccctagagtccgcgtccactggacgacgacatgctcgccctcgccgatga

SEQ ID NO: 99109 - DNA, 296 bp, Oryza sativa
  Clone ID: PAT_MRT4530_96952C.1
ttgtactaccttatcgcatctcgcgcgcggcgcgcggccttagagacgaattggcgctggctcagaagacgaacgaggcggcgatcacgcagcaggattcgatggttctgacaaggaatctgctgcgaattgctatatacaacatcaggtacatgataggtctattgcctgcgaagtactccaatgatgagtcggttccggcactacagatgaatattaagaagctcctgccccttgatactgaagcacggaagctgattgattggctggcaaaaggtgtctatgactcactacat

SEQ ID NO: 99110 - DNA, 782 bp, Oryza sativa
  Clone ID: PAT_MRT4530_96953C.1
ttttttttttttttttttttgacagcctaacagatcaccgaagcaattcatcacttgcatcattcgataacattgcacaggcagtgttagcaataggcgtcaaacttcttgcatatacacaacaatcgtgtgcctgtgaaaggaatttagatacctgatctcacaagttaacgatacaatgagaaaacgcaatccgaggctagtcgaattgctcccagtcggtgtttatttgtgtggaagaaacccgtggtgggggtgcattcaagctgcccatgccattgtcgaacgtctcccactgcgttgtcactgaaacagatttgttttgatcgctgaagggattggcatttcttgccttcagcttatccaacgtctccacaagaccttggacacggcgtacctcagccttcctttgtgcccttgcttctccctctgcctctatgccatcaagtttcagcagctccatcataagaagctccgtcaagacaacaaaatctttatcctcaatctttctccctgcaaacacactcttctccaaatcacataccttggcagagagtctgtcaacttcagctcttacacggccaacagcctcacaagccttcatcatgctctcatccataattactggctcggccctctgctctacattggcaggggcaggcttctcaagtagaagaagttttgctccatccttgaccccagctgtatgcaggaactcattgtcactcttctccttcccacggaagaagagcctctgctttcaggcttctacgccagttgcc

SEQ ID NO: 99111 - DNA, 523 bp, Oryza sativa
  Clone ID: PAT_MRT4530_96954C.1
tcgcggacgcgtgggcctgtccggcaactccagctcatgcaacgtgagcaatggggggaggatcaggagcatgcgagtgtggcctatcgacgacatcaaaaagtgcaagaccttctgatacatgtcacacgatcagcgtggaggaacgtctgaagcagatcgagtacctgctacggtccaagtgggtgccctggctaacgatcaatacggtcggatctacctaccgagagaaccacacatgcggcagatactacatatggcagggactggaccatgtggaagctgtccatgttctggtgcactgacacaacgcatgcgctgaaggagctcgaggaggccaagaaggcgaaccctgatgcattgggccgcataataggtttatacaacacaaggcaggtgcctgtgatgagcttgatggcctacaagcccccatgctgctaggaggccggtggcaactaagccgctatcatcatatgatgcctcgcacaatggttcatgtgtgattcgatgatgcatcccacct

SEQ ID NO: 99112 - DNA, 351 bp, Oryza sativa
  Clone ID: PAT_MRT4530_96955C.1
atgtgtcgacgacgggttctgacgccgtttgggctggacacggccgatccggtgctgacggaggtagaattggccccctcgcgaccggatcgagagggagcacaccggccgcgccgcattcaggaccggcggaggaggtcatggtgtcggtggaggagatcatggcaccggcagaggagaccatggcgtgctcgcgcggaggaggcgcgggatggccaggttcggctcctccgagaaggacgaggtggtgaggaggccgtggaggtgcgggcagcctgggagaagcaggcggcacagctggtggcgacggtaggccggcatggcgcgagatgcgtggcggcagcaacgtga

SEQ ID NO: 99113 - DNA, 901 bp, Oryza sativa
  Clone ID: PAT_MRT4530_96956C.1
ccacgcgtccgcctctatttgcgttgcgaggcgacgacgtgccaaccacgaacagaggcggcgctgcaaaatctcgcgaccaagcggcggcggcggcgggagagaacgagaggtgaccgatggcgacgggcggcgccgccggcgaggacgtccccggcggcggcgagttctacctgcggtactacgtggggcacaaggggaagttcgggcacgagttcctcgagttcgagttccgccccgacggcaagctccgctacgccaacaactccaactacaagaacgacaccatgatccgcaaggaggtcttcgtctccccctccgtcctccgcgaggcccggaggatcatccaggagtccgagattatgaaggaggacgacaacaactggccagagcccgaccgcgtggggaggcaggagctcgagattgttatgggcaacgagcacatctccttcaccacctccaagattggctccctcgtcgacgtccagaccagcaaggaccctgagggcctccgcatcttctactacctcgtccaggatctgaaatgtttcgtgttttcactcatcaatctccacttcaagatcaagcctattcaatcttgagctcctttcagtctcttaattgtgttatggccagttttagagaattctgtattattatgtatgatccagcgggttaaccatggtggtggggtgtttgtggaacagagggtggaatcttaatactttggtgcctgggattgttgttggattgtgcaagctttgggtgctcgttactcaagtagtgatatttattattgtgaaatctttttctaaaaaaaaaaaaaaaaaaaaaaaaaaaaattgctgttttaaaaaaaaaaaaaaaaaactcgcctgcagcccggggatccactagttct

SEQ ID NO: 99114 - DNA, 584 bp, Oryza sativa
  Clone ID: PAT_MRT4530_96957C.1
tcggccacgcgttcggccacgcgttcggccctctctttcttcctagtccctccagatccaacacctcctccctcagatccacaggcggcagcaccgcgggcgatcggaggagagggtggtggcgggctcggggcgcgggcggcgtgctcgggtgtgggcgatagcgctcgggtgcgggcgacggaggagagtgcggcggcgagctcggggcgcgggtggtgaggtcaggcgtgggcggcggcgctcgggcacgggtgacggaggagaggacggcgtgaggtcaggcgtaggcggcccgggcggcggcgctcggcgacagggaggcgcgaggcggcggatccggcgacggggaggcgcgaggtggcggatccggcgatggggaggtgcgaggtggcggatccggcgacgggaaggcgcaaggcggcggatccacagcggtggtggcgaggcggaggcggtggaggtcgccggggctcggcagcagggtcgtcgaggcggtggaggtcgccggggctcggcagcagcgtcgtcgaggcggaggcggttgaggccgacggggctcggtagtggcaacggtgatggtg

SEQ ID NO: 99115 - DNA, 303 bp, Oryza sativa
  Clone ID: PAT_MRT4530_96958C.1
ttttttttttttttagatacacataattcttctttactgatttagtgcttactattaactatcatgggccaaatgagtaaattcctgaagctaacatgatactcaagttcaacaggggtctgctgatgacactacattaacaaaacgaatgttgccgatctaaaataatgttcagatactagaccaaggaaaagttcatgcgatgctcagtagtggtactatgataaactatccaccctgtttcaactgctgccattgaaaagattccagtcatggacattgaagttcatcacggcgagcttt

SEQ ID NO: 99116 - DNA, 573 bp, Oryza sativa
  unsure (1)..(573): unsure at all n locations
  Clone ID: PAT_MRT4530_96959C.1
ccctcgcatcaagcactgttcgttaaaagatcaggaaacctcatgtttgactgatcttgctctgatgactcacctctctgaatttttgcttatcgagagtcgttctctcaagatatatctatcctttttgagtggtggcacctcaccnaaacaaagtgcatatatatatgtctgaagaatatagtataattgactgcagtttaattaacacagaaaaattactgcgagtagtaattaatttctgcaagcaagcatagtatcttgggagcatgccgaaagggatgtttctagctagctagcagctagcttttagaggcacatttcgtacacaaattaactaacaatcttgcagatgaagtctttgcatgtttggtgcactgcatgcatgtcatctcacagttgcttgcatcttttggaactttagaatgtttcaacacataacctagctttatatctttctttcngttctatctctcatcagtagtcatgttaggctaagaattcagctactagagatagcctttttgtttttgacattcatgaaagttaattcaatttaaaaaaaaaaaaaaa

SEQ ID NO: 99117 - DNA, 540 bp, Oryza sativa
  unsure (1)..(540): unsure at all n locations
  Clone ID: PAT_MRT4530_9695C.1
gcacgaggaagtaaacttacttcatcttgctagctaattgtagagattgatataatcactgtgtcgttcagatcattatccaataatggcatcctcctcactacactgtcactcgacgaccatcctgttcgtgctcatcttcttggcgtcctcgtcgtctctgcaggccaggatgttgccgagtgatgttcatgatgatgataataatgttcatgtcaaggagctgagtgcagtttcttcaaaccctactgctagcactactgtcgattcgctagcactcatggcgccgccgccgccgccgccgccggccgccggcaagccggagatgatgcctgccgtcgacggcaagcgttgggggacggcccagctgcagggctcggtgcccagcccgggcataggaaactgaactttttggcatatactgtatctgagaatgtatgtctacgtaagtacgtagacacacatatatatttnngtgtagatcaagaagaatgtgtaaggacatatatacatgtaattctttcttgcaatataataaaa

SEQ ID NO: 99118 - DNA, 562 bp, Oryza sativa
  unsure (1)..(562): unsure at all n locations
  Clone ID: PAT_MRT4530_96960C.1
ttttttttttttttccnctttttttttttttttacagctaaaaatttccattctcccaagcattcaagcatcaaaaatatccacacatttaacaaaaaatttgaacaccaagcatcaatccaaatacaatgcttcacaaatatcatcacaaatattacaagcatcacaaatacagagaaccgctgtcgccggcgtcgtcgtccttgaagtcccctgcaccatcaccgttgccactaccgagccccgtcggcctcaaccgcctccgcctcgacgacgctgctgccgagccccggcgacctccaccgcctcgacgaccctgctgccgagccccggcgacctccaccgctccgctggccaccaccgtgcaaagccacgcaacgctagatttgagagagggagagggggtggtggcggcgggggaagaggaggagtgaggagtgggggagagagacctgtggatccgccgccttgcgccttcccgtcgcggatccgcacctcgcacctacccatcgccggatccgcacctcgcgcctcccgtcgccggatccgccgcctcgcgctc

SEQ ID NO: 99119 - DNA, 458 bp, Oryza sativa
  Clone ID: PAT_MRT4530_96961C.1
cccacgcgtttgctctcctgctccctcctccctgctccgtgcatatccagccctctcttccttgctagtccctgcagatccaacacctcctccctcagatccacaggcgggagcaccgcgggcgatcggaggagagggtggtggcgggctcggggcgcgggcggcgtgctcgggtgtgggcgatagcgctcggctgcgggcgacggacgagagtgcggcggcgagctcggggcgcgggtggtgaggtcaggcgtgggcggcggcgctcgggcacgagtgacggatgagaggacggctggaggtcaggcgtaggcgtgccaggcggcggcgctctgcgacagggaggcgcgaggcggctgatccggcgacggggaggcccgaggtggcggatccggcgatggggaggtgcgaggtggcggatcccgcgacgggacggcgcaaggcggcgaatccacagc

SEQ ID NO: 99120 - DNA, 207 bp, Oryza sativa
  Clone ID: PAT_MRT4530_96962C.1
atggacactgacctgtgggagatggtgcacaacaagaacatgcctttcgtggcagcggcgacctcccctccgccagatccgacaggaagggaggcagcggcggcggcgtgcggtggcaggctaccgacccccgatggctgcggcagtggtgccctccacgatgtcgggccattcttagtgttcttagtgttcttggatgttctttga

SEQ ID NO: 99121 - DNA, 500 bp, Oryza sativa
  Clone ID: PAT_MRT4530_96963C.1
cgggggggctcttggcaaatgaattctaaatgcgtcggacaactttattatagattcatgggggccccaattcggataaaaaatctatgggggtaatctctctataatatatactggaagaatcgcaaatcttctcagagtccatcttatgacatatctggataacacgagctccgccctgtgataccgaatatacataagggatcttgttttcttttagcccttcggcctactactcctggatctaatctctggcctgtcaacttactctcgtaggaatcgggactcccagagatagtcacaggctggagacaattttctgatcaccccccacgcacagggagcccatgatgataggagctgacgaatcccgcgggaacgtctcgcccggtcgcagttcaatttaatccatcgcgccggcctcacgaggaacgcttgtcacttcgccttctgtccaagtgtaatcccctgggcgcccctgggtcctttccttgtggaat

SEQ ID NO: 99122 - DNA, 495 bp, Oryza sativa
  Clone ID: PAT_MRT4530_96964C.1
cccccccaaaaggcaaaaatggaatggttccccattccagggggggcctaaaaaaatctttaaaagggctaaaagggggaggcatgaaacccgggaacccggaggggtaatactctaattcgggactaacaaaaggggagggaaaatataaaaggaaaaacatcatccataccctttccccgggtttaaaacccgggcaacccaaaaaaaacaccgggaagcaggggaggactataattttatagtggccaaatttgtttcgttaaaaggggaataaggagacccaccggacgggttttgtttcctttcggccggaaaggaccaaaaaaaaaatcccagttttttttttggattttggaactaataaactggttttttaataaactcaccctcctaaataaatttcactaaagcaacatcggaattctaacattaactcttaaggaatccattacccttttttaaacccttaataagcttcaccatctttcccat

SEQ ID NO: 99123 - DNA, 599 bp, Oryza sativa
  unsure (1)..(599): unsure at all n locations
  Clone ID: PAT_MRT4530_96965C.1
gcacgagggtgagaagctgctgacgggcctgtactggatgctttcanggggcccaacccagaccgcgggtccctcgtgtgacttggtcccgagcttgcaaggctggtgggattgtcaggaggtttagaccagtcgccatgacggctacaggggagcctgcaacggggatccctgcccagcctgcagcagaaccctccaagccccagctgcaggagcaggagaaagactatgccgacatagtgccagtggcgacgagatacgacggccttgagttcttgaagatcaaggacttgcggagcagcctccaggcgcgagactcgcccttcgtggtggacaacaacgccggcggcggcttcgttggcgattcggacttggttgccatcagcatcatgcagtacgactcgccagagtcatcaggcgccacttgttcccagggtctctttgattcctccagcaccatctgcatgccgctgccgccctttgcgctgcggtcaggaccgcgcaggaccgtctactttgaccccaagcaagtgactgcggcggtggtgacgtgtggcggactgtgtccaggcctgaacgacgtcgtgcagaacattgtg

SEQ ID NO: 99124 - DNA, 258 bp, Oryza sativa
  Clone ID: PAT_MRT4530_96966C.1
atgacccaagggcgaaagactacagctcaggagtacacgtgcttcgccggacaaggaccccgtcaggaggccacacaggcggagtcggtgagacgaaagcctcagcccgaaggcataggtttcgccaaggcaccaaaccccaccgtgaggaagcccagcgggccgttgcgcccccgcagggggattctccagattaatgggccaagccatctagcccaattggggcccatacatgtaaaggacgttgtgtacccctaa

SEQ ID NO: 99125 - DNA, 1520 bp, Oryza sativa
  Clone ID: PAT_MRT4530_96967C.1
agctaacagaacagagcagtcttaaaccgattagacaagtcaaaagataggtgcatttcaactacacaactgacagtgcatcggaagacagacaagacatgtgaattcaggagaggcctaagaatcggtcatcacaaaagagggcctgaactaaccatactaacgatcaactttgctgagttttatgttgttcttaggaagatttgctgaatcgttcagcaaaagcccgaccagttggaggacatcatcagcatcgtagatgatttcagtaagctttaggttctcacaccggatatccaccaaacgtgttttcttcgccttggccttccctttccttttcttagaatcctttggcagctcgcaaagccgcaacgtgagcttctccaaattaggcgagttctgcagaaagtgcttcaataactggaagttgtcactaagatcacacttgtcaagggataagatcttgaggttcttgaattctggtaactcaaccggttcctcaggtataatctgaaatatataatgcattgtctgaaaacctgacagctctaaagttgtcacattacagaggctaccaagaaacttgctttgattgtgttggaagttctttccgtcgtaggtggctgaaacaagaatggatgctttcgaaaggaatggcatttcatttacaatgagaccgccggggaaaaaccacaatttcacaataaggcacagggaggcaatggcaggagccgtgacaaccagtttggaaggacaaagcttgctgtcgcagctgtcgatcaccaagctcttcagtgagtgggacgtgatctcattgaatgcaaatctgcatcctttgagattcaaatcctccagagagcagcacattgagctaatgtgctttgcgaacagatcatccacacaaatgttagaaagatgtagtcttttgaggctccaagaactgcagctcaatcccgggcgaggaatgccaggaaccttggtgttatacttgatgctgcgacgaatccacctagatgcatgttgaccccaacgatacacattattaacatgcagctggaacgtatccaggtgtgcaatctggtgatgaagcatcaggttgtccgcaaaatcctcaaaattctgccacacctcattgtcgccctgtgcagcttcacctgtgctttggaactcccgatgatctacatcgaggcacggcacggtgcgccagaggtgctcccacctcttggacagcatgcacgtctgcaccacctgcctggccttcatgaaggacatgatgacatggaggaggcagtccggcaacgcgctgagccgatcgacggcgacgccactttcacggggccgctttcgtgtggtgtccagatccatggagacctggagagctctgctctcggagcaattccactgaacccacacaatcaccaaacttaaaaacgggagatcctttgctacatcagtaacgatcagatcgtgggttaggtggcgacaggcggtctgacgcacgcctcgccccattcctcggc

SEQ ID NO: 99126 - DNA, 101 bp, Oryza sativa
  Clone ID: PAT_MRT4530_96968C.1
ggcgtcggtgctccggtggttgaacggcctcgacggcgctgtccaagcgtgttcccgagtatcgcgcacctaggaggggtagtggctggtagagaggaagg

SEQ ID NO: 99127 - DNA, 214 bp, Oryza sativa
  unsure (1)..(214): unsure at all n locations
  Clone ID: PAT_MRT4530_96969C.1
aggaggtcgccgtcntcgccgtctccntcgccgcccaccaactccgccgccctcctcctctccgcctccaatgccattaaccctacgcgcacgggcctcctggtcgccgcagctnccntaatgccgacgtggtggaagcgctccaagtnggcnttccagcgctcctccgccgtntcctccgccccggcctcgccgcnaagggcntccacctcgt

SEQ ID NO: 99128 - DNA, 4009 bp, Oryza sativa
  Clone ID: PAT_MRT4530_9696C.1
atggatccccgcctccttctcgccctcctctgcctcgccgccttctccgccgccgcgtatgcctccgacgagatccacggctgcggcggcttcgtcgaggcgagctcggggctagccaagtcgaggaaggcgtcggactccaagctcgactactccgacatcacggttgagctgtgtactattgatggtttggttaaggaaagcactcagtgtgcccctaatggatactattttatcccagtctatgacaagggttcattcatggtcagagttaaggggcccaaggggtggtcttggaagcctgaaactgttcctgttgtcatcgatcaaaatggatgtaatggcaatgcagatataaattttcagttcactgggtttatgatatctggtaaagtagtgggagctgttggtgggaagagctgctctaaacatggaggaccttctggtgtcaaagttgagctatcgacaaactctgatgagttagttgcttctgctttaacatcatctacaggagaatattcatttgcaaatataattccagggcgctataaattgcgtgcttctcatcctaactatgaaattgagacaaggggttcatcagaggtggacttgcgatttggaaatgctgttgcagatgatgtcttctttctatctggatataatatttatggctctgtagttgcacagggaaatccaatcttgggagttcacctttatttatattcaaatgacgtaacagaggtgccttgtccacaaagtattagtgatgcacccagagaaggtgctctttgccatgcagtatctggtgctgatggaaagttcacgtttagttcgttaccttgtggtagctatgagctgttgccgtactacaaaggggaaaatactgtttttgatgtctctcccccttcactgcttgtttctgttgagcacagtcatatgactatcccccaaaagttccaggttactgggttttctgttggagggcgtgttgttgatgggtatggtgctggtgtggaaggtgctaatgttatcgtggatggtcagttgagagctgtaacagacaatcttgggtattacagacttgatcaggttacctccaagaagtatactattgtggctgagaaggatcattacaaattcaaccgtttggagaatttcatgattttgccaaacatggctagtattgatgatatcacatcagttcggtatgatgtatgcggtattgttcgaacagtaaccccaaattccaaatcaatggtgactttaacacatgggcctgaaaatgtaaagccacagaggaaactggtgagcgaaaatggaagattttgctttgaggttcttgccggtgaataccgcttatctgccctacctgtagataccgaaggttcttccagtcttatgttttcaccaggatttattgatgtcaatgtcaacagtccattgcttgatatagagttctctcagtcacaagtcaaccttcatggtaaggtcctgtgcaaagagcaatgcaaccaaaatattctgctgtcacttgttagattagctgggggaatcgagcaggaaaagaagacagttactttggagcaagataatgttaattttgcattcaaaaaaatatttcctgggaagtatcgtctagaggtgaagcattcatcatctgaggccgctgcacaggatgattggtgctgggaccaaaatgcaatggatataaatgttggttctgatgatgtgacggacattgtgtttgtacagaagggctattgggtagagctagtctcaactcatgagaccaaagcatacattcaacatccagattcttctaaacttgatttgctgataaagaaaggatcacaaaggatctgcatagaaactcctgggcaacatgagcttcatttaattaattcctgcatttcctttgggagctcgccagtggtatttgatacaaagaatccaatgcctgttcatatcagtgcaaagaaatatcttgtaagaggtgaactccatgtggagatgggctcccttcaagaaattgatttatccaaaaatattggtgttgatgtcttcaagagtgatgggagtttcatcgaaaaaatctctgctacacctgttcttggaaagagttaccaaaatgacattagtgcctttgagtactccatttgggctgaatttggggaggacttcatttttgttccccgtgatgatagcactggaaggaaaaatatcctcttttatccatcaagtcagcagttttcggtggctgtgaatggatgccaatacactgttccttcaataaccgctaaaacaggtctataccttgaaggatcagtgtcgcctgcaatttctgatgttgacatcaagatcctagcagcagggaagagcaagtatgcatctctgaaggaaagggacatagcaatggagacaaagacaaattctgagggatcattctttgcaggtcccctgtatgatgatattggatatacggtggaagcttcaaaggctggctatcatctaaagcaaactggcccgtacaccttttcttgtcagaagcttggtcagatattggtacggatttatggtgaacaagatgccgagcttttaccttctgtattgctgtctttgagtggtgaagaaggctacagaaataattctattagtggttctggtggaactttcagctttggtaacttatttccaggaagtttctatctccgacctcttctcaaggaatataaattcactccatcagcagttgctattgatctcaattctggtgagtctagagaggttgaattccgtgcaactcgtgttgcctacagtgccatgggttctgtaaccctgctgactggccaaccaaaagagggagtatttgttgaagcaagatctgaatcaagaggttattatgaggaagctactactgattcttttggtaggtttcgccttagaggactcgtccctggctcaatttattctgtaagagtggttgcaaaagatgatcacaggtttgcagcagttgagcgtgcttcacctgaatatgtgtcaattgatgttggtcaggatgacatctctggtattgattttgttgtttttgaaagaccggaatcaacaattttgagtggccatgtggaaggagatgatcttgacatgttgcaaccacaactgtctgttgaaattagatcagctgcagacccttctagaatagaatctgtactccctgttcctctctcgtactacttcgaagtacagaatttgccaaaaggaaagcatcttgttcagcttcgttctggtcttccatcacatacccatagatttgagtcagagatagttgaagttgacttggacaagcaacctcagattcatgttggtcctcttaaatataaaaccgaagagcgacatcacaaacaggaattaactccagcccctgtatttcctcttattgtcggagtttccgtgattgcattggtcatcagcatgccaaggctaaaagacttgtaccaaagtgctgtgggaatgactaccctaggttctgcggctgcgccgataaaaaaggagccaagaaagacaatcatgagaaagagggcgtgaggcataaattagcttcagattaggtgttgaaaaaacgggtacttacagttgatcacgtcaggagtagaaaatagccgtttctttgcatttaaggggtaattttgcagataaaaattggcagtcgatatttattaacgactacaaattttgatgccaatgttgggcatgtagtcattcgaaatgttgtacgatagtactgtgtacagttttcaggtgccagatgaagttttgagagcctggtctatctttcctcagctcagtatatttgtttagttttagtgtctggtctcgtttatgctactatgttgtagataaacacgttggcatttgcttcgggcatagttactgccttgtactttggcattaatttttcatgtttaaaactgtcatgttaaaaaaaaaaacacaaaaaaaaaaaaaaacaaaa

SEQ ID NO: 99129 - DNA, 246 bp, Oryza sativa
  Clone ID: PAT_MRT4530_96970C.1
atggacagcgccgttggaacctccacacaatatttcaggcaagggaagaaggaggcctctataatgttaatttctgtcggttgggcgcagcgtggcactcatcttaccgcagggacaaaccaaggcagatttcagggattggccatggagatggtggcgatgatggccaggccagagtgcatgctgcccaggcagcaggactgcttcaagaatgcgggcgtacttaaggcattatcagttgaatga

SEQ ID NO: 99130 - DNA, 372 bp, Oryza sativa
  Clone ID: PAT_MRT4530_96971C.1
atgtagtggagggcgctcacctcgatggccataagacccgcccggtacggcccagcccaggcactgctaggcacggcccaccagcgatcggggcacttcgtgcagggccgtgccagcccgaaggctcagaaaacggcactgttcattgcacctaaagtgttcgacgtggtctccctagccctagcccctcctctgccaactgcctcgcgccccgcgcgccgcgtgccgctctgcctcctctccgctgtcgccgtcgccatcgacgtcccgtccccgcgcgcccgcgcgccgctccgcctcccctttgccgtcaccgtcgccatctcgcgccccgcgccccgccgggccatacgcctgccgcgccgtcccgaa

SEQ ID NO: 99131 - DNA, 221 bp, Oryza sativa
  Clone ID: PAT_MRT4530_96972C.1
ggtgctttggttagaccgaacgacatcaccgtgaattcatacagcccgtatcgcgtggtgaacgcggtcttagggatatcttcctcacggatacgtaattgggtgatatccggaacgaagatcaatctgtttttgatggtgacttcagtggcacctctgtgctcatcgcacagatcatcgatccggggaagagggagcaccccaaggggaagtactcggac

SEQ ID NO: 99132 - DNA, 1104 bp, Oryza sativa
  Clone ID: PAT_MRT4530_96973C.1
atggcaatgtggcgctcatgtctctacatgccgcatctcaattaccttcccaaagaccggctgaggaaaaggaaaaaaggcggcggcggcacggcttactggcggcaacggcaatggcggcagcgcacggtggctgcgacagcggcggtgcacggcggcggggaacgtggcacggccaaggcgcggcgtggcgcggcggcttcgtggcggcggcgcggcggctctatgcgacgacgcggcggcgtggaggcggcggcgtgggtgttacacaagatgggccacctgagccttcgggctggcacggccctgcacgaagtgccccgatcgctgcgaccagccattagttcaaagacattttgcttgtatctgctcttcctctcccgcgaaaatcaagcaccgagacaagctatagctctgcgcccatcggtcattgcccgtggagcctatactatatcgcgacattccgcactctcggccgtgcacaaggtgtcgatggcgtcggcgcggccgtaccggttccccgttccggcggagggcggcgagccgacgcgacgccgctccgccgcccagtcgtgcgggacgtgcggcgcgtcggcggtggcgagctgcgtggcgctgtgctgctgcccgtgcgccgtggtgggctgcctcacgctggccctcgtcaaggcgccgtacgcggcgggccggcggtgcgtggccaggctcgccgccggcaagcggcggcggatgatcaggccaggcgtcgcgacgacgccgcggaagacgaaccgcgtctgggacctggacgacggccagctgcaggagtggcgccccgccggcgccgacggcgcggtgcgggcagagcgcaagcaggatcggcgcgagcctggccgcaccggtggtgcagcctcggcagcgccgccgggcgatgccagcgtcgacgcgatcagtgccgtcggcgagggcagcggcagggcgaggccgcgggtggacacggcggagaagacgtgggtggagatctaccagctcgggcactgggggttcggccggctgtccttctcacagccccaggtgatcagaggtgacacctgcggcaacgacggcgtcgctgcttcccggcag

SEQ ID NO: 99133 - DNA, 261 bp, Oryza sativa
  Clone ID: PAT_MRT4530_96974C.1
atgaatgaacagaagtggaatggccaaaaggaggttccgggcaaaagtgccagaaacttctgggcaacacttaggaaatattttgcaaataaacggtgcccggaagttccggccaaaacctccggggggtttaagtgcatcttcatcccctatgtcgtgcgctgtgccctgctctactttcctcgtgcggcgcgcggccacgagatgtcgagacacaggcgcagcgtcggcccgcccgcaccgcaccgcgcccaactccat

SEQ ID NO: 99134 - DNA, 301 bp, Oryza sativa
  unsure (1)..(301): unsure at all n locations
  Clone ID: PAT_MRT4530_96975C.1
gaaaaacgaatcacatgcatcgctccgtggcgagaaagccggagagaggggggcagagaagctcgccgnagaaaccgaatccgngccgcgtccaagctcccactgacgtcgtgctatcagtnaaggagagagcggcgccaactagggngaggaagagccncgacgacggtggggtnanaagctnccggagaggagcttnaggtcgtccaccaccagatccacaccaacgagttcgatgacatccngttccacgccggttnttaaagcccataggggcgccggcggaaagggnggcatggcg

SEQ ID NO: 99135 - DNA, 413 bp, Oryza sativa
  unsure (1)..(413): unsure at all n locations
  Clone ID: PAT_MRT4530_96976C.1
ctggggttggggtgtttttttataatttttttttttggggtttttttttttttttttttttttttaacaaaccccaaaatttgaattgcctggcaaactccaaagggttacacggtataacttggacactttcaaaactaatcaaaacttaaccagtgggtagcgggagaaacattttttcatttcttttttannnatctaaatatnnnaacccaacaaatcaataaatcccttttttctccanncccccattctttttaccaataaaaaaccccttcctccttattatttctctttttttctccnnttcctccttttatnnatttcccttctatcanaaaaaaaatccttttttcattttctannctcctannaccccntaacccccttttttttcaaattaatttttccct

SEQ ID NO: 99136 - DNA, 573 bp, Oryza sativa
  Clone ID: PAT_MRT4530_96977C.1
gcacgagggtgttcgtctcttccctcctcgcttcctttccttccctgccgctgctgctgcccccagggtggagcctcgggggaggccgtacctgcgggaacactcctgcctcatcttcccgccttcgccgcgcggccgccgcccgctcgccgtcgtcaagttcctcggcggcgccttcatcggcgccgtccccgaggtcacctacagccatttcctgaagctcctggcgcaggagggcttcctggtggtgtccgtgccgtacaacgtcaccttcgaccacgaggcggcggcgcgggaggtgtacgagcggttccacgggttctacggcgcgctgctctcgtcgggcctcccggcggccggcctgagcgcgatggacatcgcggagctcccgctctactcggtcggccacagcaacggtgcgctgcttcagctgttggtggggagctacttctcggagaagataccaaaggctaatgccattgtctcgttcaacaataggcccgcttcagaggctgtaccatactttgagcagataggccccctttttagtcaagtaatgcctatgatggaggc

SEQ ID NO: 99137 - DNA, 191 bp, Oryza sativa
  Clone ID: PAT_MRT4530_96978C.1
atggctgccacatcaccaaccaaggtggcaatggaacacgaaattggttgtgatggagctgcttcagtcatagccaaacgcctccttgtcaccggtccagtgctgccgccggtgaatcgacagcgccaccgccgccgcaggagtgagaccagaatgggacgagtgaaaatgagagtggagagggatctgtg

SEQ ID NO: 99138 - DNA, 153 bp, Oryza sativa
  Clone ID: PAT_MRT4530_96979C.1
atggtgcgcaagcacaagtgcgactggttcggcctacctcgaagcagcaacgtgctggcgcagcagggtgcgaccggccggcccgggtcatcgacagaaagctcaacagagcagggtgtggtggcggagcttgccgagttgccggcacggtga

SEQ ID NO: 99139 - DNA, 365 bp, Oryza sativa
  Clone ID: PAT_MRT4530_9697C.1
atgccacgacggcgccggctatccgccatcgtccgcgaggcccgcgccgcccgccgccccctgctgctgcggcggcctcgccgtggcgcaccggctcggggcggtccccgcgggggaggcgagcgttgttcgtggcggcgtccgcggcgtccgtgcccatctggaagaaggaggtgtacgacgacggtgaggtctggaaggagaaccgcgagctcctcaaccgcaccaccaccgacggcgctgccgcggcgccggcgaggggcgcgcttgctgcggcagcaaggccaaagagaaaaatggtcatagacctaaaggacccagagcaggggaaagggaatttaaaccagtgtggtagcttcttctag

SEQ ID NO: 99140 - DNA, 179 bp, Oryza sativa
  Clone ID: PAT_MRT4530_96980C.1
gagcacaagaaagcaccagtttggtcgatctgatatccgtttataccttccctacctaagtaaaaggggtaacagacagaggaaaaaaaaagagaggaagagtgtacatggattagttacacgcaacattttactggtattttgacccaaggcgggcctccgctggggcacgttccttg

SEQ ID NO: 99141 - DNA, 811 bp, Oryza sativa
  unsure (1)..(811): unsure at all n locations
  Clone ID: PAT_MRT4530_96981C.1
ccacgcgtccggctgattctgcaactgcaatggcgatgatgaggtagattataatgctagcaatggatgatgggcttggcatctcgtcctcctctcccgccttgtccccgcggcctcctcccccggccgccggccggcttgcccagaggagaggagaggagagaagaaaggagaaggaagggggagatgacatggcaccctgacatgtggggtccatatggaacctaaaatccaaggggggctggcctgcacgccatacctatacccatacagtgccaggggaggggagagaactaaaagataactcaagctagacagaaaggtgctgagagtaagcaatcccctttcctagtggttgagtcatgatcagaaatattgcgaaagaaagtgaaatgtcctatcgtttcaaaacaccgaagggtatactgtgatcggctttaattagttgatatttggttttgtggttggggggcgattttgtaactagatgacaagttgagggaccttcggagtactttttccttttctattttgcatacatgggctttagattgggcctgagacgtgggctgttgggccgtcgagtgtcaccagaagtccagaaccctaacgaagtagcagtcgctgttcttcttccgcggcaggccgcggtagactcgtctcgctccttggtgattcttggccgccgccgattggaagcagcggagcannaggagagggagggagagatgccgacgctgacgaagctgtacagcttgggagacgcggngcgccacacaccgccgacgactgctgggtcgtcgtcgacggc

SEQ ID NO: 99142 - DNA, 553 bp, Oryza sativa
  unsure (1)..(553): unsure at all n locations
  Clone ID: PAT_MRT4530_96982C.1
atcgccattcgcanngangcncgcggcccccgcggcgcaaggaggcgaccgtgcanatcgtctncctggaccgccccccngangccnaacccccaaganttccacatccgcaccctcgcccccntcctccgcagccaaagaaaaagcnaaagaagcggtgctctnccactaccancacnccncaagcggtttctctgccaaacttactcccnncangtcnanganctccagaaacaaccnngtgttcttcnggttgttcnaccnnanataccnnctccntngancccgggntgggcctggcncaataaaaccttaatcctttttttttttcggncnaccnataaagtatgttatgcnantgtttctggtgtntncttctcncggcatggttgttataccatatggttgtacnatnaaaattcnacacctgttctcccccntggatacnataatcttttacnttntccccatttgttttnantttnaaaaaaaaggggtttgcccntnntttttacnagatcntttgattctatattnncnnnntttgatccca

SEQ ID NO: 99143 - DNA, 307 bp, Oryza sativa
  Clone ID: PAT_MRT4530_96983C.1
cgaggctcttgccctttccactcccctttccacgggtgatgagcgtgcacgggacggagagggtaggcacggcgcagccggcggccgacgggaaagaactcggcggcggcgcgctccaccgcgtgcgcccccgtcgcctaccgcgctcgcagctgccactggcgagcgaggcgaaggtactggggcggctagcgttcccggcgctcctgggggaggcgtcggactacattgctgtgctggagatgcaggtgagcgccatggcggcgctcgcgcagacactctagtccgtggcacccgcgccgccacc

SEQ ID NO: 99144 - DNA, 581 bp, Oryza sativa
  Clone ID: PAT_MRT4530_96984C.1
ctcatagggcaatttggccccgcaggctacaattcggccgcaggccatctgatgtggcgagatgcatagagtgggaagcccacagccgccgcgccaccgggctgacgctcgccttcctcaccgcggcggcgaaggagctcggctgcccactcacttgctgacaaggccacaccatgactgtcactgcaagccagctgctgtcaggcatccagcgcgtcggcaacaggcatgcacttgccggtccagtttcctgcagcatgtgcatttaagcatgcatcattcagctgcatgttcccacgccatgctcacggggcttgctccccaagcatgtgcattttcactttccttttggttcaatgtgctcaccgctgcacattagctgttccaagcatctgcacacaactgcttgtgctgtcaacttgtcatgtctgtccacgtcacaacacatctttccatcatggtcacccggggcacagcagcaggtcatcatccttactgctgtatgtcatctaacaaacacaaacaaaaaccagcagcggccaagcttcatccctttcgttgcgggttcctttccgctgggc

SEQ ID NO: 99145 - DNA, 260 bp, Oryza sativa
  Clone ID: PAT_MRT4530_96985C.1
cgcatctaccttaaaaagctgaaactggacaaggaaccatcattttattcacaaagattagctgctttgacacctggatttgctggagctgacattgccaatgtttgtaatgaggcagctttaattgctgcaagaagtgagggcacactcttacaatgcaacattttgaatctgcaattgatagggttatcggaggcttggaaaagaaaaacaaggtattttttacgttggatgtaaagtattatatggggcatgaacaa

SEQ ID NO: 99146 - DNA, 382 bp, Oryza sativa
  Clone ID: PAT_MRT4530_96986C.1
aaaataaaaacgggggtgtgatccttttgatataacatgtaaccaccatgctgattacacgacccaaatcacaaacattcacctgcggaacgacctgaagaaaacaaaaactaccaaacaaaaacggcactgttatccagaacccacatggcgctaaactttgacaggagaaattgatcatgacccacgtggcaatgggggcaaacaagggtggtaccttaaactttaaagatgcaacaacgtaatctagtatacggtaaagtccaaacaacattaaccatgaaaattgctgagcaccaacacttacgaacatttgacaggtgattactgaaacacacatgtgatgagcacaggtgatcacagcataacattatgatcttgg

SEQ ID NO: 99147 - DNA, 291 bp, Oryza sativa
  unsure (1)..(291): unsure at all n locations
  Clone ID: PAT_MRT4530_96987C.1
tntgnccaggtatattatttngggtanaagacgtattatttggtacatatttattttagggncatatatgttggcacacatcattcacatagttcatttagataacagtcctatgggtgcccaccactataggagatccaganccgctttcagagccaattcatatcatggcacctgggcactntncctccgtcgncgcgncacctttnccaccttatnggatgncaccaccgagggccngtatgancngcttggccganccagtcnggncanaacatncctatcaccatt

SEQ ID NO: 99148 - DNA, 399 bp, Oryza sativa
  Clone ID: PAT_MRT4530_96988C.1
atggtggatacggctgcggtggtggcgggttggcggcagccaccagcggatccggcagtggtggcggcggatctagcagcgtcagccacagccacgagtagatctagcggcggcggccgcgggtggatcgggcgacggtggcagctgctgagggcagatccggtggcagtccgcggcacggtggcggtggcggcgtcggcgtcgtccgcgttggatccgttaattatggcggcaaccgtgggcggatccggcagcggcggctccctcctccgccttttttctctttctggtggcggtggtagcgtcggcggtggctacggatggatggtggtggccgcgaatggatgcggtggcgacggccgagggcggatccggcggcaggcgagtgaagttttgtga

SEQ ID NO: 99149 - DNA, 1276 bp, Oryza sativa
  Clone ID: PAT_MRT4530_96989C.1
cgatggcaaccatgcctgctcctgctcctgcagcgacatgcttcgtctttgccgcgtcgggcgtcgatcaggtgcagggcattctctacgccgatcatcaagaacgtgcggtgcgtcgtcgctgatcccctgaagctactgctgcgtccggggaacccacagccgcctccgctcgcccagccgcgcccgccacccgcacccaacgatgcccgagagccgccggctccgcatcccacgccgccgccgcctccgcatcccacggcgccgcccacccccagctcgcctcccccctcctccctcctctcctcgagccgccgacaggtgggccccacctatcggggccatctcctacctccagccgcccccaaccgcgccatgcggcgcctttgccgccccacgtcgcccccaattccggtctctcccgctcgcgccctcgcgcccaaacacgtgggatcggttcccctccacctcctccaccaaatcccccacttttccccagtttttggcaccaaatcgagcccccactctgcccacgttgagctccacgtcaccggccgttgccgctccaaattcgccactacccggcctcccccgcgaccacctccatcggcctcatcgtctcgaggccaagcccggcctccaccccatttcccccttccaccaccgaaaccttgccctcctaacctcattgccgccatccccaggttgtggccatccgtgtccgcagctccgtgtttgccggctgccaccggaccgtcgccgtcaccgccaacctgcaagggcgccaccgccgcccatcgtccctcgcccttttggcgctcagtgagaattccctacccctcctttttccccctctgccacttccccctcggccgtcgccaccgcatccattcgcggccaccaccatccatccgtagccaccgccgacgctaccaccgccaccagaaagagaaaaaaggcggaggagggagccgccgctgccggatccgcccacggttgccgccataattaacggatccaacgcggacgacgccgacgccgccaccgccactggatcagccgcgggaggaaagcgggatggggtggagggagccgctgccgctagatccgcccgcggctgccgccggcgccaccagatccacccgtgccgcggactgccaccggatctgccctcagcagctgccaccgtcgcccgatccacccgcggccgccgccgctagatctactcgtggctgtggctgacgctgctagatctgccacaggagggagacaagag

SEQ ID NO: 99150 - DNA, 300 bp, Oryza sativa
  Clone ID: PAT_MRT4530_9698C.1
gcagttcaggacggcaggtctggctccgtgtgatgacccctcctgggctgccctctctctccctcgtggcagctggctccaggattggtgatcatcctccagggtttgtttacctaagcacctccgtagcggcttcgactccttggtactcctagtttcctggcagctatagaaggaacgaaactttagggttttcgactctgcgctcgcttcagtcgcaatggttctggagtccatccgcttggagggccagttgtggtctttagccggcgttgcttttttggggatttattgggagtg

SEQ ID NO: 99151 - DNA, 609 bp, Oryza sativa
  Clone ID: PAT_MRT4530_96990C.1
atggcggcaaccgtgggcggatccggcagcggcggctccctcctccgcctctcttctctctctggtggcggtggtagcgtcggcggtggctacggatggatgccacgtgacggccacggcgaacaacgggctgtggtggcaaaggcgtggcgccgaggtggcgccgatgcgggacgacaccagtgcggccacatggacggcctggattcatccacgcgcatgagcgggcggcccgggcacgggcgtgactcaagccgactcggccgagccatggttggcggtgacggcgacggtccggtggcagccggcaaacacggagctgcggacacggatggccacaacctggggatggcggcaatgagcgattggcgagggtggggggcggccgggcatcatcaaggccctgcgaagctggaggtggagatgtgctggccagacgcggcgtccattgccggcagcgagcggctcggagtgacaaaggcgaaggttgctcagttttgcggtggaggcaaggtttcggtggtggaagggggaaatggggtggaggccgggcttggcctcgagacgatgaggccgatggaggtggtcgcgtggcacgacgatggctag

SEQ ID NO: 99152 - DNA, 246 bp, Oryza sativa
  Clone ID: PAT_MRT4530_96991C.1
aggaaacggaaccagggcgcactcctggaacacgcgataggaaacaaacaaggattaaattttaaggggcggggggagctatggggaagcaactgggaagatgtttaggcaaaaatattaggggaaccatgggcaggggaaaccagggaccattgcccaaaaaggctttactcctggatgggggcctttttttcctcggactcgggcttgggggggggggggccctgaaactggtgggactcggag

SEQ ID NO: 99153 - DNA, 578 bp, Oryza sativa
  Clone ID: PAT_MRT4530_96992C.1
cacatttccaccccctcaccctccttttcacactcgccagcgtcaccctccatcctcagctcctcccctccccccacaaaactctcactctccccacctctccttcgatctgccccgtctcgcctccctcgccggcagtggctccctacatcccgtctcgcctccctcgccccctcctcctctccctctcacctccctcccatggtggatacggctgcggtggtggcgggttggcggcagccaccagcggatccggcagtggtggcggcgggtagatcgggcggcggatccctcccgcgccagatccggcggcggcggctccctccgcccctcttgtctccctcctgtggcagatctagcagcgtcagccacagccacgagtagatctagcggcggcggccgcgggtggatcgggcgacggtggcagctgctgagggcagatccggtggcagtccgcggcacgggtggatctggtggcgccggcggcagccgcgggcggatctagcggcagcggctccctccaccccatcccgcctttctcccgcggctgatccagtggcggtggcggcgtccgcgtc

SEQ ID NO: 99154 - DNA, 722 bp, Oryza sativa
  unsure (1)..(722): unsure at all n locations
  Clone ID: PAT_MRT4530_96993C.1
ggattaaggaactatatgtttggttaattggttatatatacaagtattgaatcagtttacaagcaaaggattcagaagaagtggaggttggatcatctgtttgtccccccaaatatgcatcaacgagaaaattctgtgctgtgaaatgcgcatgcagatctacgtatacgaagcctctgtctaaatccccaaaaaaaaaagaaaaattctctgcctcgatcgacggccggctagcctcgccggcgtcgtctcttcgtcgtcactccgcctgcgacttgcctctgaacggcttgaggatctggaacgagcagagcaggctggcgtccacgttcatcagcgcgccggcgttgttgaactcgccgcagtagttcggcgccgagaatatggtcaccagctgcctgtccgcgaagaactcgtagccgtcctccaccacctggtgagcgcggcagatgaggtcgaggtcgtgcttgttgaggaactcggtgaccttgtcggcgccgaaggtgaaggagacgccgcggtcgttctcgccccagccggagctctcgcggtcggggtcggaccagaggaggtcgcagaggaggccctggtcggggacgtcgacgggtcgggcgatctccctgatccggtcgaggctgtcgaggtccggcgagaggccgccgtgcatgcanaggatcttgtcgtcgatgacggcggcgacggggaggcagttgaagcagtcg

SEQ ID NO: 99155 - DNA, 1398 bp, Oryza sativa
  Clone ID: PAT_MRT4530_96994C.1
ccccttcctcctcctccggcgcgtccggtcaccgcctgcctcgtcgtcgccggcgctgatcggtttcgcccgcccgaccgcggcggagatcgaggtatgatggacgggaacgcggtggacgagctgatacggcggctgctcgacgggaagaaggtcaagccgtcgtcgtcggcgaagaaggtgcagctcagcgaggcggagatccggcagctctgcgtcaccggcaaggacatcttcctctcccagcccaacctcctcgagctcgaggcccccatcaacgtctgcggcgacatccacggccaattctccgacctgctccggctgttcgagttcggcgggctgccgccgacggcgaactacctgttcctcggcgactacgtggaccgcgggaagcagagcatcgagacgatctgcctcctgctggcatacaagatcaagtacccggacaacttcttcctgctgcgaggcaaccacgagtgcgcgtcgatcaaccgaatctacgggttctacgacgagtgcaagcgccggttcagcgtccgcctctggaagctcttcaccgactgcttcaactgcctccccgtcgccgccgtcatcgacgacaagatcctctgcatgcacggcggcctctcgccggacctcgacagcctcgaccggatcagggagatcgcccgacccgtcgacgtccccgaccagggcctcctctgcgacctcctctggtccgaccccgaccgcgagagctccggctggggcgagaacgaccgcggcgtctccttcaccttcggcgccgacaaggtcaccgagttcctcaacaagcacgacctcgacctcatctgccgcgctcaccaggcaagccgccatcgccatcgccacctcctcctcccgtgcgttgcgattttgcataatcgtctcaaccttgaagctcttcttgcgttcttgggggcaaatggacgaacaggtggtggaggacggctacgagttcttcgcggacaggcagctggtgaccatattctcggcgccgaactactgcggcgagttcaacaacgccggcgcgctgatgaacgtggacgccagcctgctctgctcgttccagatcctcaagccgttcagaggcaagtcgcaggcggagtgacgacgaagagacgacgccggcgaggctagccggccgtcgatcgaggcagagaatttttcttttttttttggggatttagacagaggcttcgtatacgtagatctgcatgcgcatttcacagcacagaattttctcgttgatgcatatttggggggacaaacagatgatccaacctccacttcttctgaatcctttgcttgtaaactgattcaatacttgtatatataaccaattaaccaaacatatagttccttaaaaaaaaaaaaaaa

SEQ ID NO: 99156 - DNA, 396 bp, Oryza sativa
  Clone ID: PAT_MRT4530_96995C.1
tcgtctgaactgaagcaggggaggggaggagaggagaggagagagcatcgcgttcaccgttgagagaagagaaggaagtaagacgagcgcaatgcgtagcgtcacggtgctcgttctgctcctcgcctgcgcggcagagcgcgccgccgtcggcgctgtcaccgacggactgctgccttacgagaacttccaagagggcccacgcaattgggaccttgtgaacgtcacggctgtgcgacggggcgatcgctatccgaccgtgggatatttaccgtgttcgtgcagcgcatcgagtctggcgacaagcaggagctcatggtcttgatggtgtcctactgcgtgacctccgtgcgcctccccacccatgcgaggattcgctaatgcgtcttatttacc

SEQ ID NO: 99157 - DNA, 386 bp, Oryza sativa
  unsure (1)..(386): unsure at all n locations
  Clone ID: PAT_MRT4530_96996C.1
cagcaagccaaggcggcgtccaacaacaacgaagacgttgcaactcctcctccggcaaaggtcaacctcnganctgtcgctcaaccgtcccccgcccgcccgcccgcgggcggcttgcctccgccaccgaattccaacaccacggaacagcggcggnacgcggccggcggccaacggcnaacggcgacggcccccnaaccggcnncgggtgttcacnttncaactactgccaaaaggaagttcttcngctcccaaggcgctgggcgggcaccaanaacgcgnancggnnggacccacgctggcccggccgccgtncgggntcaatncgtttcccctangggtacgccgacntggcctccctgnngctgtacggngccggcctgtac

SEQ ID NO: 99158 - DNA, 1629 bp, Oryza sativa
  Clone ID: PAT_MRT4530_96997C.1
atggacgtgttggacactctcgtggttaggtttcatatgaatggggtttttctgttagatgggagtgagaagaagtattgcggtggatctgaggctttgtcatatgtagatagggataagatttccttgtcggagttatttggacacctgaaggagcattgcaatatgttgtcagggacaatgctccactggttgtttcctggtagggatttgcaaacaggtctaagggctctttgtgatgataaggcttgcaaattgatgtgtgattgtactggagaattggaggtggcagatattctgatgatgagagtgatttatgaggtagagatggaattggaagttgagagtgaagaagatggggaaaaaggggatgtacatgtagatgcatctaaagggaaagaagttgacaagggtaaagcaatagcagaggaggaaactgataggaggatagttttgtaccaatctgaatcagcacctctagttagccatcaaccttttagcagtgctcccaaagctagccatgaaccttcagacagttcacccattccaaatcagccaacatatgacactgaacccatagctaacgatccaccttctgatagtgatgaagatagtgactatattccaggggatgaagctcagtcagatgatgatgaagaggctgctgagatagagaaacattacaagaaggtcaagaggaaggtgaaggcaggacagctagagaacctggatgacttctttctagagaggggacaaccaagtgtgcatggtggtgttgaagatgcagggaatgaaaccccttatgcaaacagcgatgaggaggactcagtagatgagattggtagtgatggggaggtgaggactaagagaagtaaggaaccaaggtacaagaagagtgaaggtgtgcctaagtttgaactagggatgaagttcaactgtaagaagcaattcaagaaggctattacaaaatatgctcttgcagagaagaaagtgattaactttattaaggatgatgggcaaagggtaagggccaagtgtgattggcataactgtccctgggtatgtttgctatccaaaaattctaggtccaacagttggcaaatagtaacatttgaaaatttgcatgcttgtccacctaggagggatagtaggctagttacctctgttagaatagcagagaagtatggaaacttcatagctgctaatccttcttggctacttgctcacatgaaagctattgtacaagaggaaatgtttgcagatgcttctgtggctaagttgaagagagcaaaatggcttgtgcaaaagaaaaagtttgaggctactaaggggcaataccagcagttgtataggtatcaactagagcttcttagaagcaaccctggtagcactgtggttatcaacagagagattggcatggttccaccagtctttaagagaatctacatatgcttggatgcattgaagaaaggtttcatagctggctgtaggaaagttgtgggactggatggatgttttttcaagagggcaaccaatggagagctgctgtgtgcaatgggcagagatgctaacaaccaaatgtaccctattgcttgggcagtggttgccaaagaaaacaatgaggaatga

SEQ ID NO: 99159 - DNA, 308 bp, Oryza sativa
  Clone ID: PAT_MRT4530_96998C.1
acaggcgtagatacggatccggctggagtatacgtacatacgtatacagtatatgaactgatagagtactgttatctattgatgtctccagctgcgtgacacgcccgtactcccggaacggcatgcatggaactgtctggctcctgcgtcacagtgctgaccgcggccggtgtacgttctgccttctgattatttattatgtttactagcttatttattgtgagccgtggatgattggctttcgagagtcagtgcacaggtgcttggaagccttggatcgcatttactctctaaaaaaaaaaaaaaaa

SEQ ID NO: 99160 - DNA, 546 bp, Oryza sativa
  Clone ID: PAT_MRT4530_96999C.1
atggcgtctctgatgcagcggccagctgccatgccagcggctacgtctacctccacggcaacgagacgaggtgtcccaaggggagccatgactgctgcgtcgccggcgagcgctacccgcggttcaggtgctcgccgccggtgtcgatcggccaggacgacgccggcgatcctgacgctgaaggtgttcgaccacggcgaggacgacggaggcgtccccacgtcctgcgacatgcgcttccaccggaacacggagctggtggtcgcgctgtcctccgggtggctgcgcctcggcggcggccgccgccgctgccaccggaggatccgcgtcttcgccgtcgccggcgcggcgagcggacgatcgtccgtggtcgccagggtggtggacgattgcgactccgtgaacgggtgccgcgaggaggacgggttcgcgccgccgtgccggaacaacgccgtcggcgggtcgccggtggtgtgggagaaagcttgggctcaacgcgagcgtgggagaattcgaggttgtgtggtcttgtctgaagaacgctaa

SEQ ID NO: 99161 - DNA, 475 bp, Oryza sativa
  Clone ID: PAT_MRT4530_9699C.1
aataaaaatatactgaaaaatactgatagatagcagaaacccaaaacttgaacagatcaatatcaacttcaaggtgactcagaggaaaaacgtatcaaattatcttgttcaggccggcattgaaattaaggatcacaatacgattcatggtttctgagcaactgccaaaaccattgcaaatactatagtttggggtggagtatacttagttgtgtacatgcctgcttgttctattgtccactcaaatcctatccacctgttgactatcgagtgtcttctttttacccgtgtgttgatgtttggtttgatgtgccatttcttttgttgatggcttgtgtccatttttcatcagttttgtattgtctctgctgcttttccctgcgcctatttatgtgattatgtttatttatagtggtgttgtttttatattttcctaggtttttgtttttttccctctcgcctgtttttttttttt

SEQ ID NO: 99162 - DNA, 399 bp, Oryza sativa
  Clone ID: PAT_MRT4530_969C.1
ggcgacggttaaaatttttaggaaacccaatttaaccccaactggggaatggcacagtgggggctttagtggaccacaaagcaaaaaaaagggatcccaggatgcgatccaaaaacctaaagagcccggaatgggccccccccaaaacttttaaaaaacaggtttaatagggaaaagatatattttaggttgggaactacgactaccccattcggggagattttacaaaacatggggggggacttggatcacaaaaaccagtggggccttgacccttagaagggggcccacagcctccggggggggggcccgcccttcctgaccaccggggggaacttgaaatccgactgggggaactgtttaggggcgcccccttggaaaatttaaaggggacaggcc

SEQ ID NO: 99163 - DNA, 327 bp, Oryza sativa
  Clone ID: PAT_MRT4530_96C.1
atggccggcgacgagatcgggagtggcgacggggtactgatcaacgacggcgacggctttccggcgatctttggtgaagaagagagatcaaaccaaggcaacaaccaacgggttcacggtgacggcaaccttccggcgggatttggcgcaaaagaactggcggccatggtagagatcaaccttgcggagcggagggaggtggcgtcactgatcgagaacggccggcgtgacgggaaaaggcggctgaagatggcggccggagttggagagagaaaacggcgccggatcgggaagaacaggggctctggacggctggctggaggttga

SEQ ID NO: 99164 - DNA, 1724 bp, Oryza sativa
  Clone ID: PAT_MRT4530_97000C.1
cccgggcggcaggtctcccccccgcccctctctcagcggctgcctgcctgcctgcctgcctgaacgaggaatcgctcatcgctgcatcactgccgcagacgccggcgtggtcgggatggggcggccgccgagcacggggggcccggcgttccggttcacccaggcggaggtggccgagatggaggcccgcctgcagcagctcaacaacgccatcccgcaccgctccgtcatccaggccctcgccgacaagttcacctcctcccccgcccgctccggcaaggtcgccgtccagcccaagcaggtgtggaactggttccagaaccggaggtactcgcaccgctccaggagctccaggggccccccgacgctgatgcagaccaagatgctgcccacggggtccgacgagcacaagtcgcctcccttcagggctatgccctctgcctctgcgcactccggctcgccctcagggaagggttctttggagagcggccaggttgaatttgaagcaaagtcggctagagatggcgcatggtatgatgttgctgccttcctgtctcatcggttgttcgaatctggtgatccagaagtacgagttcgcttttctggatttggagccgaggaagatgaatggataaatgtccgtaaatgtgtgcggcaacgttctcttccgtgtgaatcaactgaatgtgttgctgttcttcctggagacctcatactttgctttcaggaaggcaaagagcaggctctgtatttcgatgcttgtgtccttgatgctcaaaggcgtagacatgatgtacgagggtgtcgctgtagatttcttgttcgctacgatcatgatcactctgaggaaattgttccactgaggaaggtatgtcgccgaccagaaactgactacaggcttcagattctgcatgctgctagagcagcaggtatggctaaagaggctgtggttgatttggtgtcgcacaatgataagagctcagcggagcagaaacccccaaagcagcacaaaatgatggatgtgaacactgatgaggtaaccatggtttctaaccaagaccaagaagagccaacaggcaagcctgctgctaccttgccagcagcaccggtcaaaaccctgaatgattcagcttcagcttcagcttcagatgtccaaatgggcgaggcacaggctgctccaaaagttgaatcttctgatgaagtagaagacaagatgaaagagggatagttggttgcctttgctgagcattatgtttggctggcggctgcagtaaacagcatctggttaaatgcattggcatctgatcacctgttctcctgctaggctgctacacacatgttgtgacttccaacgcaggaatgtatgtcttcagtcttcacaacacatgttgtgacttgtgaagatttagtaattgcttaggaaccctctcaaaagggtaaatatgattgttaggaactttagctccaaacataaattgattgcataggaactttagctccgaagaaaatgtaatgtggttgcggtgggattgacttgattgctgtcacacaaattcggccgaggatccgtgttgaccacaaataggactggcctgccatgccacaactaggatctgtgtttaatatagcgtgccaaataggtgtgaatcggtgcctttgaaggttatcatcaattgttctgaaggtaaaatttctcaggagaaagtctaatatacattcttgtg

SEQ ID NO: 99165 - DNA, 1797 bp, Oryza sativa
  Clone ID: PAT_MRT4530_97001C.1
tcacgacacgaccagcttcaccctgtaggtccgggcgaacgcgctgtacacgacgaagttgagcgtgcacagcgccgccatgacccagaagaagtagtccatgtgtccttcgttgaggttgtccgatatccacccgggccgcccgtccacggcggtgaacgcgttcacgacggcgtagatgaatgagctcatgtagcttcccagcgccacggtgagcagcgccagggacgtgcacatgctcttcatggactccggcgcctcgctgtagaagaactccagctgcgcgatgtagcagaacacctccgcgccggccagcgcgaagtactgcggcatctgccacgcgatgctcagggactcgccgcgccccgccgcgtccagccgcatcatctccaccagcgccgcgacggccatcgcgaacgccatgagcagccgccccgcgcccatccgctgcagctgcgacggctcgccgttggccagggataagctgttgagcatgggcacgatcacggagctgtacatgagaacccatgccaggacgcagagcacctcgaaggacaccatcgacgcgggcgggatggtgaacgacatgatccgcatgttcatcgcggcgccctgctgcacgaacgtcgtgttcagctgcgcgtacgccgccgaaagcacgatactcgtcgcccatatcggcaatagccgcagcaggatcttgagctcctcgacctgcgtcaccgtgcagatcctccacgaggcatccgccgcgacgtcgttcgattcctcttccaagtcggactccatgaccaccgcggccttgtcaagaaagccgaactggtcggtgtgcgctatcttcgactggttgatcttgtcatggacttcgtagagaagagtagtgtccgcggggacacggagtcttgccttccggcacgcggcaaccacgacctgcgcgaggctcttgatcggcgtgcctgtgggcatgcggcgcttgtacatgggcgtggcgagcacgaagccgccgaaggcgagcgcgatgcaggccgtggcgatgccgaagccaagtccccagctaacgttctgctggatccacacgatgaaaaggcccgacacgatcatcccgaagtcgacgcagatgtagaaccagctgaagaaggacatcttgcgctcgcggtcggccgtgttgtcatcgtcgaactggtccgcgccgaacggcagcagcgccgcgcgcacaccgccgcttccgaacgccacgaggtagagcccgaggaaggcgatggtctgcgcgccaagaagtggctgctggcacgacgagcccaccacggtgcacagcgcggtggtcggcaggaacgccgagaaggtgaccagcatcataccaaggagatagaagacgagggagacgaggatggtgttgtagttgccccagaacgtgtcggcgatgatggcgccgaacaccggggtgaggtagctcgtcccgaaccacgtcgtgacattggacgcgctcgcgagattgctgccgtgcaggagagtctccaggtacaccaccaggttcgtggcaatgccgttaaatgctgtgctctccaagcactcgaatcctaggaccactgttggcgctttgctcctcgctttcttgtctagtataaatggcgcagtgaggctttcgtcctggaacctcgggctgcgaatcttcatctcttcatcctggggaatggtcctttccttcgtcgcgatcctccggaaagtcaaactcttatacagccgcggcgatggctgggccacgatgatttcgcccggacgcgtgggcggacgcgtggg

SEQ ID NO: 99166 - DNA, 384 bp, Oryza sativa
  Clone ID: PAT_MRT4530_97002C.1
tgtgtgcgcatagatgagaataaatatgggggttatttgaatggcccactagtttgagtactacggaaacgggagtgggtcgagagtaagccgggctttgactgttccagacgacgacgccgccgccgcgtggagaggaggaggaggtgaggagggcggtggcggagtgcccggatggaggtggtgggtcggagcgggtgctgcctgagccgggtggcgaatcggatgctgcaagggttcggtgccaacccgggggagcacgaggttttctggtgaggccgagctagtcaatgtgagtggccggcggttgtagacgtccgctgtgggaaaactttgctgtccccaggtttatcggcgtgctcgaccatctcattgtcgtgcaca

SEQ ID NO: 99167 - DNA, 1176 bp, Oryza sativa
  Clone ID: PAT_MRT4530_97003C.1
tccgttttttaaaagacatggcatctcaacaatactcctgattttctactactgattttcccttcgtcaagcgactccaaaacgtgccccatatctaatctgtctcgcacgcggccggcggcggaagagcagagcatcaggcgcgtgtggatagccggaggacatggccacccacttcacgctcaacaccggagcacgcatcccctcggtgggcctcggcacctacaaggccggcaccggcgtcgtcgccgacgtggtctccgccgccgtcaaggcagggtaccggcacatagactgcgcgccgctgtacaagaacgagcaggagattggtggtgctctgaagaagctcttcgatgatggggttgtcaagcgggaagacctcttcatcacctccaagatatggtgcagcgacctcgcacctgaagatgtcccactcgcaatggatagtacactgaaagatctgcagctggattacgttgatctgtatctgattcattggccgtttcagatcaagaaaggcacggagctcagtccagagaacttcgtcaagcctgacatacccagcacctggcgagcgatggagcagctgtacgattcaggcaaagctcgcgcgatcggcgtgagcaatttctcctccaagaagcttggcgatctgctctgcgtcgcccgcgtccctccggccgttgatcaggtcgagtgccacccgggctggcagcaggcgaagctcagagcgttctgccacaccagtggcgttcatctctctgcgtatgctccattgggcaggatgaagggcatcgccgttgattcggtgttgccatcggtagccgagatgctaggaagaactccggctcaggttgctctgcgctggggtcttcagcagggtcagagtgtgcttcccaagagcgtcagtgaggcgaggttgaaggagaacatggatctgtttggttggtctattcctgaggaactgtgtgccaagctctctgaaatcgaacaggttaagcaaatcagaggagatggatttgctcaccccgagagtgtctacaaaacctacgaggagctttttgatggagaaatctaaaagaatggaaatcacctatgtgaaacaaaatgtgccattactgtaaaagaacgatgaaaaataacaggcatttcacaacaaaaaaaaaaaaaaaaaaa

SEQ ID NO: 99168 - DNA, 604 bp, Oryza sativa
  Clone ID: PAT_MRT4530_97004C.1
acatattagtagtttatattttatcatgatttgtttattcagaaatttgagatgcatcattgtgaaatatgggatatgtatcctgcaatcaagataatggtaagataactgaatataaccttgtaagaatttggatgccatcacatatttgactggatagtttgtggcttccactagatatgcagcaaatggtagtatctataatgccccgcaatggagagtatacagggagtacttttagatgtaacgtgggtacattttgggcctgttcggctgctttgtaccgccgctgcactgccacagccggaagaaacaacacactgtgcttgttggctgcaccacagtgaaaataatggcagccgaacagagcctttatgagcggttatcctgctctacaaaaaaagaaaaactgttgctgtctagcttctactttctactaacagataatatcccccttgaatatccagaaggtgctaagctatgcagcaattaaaatttaaatgactgatttggaacccattaagctggaatcttctagaaactagctaattttctctgcagaccagtcagaattggctactttccaaactcaaaagttgtccag

SEQ ID NO: 99169 - DNA, 689 bp, Oryza sativa
  Clone ID: PAT_MRT4530_97005C.1
ccggccgggagaacagaagcatcacctcctctcttcttctcccatccccctctccgatcctctcgcccacctccagattcgaatcttgcgagcagtttatccccattggatttgatccagtgacgtcctaacaacccggctgctggtggtagtggagtttgagagcttgcttgtcctgaaatcacgccttcgtctcgggccgggtttggttggtttcttggttctcgagccaatggaggagagttcttgcagattggagtaaaaaagatcttactatgtactagtggtggctagtgagtgatctgggtttcgttcagtttgttttgtttcgcctccccccaatttggtgctttcggtgtctgtgcgaagcgtgttgggatgacgaaccgattggatttcttgtgagcgactactcctgattgtttcgttgttgattcgcttcatttcgttgattagagtggaaaaagggcttatcgttttttttttctgcggctatttgtgagcagttttttttttttgttctcctccatctagcctgtttgtttgtttgtttgtaattgcttcagaaggcggcgagtttgcttaatttttggtagaaaatttatcttcattggatctatagctgtagcgaagatttggattcttgagggagatttttttgtttcaattcttgttggatccggcgattt

SEQ ID NO: 99170 - DNA, 469 bp, Oryza sativa
  Clone ID: PAT_MRT4530_97006C.1
actttagtgaataaagtgaggtctagatttggagtgaatattttgtggggaagggaaagaacagggtactacaaatatttgacagcacaggtacataatgatattacggggcacggacatacatatagacacacaagggggcaggggatgactcacatgaatgcaagggacaggggacacatacgcagcacgaaacattatttagcatgcatgcatgcatatgcataaatatgcacgcaagggcgcataacggatgacacactggaggggggggccagagtgcagaggaaaagcttggacataacttagcctagttgcagacggcggaagagcagccgatggggcacatgcacttgccgacggtgtactagtaggcgacctccggagaaaactggaagaggttgttttgggcgtgaactatgacgacgccatagggggttcttggtataggcactggatattgggaggg

SEQ ID NO: 99171 - DNA, 409 bp, Oryza sativa
  Clone ID: PAT_MRT4530_97007C.1
agatcgaaaagcacggcctggtgatgatatttatatacgaagaggcagggctagctggtcttcacaagagcagccatggccttcttctgtgcctgatacagtacattacctcctacgggaccgcccgtaccgggcctggcctggatagtgcatcttacaagcgctgctctttttgtacttcctttgctacttgccatactaatgaacagcatcaaactgacgccaggcgcaggcgattagaatagcttatgcatgagcgacctgtggcgatattcgtttggggcggctcagcttaaggtagtactccacttcgcttgatcgaatgtaggcctaattggaggtcatgccttctgtgagactggctcgctggtgctcctaaaagagctgagcgagctagtagcctcccctg

SEQ ID NO: 99172 - DNA, 896 bp, Oryza sativa
  Clone ID: PAT_MRT4530_97008C.1
cgtcatagtaattttgggtccgtcaatcagaaaagcggcaccctccatatacacgcgcaattacatccgtacgacggccaaagcctactcgtgtacgccggacagataaaaaaaaatcaaagatcgattaacaaaccaatcgaacaatcatgtaagtattacaactacaccgaccgatagatcctaacaccgcgggttttttttttttttttttcccaaaatcagactttcatagttcgacacaaccaaatccaaatcggatgcacaacaccataaggcaaacacaataaccaaagattcacccaaataaaatcaacaaagggatccatgggagaactccaatccaccccaacaaaattagcattgcaacctaaagcaattgacaaatcccttcttacatatccatcttgacctctttcttcagcttcttcaggtccggcactagatcgatggcgactagcctggatagaagatgaacagcgctggaccacttgatgttgtggtcacaccgttgccgcctgcgcttgcaccttcctccattgccacttacaaccaccagatccggagaagttgaggtcgttgccagccttcacgctgccctccaccggtccaccccaacgccagcctccgccttgctagatccaccatcaccatggccactgctggtctgctgccgccttcttgtccccttcgccgtggtcgttgcgaaccggacgctcggggcgggaggatgagagggaatgctcgaggcggaggatgagaggtggaggaaaggagaggtagaggtagcgaaccggacgctactgcttgcctccttgctcggagtcagaggattcgagattgggatgaggagaagtgggtttggtggcggcttgggtcggtggggagtggggact

SEQ ID NO: 99173 - DNA, 168 bp, Oryza sativa
  Clone ID: PAT_MRT4530_97009C.1
atggcggcaatggtagccaacgccaaccaccagtcatcaacattggagggtggctatgtcttgttgttgaggaagtggatttgtagagtcaatggcctcgacaatatccaccactaccgctgcaagccctcaccaccatttgtcgtaacccgcatctctcctatctag

SEQ ID NO: 99174 - DNA, 679 bp, Oryza sativa
  Clone ID: PAT_MRT4530_9700C.1
ctttttatcattgcaataggaattgaagattaagaagctgaggtacaaactaacacaggacattaaacagcattacttttggacttcttccttttgtattcaaatgtaattgtcaacaaagattttgaatccatacaacagttttcctgagctaatcaaaacctcatacagtaaaatcttctagctaattgggatagatttatctgctgttttcctctcatatttctggaaactaggaatcaattgatgaactgccattgaaacacaaaaggtacaattccgggatagttagtccccaatgttcaccagaggcacctatgcaggatgtttcacttcattttctccctgatcagcaccagttcctttgcccgtcttgctctgcgccaacctgacaagtctttggtatcttcacctccaccccgctgaccctgtcttcattcggccacaggcgtcctgggggacgggaacatgcagtttgataaaagcaactgtaacaggtaagctcatattcagaatttcagagtccatctccatcatacgttgcccatctttcaatgacaacctgaaacttgttatcccttttcctgacctcaacaagtggtttcttgccatgaagtaacatgtccacactccttccagtccgatgagttacccagtagtgtcgctccctcatctcaat

SEQ ID NO: 99175 - DNA, 303 bp, Oryza sativa
  Clone ID: PAT_MRT4530_97010C.1
atggctctccccgaggggggtcgagcccgggggttgcggcggctgggtgggggtggcgactgggtcatggtgaacctcttccccatggccctcaggggccaagcgcggggttggcccatgaacctgctgccgcatcggttcactcctgggaggactcttgcagttttgagctccggcgttggggcgcaggttcatgggagcttgacctcgtttgttaagtggtcgcaggcttccctaaagggttcgaagcccagggtggggagccctcttcgagccaaaggtttgaaagctcgcgacgtgtaa

SEQ ID NO: 99176 - DNA, 125 bp, Oryza sativa
  Clone ID: PAT_MRT4530_97011C.1
gcgacaggtgcgggcacacgatcaaggactccccctcgccgtccaggaacacccgcgaccttacacgaccggtaggaggagaacggagcgtacatggaacccgcggagcagttgacggcggaaac

SEQ ID NO: 99177 - DNA, 1433 bp, Oryza sativa
  Clone ID: PAT_MRT4530_97012C.1
ttataagtctatgacaaatagggcccatatgtcagcctctgctacccttctcccttcaatatcacgccccatcggcccttccctccactgcggcgtctccatcgagccgcagtgcacgtgtcttcccttcctcttcggcttctttgccttcgcctttgtcttcatcttcgacgacgccggatgcaacggcagcagcggcacgggcgcaggcgctgttggcggaggttgcttgctacggggaggtcgcgtcaccggcagcttcagtgtcctcttgatgaggtagatgtcgggtgatgaagatggcttgtggccgagcatccagatcgggctatcgggcggcgacgcgggggcggtcgacggtggctcgacggcagtcgtcctcgctgctaggccgtgaggtagaatcggaaggggagcgcggaggcgagggagggcgctggtcaaggcggcggtggcggggaggcgggcgcgggggcggtcggcggaggctcgacggttgtcgtcctcaccgctgggcggtgaggtagaaccggaaggggagcgcggaggcaagggggggcgccggtcgaggcggtggtggcggcggagacggacgcgggggtggtcggcggaggctcgacggccgttgtcctcgctggaggtgatagggtactgggggaagagctccctaagcaagcgaacaaactcggaccggtgcagcacgctgccgatgcagaggtagcggccacgcgcgtcggggtgctcgtacaccagcgcgtgcgcgcgggcgacgtcgcgcacgtcgacgtacgcggcgacggcgttcgggtacgcactcttggtgcccctcatgtaggtggccaccctgtggacgctggcgttcagcgtcggctgcagcatctcccccacggtgacggccggcacgaccaccaacagattcacacctctcttcgacgcctcctccatcgccgtcctctcggccaacatcttcgcgtagcaataccagttcacacgcttgacgcccatgtccgcagcagcgttgatgacattcttggttccctcgatagcagctggcagaagttcagggtcatttgagactggcgatgccacgtggaaaacgccatcgcataaggcgaacgcagcacgaaggctgttgcggtcgagcacatcagctcggtagagggacaggccttctctagctccatccagaacatgcaaatgagcattcttgatgtccgcaggttctctcatggctcccctcacgaagtatccgcggtggaggagctccttcaccagccacgacccgatgaagccaccggcgccggtcacgcacaccatctgctcgctccggccggtgaccatcgtcgtcgatcggttcggccgcctgttctctgctctgccgtaactagtactagtaggctttgcttacagctgatatctgcttcgcatctctg

SEQ ID NO: 99178 - DNA, 639 bp, Oryza sativa
  Clone ID: PAT_MRT4530_97013C.1
atgaccaaaatacccttgatcttatctcatctctcatctctgtcttcctcctctccgtttggctcggcggcgcagttggggatagggatgacggcggcgcggctggggacggggacagcggctgcgcacccagggacagggaaggcggcggcgcagctggatggattccgccgttcccagcagcgccgccgagccgagcagccttccctaacccacgccggcgccgtccccgtccccagccgcgccagcgccgcccacctcatcgccgaccccatctccatcctcctcgacgacctcctccttgagtgcctcgccggtgtcccctatgccaccctcccgcggctccccaccacttcaaccacgctcgttgcctccgtcgcgcccacggcgagctccgcccctcattcctcaccctcttcgtcaggccgtcggggagcccccggtggcggccccgggggtggtgatgaggacgaggagccagcggccaccgactatgccatttttctatgcagctacgccccgtcgccgccgccgccgccgccgctacgctccaccaccggtgactggatgggaatcgatcccctttctcctttctcctgtaaagtcaacaaaatagccatgggcacatatgtcagagca

SEQ ID NO: 99179 - DNA, 339 bp, Oryza sativa
  Clone ID: PAT_MRT4530_97014C.1
atggggagataccccgcggcatggaactcgtcggaggagttctggccggagcagttcttggccagcagagaggcggtggactttcagggaaacaactaccagctcatcctgttcatcaccgaccgacggatcttccccgacatcaacttcgccgtgccggtgctggagacggcactggtcggactccttcacccgacgaacgagctgctgggcggcggcggcggcctgatgtggttgcagcggagctgctcccgcgcccgtcgcccgaggtccaccgcccaccgccgccaccgctccggcacccacccggccgccatcgccgctgctgccgccacctag

SEQ ID NO: 99180 - DNA, 1873 bp, Oryza sativa
  Clone ID: PAT_MRT4530_97015C.1
tttcatatctacatataagcacggctcatcactttgccatccaacaatgtgggcaatatagtatatatcgaggtgccacaaataaatggaaggtatccatgcagggacggtgacgatggcctgcagctggcttgttctcacggccgccatggctgtgctagcctcttggttgatccgtttggtttcactaaaatggaacagcagccacccatgcaaagctgatgaaggcagcaggctgccgccagggtcgaggggccttcctcttctcggcgagtcgctcgagttcttcacttcgagcacctctcttgagctgcccgtcttctttaagcgtcgtcttaataggtacggtccagttttcaggacgaacatggtcgggcaagacctgatcgtgtgtctcgatccggaggtgaacagcttcgtgttccagcaagaggaaaggctcttccagtgctggtaccctgattcgttcatgcggatcatcggcgccgacaacatcatcacgacgctcgggtcgtcgcacaagtacatcaggaatctgatccttcggttgttcggccctgaaaacctcaggcgtgcgatgctccaggacgtgcacagaacggctcaggccagcctgctctcctggctcgatcgaccgagcatcgaactcaaggatgcagtctcaagcatgatattcagcgtcacagccaagaagttaattagctatgactccttggcctcagatggaaagatgtggaaacaatttgatgctttcattcgaggtctactggcatttccaattggcattcctggcaccgcattctacaaatgtatgcaggggcgaaagaatatcatgaagatgctgaaagaattgattgatgagaggaaggaggcatcagggcgacggggaagcattgacttcattgatgtgctgctcgaggagctgaacgaggagaagcctttaatcagtgagaacgttgcgctggatttgatcttcttgctgctatttgccagcttcgagaccacggcatccgctataaccgcagtggtcagatttctaacggataatcccgaggcattgcaagaattagcagaggagcatgataacattcagaaaagaagggtcgacctgaactctgaaatcacatgggaggaatacaaatctatgaaatttacatctcatgttatacatgaagctttaaggcttgctaacattgctccagtgatgtttagaaaagccacagaggatgttcatataaaaggtttttttatcccaaaaggatctaaaattatgatttgtccttccacggttcacctaaaccctatgatttataaggatccaaatatattcaatccttggagatggaaggatactgctgaaccaaccggtggtgcctccaaggatttcatggcctttggagggggactgcgcttgtgtgttggtgcagatttcgctaagctgcagacggcgatcttcctccactgcttagtcaccaagtatagatggaaagcgatcaagggaggaacaatggtgcttggtccaggactacgattccctgaaggttttcacatccaacttttcccaaaaccttgaagtaccggggccagatacttctagcccctacacaatatatgtagctcagaagcaacgtttgagatctatattgttgatgattggtacttcgatgtaatttccattaattttctgctgttcccattagttcactgctgaatgagctatgcttattcttcactttgccataaatgttgtgtgatgtccaaatatcacaaataaatgtagatatgtttgagtcctcttaagtaaaaataatttgcgaataaaaaaaaactatagttcattatattcttcacctgtaaaaaaaaaaaaaaaaaa

SEQ ID NO: 99181 - DNA, 446 bp, Oryza sativa
  Clone ID: PAT_MRT4530_97016C.1
ttgtttttttttttttttgggtttttcatccaatggcaacatattctgtcactataaataagtaattaacgaacatgatacatgatacaaacatgctacaattgatgaaaggatcaacgtttaacatatcaacactaggaatttaaggtgaagaggaggctccaaattggggtttcaattacattgcaagcctttgtacacctgaacttgggcttttgggaatagaatcacttgctacacaagaagcataatggcatggaagaagaagaagaaaaaaaacagaatagacatgccaaatctaagattgcaaggtcccaaacaggggggcatgatcatctttaaatgatctgtcagctgaacctgcaagaactgcataccattcactgtgaagaacaattagctccccattttgatgctgttaaatgttggctcaccttgaacctcct

SEQ ID NO: 99182 - DNA, 611 bp, Oryza sativa
  Clone ID: PAT_MRT4530_97017C.1
gcgaaacaatccacccaagtctcgaagggaaatggggaaaagttaaatttggcatgacagatggctggaagggcaatcgcccaaggaattgactccatctctttttcagctcgtgacaaggaaaaataggacagtggcataggacaggagttacaagacaactgttggttgagactgatgaagaggatgaacacaaccacccaggtcagagagttcattcttctttggcacctaatccaacaggtacatctagaggagcaaacggataccatagtaacttggagatggatcccaattggcatctactcagcaaactcggcttaccggatccaattcctggggagcatacaggaggagaggttcaactacatctggaaagcaaagatggaaaaccaagtgaaaatttttcggttggctaatggtccaaaggaaaatcctaacctccgataagctccagctccagggttgggacaatagcccaatttgctccctttgtggagttgagccggagacagccagacacctcttcatggattgcccgttcgctagataggtatggagcaaaatttggtcaaaactaggccttcacgaagtcaacgacgtgattttag

SEQ ID NO: 99183 - DNA, 216 bp, Oryza sativa
  Clone ID: PAT_MRT4530_97018C.1
atggccaccgccggcgaccataggggcgcgggcgccgcctcccgccgaccgcgccgacgtggccatgtggccgccgagtggggcccggccgtcagccgcccgtgccctcgggtgcggctgacgcgtggcgcccacggtgccagctgcgactcggtcgaggtcggaggcgacccggacatcgcccttgggcacataaaaatcggtagttggaactag

SEQ ID NO: 99184 - DNA, 246 bp, Oryza sativa
  Clone ID: PAT_MRT4530_97019C.1
ggaaggtaaatgttcgtgaaaataggcacatatatgtatcgtgcaatgtcctattcgcttgtgcaaatgcaaataacatcagggggggaactgatcatcagctcacgagaacaaaggaagaaacaaaagttaataatgaaaaccatcaacagcccggacgagaattgcattactagagacacacattgccgccttcctataatctctccatgtatccaaatataaacccggtcatgcacaaaacat

SEQ ID NO: 99185 - DNA, 622 bp, Oryza sativa
  Clone ID: PAT_MRT4530_9701C.1
atgggtgcggccggggctgttgttgagatcagttcggacgacgaggcgattcctgttgctgccaagcgtcccaacgttcctcccgtgtcgtcttcacatcctctacctgaagactgcaacggagttgaggagggtttaggtgatcctgctgccttggtggaattcgtggcatctatgctggatgacaaaaggtctgcgcgtgatgtggctgctgctgatgatggggacgacgacgattgcgtgatgctagatggtgaccctgataaagcggtcctcgttgtcaatgagcagagacctgggcaaggtggcccagaggaagaactgcagatagtttcagagaaaggagagttgcacttcagaccgtacattgtcttcgtggtgatagcatgcagggatttccctcatccacgccatctatgtgttagcatgccattcacaagttctcatgcagatcattgtgccatgtgccactgttatgtttgcgactctcctgctccctgtgccttttggggcaaaggtacagagcctactgatcattgtcatgctacggacaagaatgcaaaatggacgaaaatgaggcagtcattgaagcgcaaaaacctgccatcatctaaccgtagag

SEQ ID NO: 99186 - DNA, 1302 bp, Oryza sativa
  Clone ID: PAT_MRT4530_97020C.1
atgtctgaagaagaagtcaatgccaagatcatggtcacagtggagaatttaacggagaaacaaaggcaacagatggagaagtcaatgccaagatcatggtcacagtcgcttcaggcccgtgtccatcctgctttcgatttcatgggggacttggacgtgacgcggatctcgtcgcgggctcttcctaatgacgtcgtgacacaacgggtgaaggacgtgctgatcagctctacctccgcagttgacgagccgcccgttcccctctgcgacaagccggcggctgacaaggccgctgccatcaacgttctgcctttgatggatgtcattggctcccttgccgatcaccatacctccccttccctcaaggagaaggctacgcaggaggttgccgctgtcgccgttggtcctgctgccgcttggggcaacgggttcaagagaaaaggatggcgtactcgagtggcggctccgaggacaccaacgatcccgacctgctccaaaatggaggctgctgaaggaggccgcgggcaagctacgatcccccagcacctagacgagacctcggtgaccactgttttgcacgagctggtaggtgcaacggaggtgatcccctcgaagcactcggccaaggtctgcgaggagatggcgaacgggatccacaccggcgcctgccacgtactcgcgtgcatgaagatcgccctccccgacgtcgatctcaaggaggtcttggcgaagggggcggccgatgatggacgcgaggacataatgtcgagcatagccgacctgggggagaccgtccctcccttttatgaaggatgtttggatgccgaggacgtccagcaccctgatgtcgcaacaaccgctttagctttgtcgtccgaggcacccgcttccgacgttgtcggggacatcgtcgggtttgaggacatgaatgttgtctctgacccgtcgagcttaggcgcggtttcgctcctccaagagaacttagacctcaagagcatgattgctgggcgagattgtcaagtcctttattggaagaagaagtttgaggtggcagagctcgagcggtccgtggtggtggtgaagaaggatcaagctatagaagcgctccgaggtcgcgaagtctggttgcattcgtacctcaagagctgctgcagtgctatggccgaggtctgccaccagctgaagattgatcacgcagagcccgaggagactacggcgggatatttatcttggattaggggtgtgtgccgccagctggaggacatcgggcagcggattgacaactgcctaaaggaggagtga

SEQ ID NO: 99187 - DNA, 663 bp, Oryza sativa
  unsure (1)..(663): unsure at all n locations
  Clone ID: PAT_MRT4530_97021C.1
ccctcctggccctttcggtcctccagttgtctgncttgttttctgcctgagcncacccatntttgtaattggcctgtntggtttcctccaggantccttgttggtgtcagattaagtctatggtgttgatgcctattcccccatccgtgagtactactcctactntgcagtcccccaaccggtgaagaagttgggcctttttctgcctctctctactatatccttgtagagcttcttatatgtatgaagtttggacatggctgtttcatgatcccatgcctacttggttgatcatcttttggagttcgtgggggtacactagtggttttcttgcttgcatggtcttggaggaatcncctgaaatatcagagaaagcggctataatggattaatttttcggaagattttcgactctggacccccttcaacttgtttcttcttcttcttgataggatgtacatatgtgatgggtgatgatgtaacttaaatgtgatgggtaattatgtcnactttaaatcctaggataaaccattttcagctacatttcnccttatgttttaccatagcccattgttgcctcgccaagagggatggctaatttcagattaataagtgaaatattaccatgacgtgattttgctccaaaaaaaaaaaaaaaaaaaa

SEQ ID NO: 99188 - DNA, 395 bp, Oryza sativa
  Clone ID: PAT_MRT4530_97022C.1
ggggaaaaaagacttgggaagcaaaaatatttttgcacacaaaaaccggacgaggttcggccgcaacacaattaaccaacagcagtttggatgcaagggcccgagatgcatcacaaggaacagtttgacacccccccagacgggacatgttcaaattcgtcccggggccaaattttatgggtcaacaacaaacattccaaacaatgggacgggtggaattttacaggggggggccaaacaaaacaaaacccttagcttgggccaggggaggaaccaaacctggcgggccctaaaaagaggagagggcccttttattattccataaaccccccccacccatttgtggagatagacagaaagattggatttggccaccagggaacaattttccaggg

SEQ ID NO: 99189 - DNA, 725 bp, Oryza sativa
  Clone ID: PAT_MRT4530_97023C.1
tttttcttttttcagtataatttgccttgccttgctcaatttcatgatgaaaacattccaggttttcatacaagaaatttaaaattaaaaaagaaaagaaagaaagaaagaagttgaagaagaaatctgaatccctaaatcatcatcatcatcatcatcatcagtcaccttgtgatgcatctcctagcaacaagaacaccacagggaggagcagtgagctccaggtcacagagcgccgacatcgagtaggtgtagtgccagaaccagagcttggcctggaccttgaacgtgcccctgatggtgtacaccaccctgttgctcctcacctggttcaccatcgccacggcgagctccggcggcagcgccacctggctggacaccatgtgcacgctgatgatctgcgactgcccccgccgctgcacgaacggcgccggcagcgcctgcgccgccatccgccggccgccgaagaagagctccacggcggccgaccggaacaccacgtccatcttctggttggggttggacacgttcgccgccaccgtcatgtcgccgttcacgtacggcgccggcgaggtcgagccgacgtagacggcgttcagggtggcgcccgcggcgtcgaacgacggcgcccggggcctcaccgccaggaacacgacgaggatcaccgcgccggcggcgatcaggaggaggctgaaggcgaagcacacgatcgccgcgcaccacat

SEQ ID NO: 99190 - DNA, 783 bp, Oryza sativa
  unsure (1)..(783): unsure at all n locations
  Clone ID: PAT_MRT4530_97024C.1
atgccaaaaacagagatgcgccattctcagtgcagattaagcattcagtctttcaaagctctaacgattctagatcacgaacatttcaaaccagtgaacaatagatttcggattcaatccggcatgatcagattaggaaacacatcgatcgatcagagtttttggacagggcgagctcaaaccttacgtcatcaggggcggcgcgttgtcgtcggagaagagctcggtagaagatcgacgcggcggaactcagcgcgaaggaggcaggtgaacgtggcgtcgggcgcagcgttcgtccgcgtgccgccggcgtgcagccggaccgatgggcaggcgagcggggtggcgacccgcggcggcgcgtccgcgggcggcagcagggccgtcgtggtcggcgaaggtgacgagcgcgtgcttgtcccagaggcccctccagcgccgggagatgaggctggtccgggcggcggctgcggcggtggagaggcggaggaggatgaggaggaggacgtcgtcggggagcgagctgagncggtcctcccctccaccgccgatcaccgcgtcgtcgtcgtcgccaccggaggtggaggagagcttcacgcgcttggtgggggagacctcgccgtcgctgacctgcgcgcgcgcggtcccggagacgagcacgtcgccgtcgacgtcgacgtggtccatggccgagggcggaggcgagcgcggtggcgtcgccgcgtctccgagagagaagaatggagacacggcagacgagcgagatcggaggccgttatataa

SEQ ID NO: 99191 - DNA, 591 bp, Oryza sativa
  unsure (1)..(591): unsure at all n locations
  Clone ID: PAT_MRT4530_97025C.1
atggaccacgtcgacgtcgacggcgacgtgctcgtctccgggaccgcgcgcgcgcaggtcagcgacggcgaggtctcccccaccaagcgcgtgaagctctcctccacctccggtggcgacgacgacgacgcggtgatcggcggtggaggggaggaccgnctcagctcgctccccgacgacgtcctcctcctcatcctcctccgcctctccaccgccgcagccgccgcccggaccagcctcatctcccggcgctggaggggcctctgggacaagcacgcgctcgtcaccttcgccgaccacgacggccctgctgccgcccgcggacgcgccgccgcggttgtcggctgctgctgttgtggccaacatttgcttgctgctgctgcatcccctgataatgttgctgctgcccaagatgcagctttgctgccgccgccttcatttgctgctactgcggccgccgctcaagccgaggtagcctgcagttctgaccgccaaaacacccactgcctgcccgtcgccgcccgccgccatcaaaatccattagctctttccttgccatggatgagaggatttgagatctatgattcatag

SEQ ID NO: 99192 - DNA, 402 bp, Oryza sativa
  Clone ID: PAT_MRT4530_97026C.1
atgtggcttgatgagaccaaattacccctgctcacccagttgctgctgcttcgtcaccacagcgacagagacatcccgacggagctcctggcgaccctcgcctgcagcgtccgcgaccagctccgctcggcgctcctctacctctgccgccttggctttcacgacggccgtgctctctgtcttcaggaccccatcctcgactgttcgacggcgaggaggcacccccagccgacgccgacgtgcgctgttcctaaaaacggaccggtgctcgcctgctcggactcacttggggcgcgggatggaggcagcgagccggccctcacactcaaagataaacaaataaaacagcggaagactacggaacagcagcagccacaggcactcgacggcggagcgaactag

SEQ ID NO: 99193 - DNA, 696 bp, Oryza sativa
  Clone ID: PAT_MRT4530_97027C.1
ctcggtgtcgacccatgcgttcgcccactctttcgttttgtttcacccttcttatttttttttttttttttttttttttttttttacttttttttctccccaccaaaaagggggaggtgaggaaaccccccacgcgaagaaggcgcccaacccaacaaaaaaaggggcgaccttattgtgaaaagaaccccccccctaccctttttagggaaaagcccaccccccccttaaaggaaaccactgggaaaggaacgccgccccaaaaaaaaaaaaaaaaccccccggaaaaacccccccgggggtaaaaaaaaaaggttttttctccaaaaaaaactcaaaccaaggggttttttattgggggggcccaaaactgtcttgaaaaaaaactttcaattaaattccccccaccgggggaaaaaaaatgaaaaaccccccccccccccttgaaatttttttgaaaaaaacggcaaaaaaaattttccccccaaaaaaataagggggggggtttttaatttaaaaaaaaccccccccccccgcaggaaaaaaacggccggagttgtttttccgggaggaaaaaaaaaaacggaaaattttttggaaaacaaggccctgtctttttttttgcccaaaaacccaaaaaggggagggggggggggtttaaataacaaaatttttcaaaaaaaacaaagggccccc

SEQ ID NO: 99194 - DNA, 244 bp, Oryza sativa
  Clone ID: PAT_MRT4530_97028C.1
aaaagggtcacagtccattcaatccgtctatttagtcataaatttctcaccagcaacatgtttaaatacgacagctactcttgtctgcgaatacaactgtagatggagtaggaattataattacggccaagagaagattttcaaggtctaaaatcatgaacatcttttcaggtagttcatctactttctcgtgaatgctacctgtaaggtttccacaaggattaatcccccgctttgattaaaa

SEQ ID NO: 99195 - DNA, 288 bp, Oryza sativa
  unsure (1)..(288): unsure at all n locations
  Clone ID: PAT_MRT4530_97029C.1
nggacgggncgtnctccggnttgcnatgccaccgcggcggcgactccagatcggcggcgaaccagtgatctccggcgagggcaggagaatgtcgagataaaggtggagtagtcgagtatcgcgtaaaanaaagagaaatctctccccgtctcgttgtctcctncgctcctcgngccgccgccaagacgagtcgcggggnagtggcggcgatcgnncagagcagtggagngnaggggatcctgggaggagtnaccggagggaatgcaagacccangtggtatgccacga

SEQ ID NO: 99196 - DNA, 318 bp, Oryza sativa
  Clone ID: PAT_MRT4530_9702C.1
atgcctcccctcgtggcgccggtggagcacaaggacgagccctgcaggcagcggcacgcggcggcggcggcggcggcgatgacagcggcggcggtggctaagccgcggcagcggtcggcgtcgttccacgggcgcggcgcggcggagcaacgacactcgttgttgaagcagcggccgcggacgcagcctgacctgctcgccgagcatgtggccgctgcacgtgatggcgcgcgccgagtggcgcgtggccgacctggtcgctgccgccatggagctctacgtccgggaggggcgccggccgctgctgccgtccgctga

SEQ ID NO: 99197 - DNA, 2199 bp, Oryza sativa
  Clone ID: PAT_MRT4530_97030C.1
atggccggagaacccgaaatggttgccaaaaggtgcccaagagctgacagtgactttctgggacaaaagagtgtgggtagggatgttgaaatttcttctgatgctattctattagaggctttaaaccagtattgggatgttaggaagcttacagtacaagtgactgtgagtgagggtggcatgccttgtacccaaattgtttcttgtgtggaggaagctagcacagtggttccactgagtgtggtcttacccacacaagaaagtcaggctaagaatgtgccaaccaaaaaacttagcaaggccaaagataaaggtagtgatcatgctattccaaatccagatccatggggtgagttcgatgaggttgagtatgtaggaatgagtgatgagaaggagaattataatgacttggtgtcagatgatgaggccaatgatccaaagtatactcctgaagatgatggtgatgaagagaatgatgaaccagtagatgatctagaagttaatgataataggggttgtgagcctctaatccatatagcagatgtagaaaatccaaggattgaagttggtgttacttttgaggatggactttgttttaagaggtgtatgaggcaatatgctgtcctgaaagaggttgaacttgcagttccctactatgaagccacaaggtacagggcctattgcaaggcaaagaggtgcagatggaggatccatgcttcaaggttgccagatggtcgaacttggcagataaagaagatgccatacaagcataggtgtgctagcacaagcaagctggagaataattgcatggccagtaactcttgggtgaaggacagagttatcaataagctcagagaagatccaacaataggggttgctcctctgaagaagactttagaggaaaaatattgtattaagttgtcatactatgtagattgggatggtaggcagatggctctagatgagatacttggtggatgggagcaaagcttcgaggctgtttacagttttaaagctgagattgagaagagatcccctagtagtatagttgagatagagtatgatgtggtaaatgacaagcacaggtttagtacgatgtttattgctatgaagccctgtatacacggctttttgaatgggtgcaggccatacctaggcattgattcaactgtgttaacaggcaagtggagagtgcagttggcatctgctattggtatagatggccacaactggatgttcccaatggcttatgcagtttttggatctgaaacaaaggagaactgggaatggtttatgaaaaggttccatggagaagtttttgagagaaacatgtggccagcttcaagatacaggctatccctgaggcttgaaggcaataaattgggaaatgtaatgaagcagctccatgacaaaagtaggaatctcaactacaatcgccacaagagtcagccatttgtaggtgaagtcagtggtgtaaatagagacttgactacttggaggcatacagtggacttgactaagcaagaatgtagctgcatggagtggcagctaacaggcctcccatgtaggcatgccatctctttcattggatctctgagagaagtgcagctggaaaactatgtcagcccctactattctgtggaaatgttcaagacagcttatgccaaaactgtgccaccaatgccagacaagagcctatgggagaaggtggatactagattcaagatgtggccaccaatactgaagagatcagctggtagacctaggacaaggaggttcattggagttgaagaaggggggtcaggaaagaaaagaaggagatacaacaggtgccatggctttggccacctacagaagacctgcaatgaaccagtgtatgatccagatgcccctcccccagccccacccaagcctaagagagtcagaaagaagaaaaacaatcctgaacatgtgcctaatgatgacaatacaactatccctgctgctgttaaacttggtgatctgggtgttgctgctagtgatcaagctgctgttggtgctgttgaagctgttgctggtgctgttcaggctttggctagtgatcaaccatctggaagccctagaccagttacgaggagcaaaagtgctctactgcactcctccctagttcattccagccccctgaaggccaacaagaagaagattgcaaagaagttgtaa

SEQ ID NO: 99198 - DNA, 1278 bp, Oryza sativa
  Clone ID: PAT_MRT4530_97031C.1
atgctcaacctcctcctcctcctcgtgctagccaccacctcatggtcaccggcggcgagcggccaggacacctcctccgccacggtgagcccgctgaacacgcactgcaacgcgaccgccggcaaccacacggccgtgggcagcgcgtacctctccaacctgcgcgccctcggaggcgcgctctccaggcgcgccctcgccaccggcttcgcgtcggggagctacggcgcggcgcccgacgaggtgcacggcctggtgctctgccggggcgacttcaccggcggcaactgcaccgacggcctcgcgtcggcgttccgcgacgccgcggcgcagttctgcccgggcgccgcggacgccaccgtctactacgaccagtacatgatccgctacaccaacgacggccgcctcctctccgaccccggcgacaacgagccgctctggtcgggcaagaacatgaacgaggtcgccggtgccgacgcggcggcgcggttcatggcgaaggccacggagctgatgaacaggacggccgacctcgccgccttcgggtcgtcgtcgtcgccgagccggtacgccacgggggagacgtggttcgacgagcagggggtgagcgtggtgtacgggctggtgcagtgcacgccggacctcaccggcgagcagtgccggagctgcctcgccggcatcatcgcgcagatgccgaagctgttcggcgacgcttcgtcacggccggtcggtgggaggatcctcggagtccggtgtaacctccgttacgagaaggatgtcttcttcaaggagaccagcaccactatcaagctcaacatgcccaaaaagttattgttgcagagggatctagtcatattggaaagggaaatcgtgagtgaaagcgatgaaagattttcactgttcaagttttctaagataaaagatgccacggacaatttctccagggaaaataagctaggagaaggtggatttggtcatgtttacaagggccgtttgactacgaaccaagacattgcagtgaaaagacttgccccaaattctgcacagggattcaaggagttcaaaaacgaaattaaactcatagcatgccttcagcataggaatcttgttaggctccttgggtgctgcatcaaaagcaaggagaggatattagtctatgaatatatgcctaatggaagcttggatggcctaattttcgattttggtattgctaggatttgcctctccagtgtgacagaatcaaatacgacaacagcaataggaacattttacttttaa

SEQ ID NO: 99199 - DNA, 292 bp, Oryza sativa
  unsure (1)..(292): unsure at all n locations
  Clone ID: PAT_MRT4530_97032C.1
agtatttntcggtgatataggaccgggggtacgcacagtagagggaagtcaccttcccatctggccacgtggccgcgcggctggctttcccccggtccctcgaggggcgatcaggtaacgctgaggtggccagggggnctcggggtgccatgtcacgctccttaggncctcagcatgcgctgccccgaggccctcgttcggccaggngagcggcgganaggagcgccgctcagcgttttcaatgcgcggcgtcccaatcgtttcacgctgcatttaatncggcggttggcgg

SEQ ID NO: 99200 - DNA, 2718 bp, Oryza sativa
  Clone ID: PAT_MRT4530_97033C.1
atggatagtacctttagaaagcttaaattagttctagctcttgttgggatcatcacctggattattggtacctgcaatgcaaaattcacccctgcagacaactatcttgtgaactgtggttccacggtcgatgcaactgttggtcagagggtctttgtagctgacaattcgcagtctattgtgttgacaacccctcagagtcagagcattgctgctagaaccacgctgaattcggtgtcgggtttcgacaatgccgagctgtttcaaaccgcaaggatattcactgcgccgtcgtcctactcattcaagatgagaagcagtggccggcattttgtccggctctacttcttccctttcttgtatcagagctatgatcttgcaagctcaaaattcaaggtgtcaacagaagatgttgttctcattgataatttccctcagccaagcaattccatctcagtggtcatggagtattctctgaacattacaagagacaggctaattctaacttttgtgccggaagggaacagtacatccttcgtcaacgccattgaagttgtgtcggttcctgatgatctaattactgattcggcgcaacttctgggtgttgggcagtatcttggactggcagcacagccattgcaaacattccacaggatcaatgtgggcgggccgaaggtcacagctgaaaatgatactctggctcgaacatggtttgctgatcagagcttcttcagaaatcccactgtcgctcaagcagttacttaccaagaaagactgaattacaaagatggatcagcaacgcaggatgatgcaccagacagtgtctacaatactgcgaggcggttggttgggcagaggaacgccagctccacgccaaacatgacatgggaattcaatgttgatggccgttcaagctacctgattcggttccatttctgcgacatagtgagcaaggcagcatttcagctctactttgatgtctatgtttataacttttcagcagcaaaagatcttgatctctccgccagagaatttggtacactggcggcgccattctacatggatattgtcttaccatcaagtgacccgtcaggtaacctcactgtcagcataggtccttccagcttgcctaatgcaacacctgatggaatcctgaatggcctggagatcatgaagatgaacttcagcagtggatctgtttacgttgtcaaaccgccatcagcagcgaaacaacaattgcccatcattttaggatctgttcttggaggcattggtgctgctatcattgtcgttgttctctgtgttgttttcagaagaaagaagaagatgaagaaaccgcagacgccattaacaagtcggccttcaagttcttggacaccactctctctcaatgctctcagcttccttagtacaggtacccggacaaccagccggaccacttatacatctggaactaacagcgacacaagctaccggattccttttgttgttctgcaagaggcaacaaaccacttcgatgagcagatggttattggagtcggaggatttgggaaggtctacaaagcagttctgcaggacagcaccaaagttgcagtgaagcgtggcaaccagaagtctcaccaagggattagggaattccggacggagatcgagctgctgtctgggctgcgacaccgccatctcgtgtcgctcattggttactgcgatgagcgcaatgagatgatcttggtgtatgagtacatggagaaaggcactctgaagggtcacctgtatggcggtgaccagcctccactcagctggaagaaaaggctggaaatctgcattggtgctgcaagagggctccactacctccacaccggtttcgcaaaatcgatcatccaccgtgacgtcaagtcagcaaacattctcctcgatgaaaatctcatggccaaggtctctgattttggcctctcaaaaacagggcctgaatttgatcagacacatgttagcaccgccgtgaaagggagtttcggctatcttgatcctgagtactacaggaggcagaagctgaccgacaagtcagacgtgtactcgttcggtgtggtcttgctagaggtgatctgcgcaaggccagtcatcgacccgacgcttccaagagacatgatcaaccttgcagagtgggctattaagtggcaaaagagaggagagcttgatcagatcatcgacaagaggatcgccgggacaatcaggccagaatcgctgaggaagtacggggagacggtggagaaatgcctcgcggagtacggcgtcgaacggcctacgatgggagatgtcctgtggaacctggagtttgtgctccagctgcaggaggcaggcccggacatgtccaacattgatagcatgaatcagatctctgaactcccttcaaatgcccagaggataagctccctggagatcagcactgcagatgaaagccgaacggccatggactactctcagatgtcaaccagtaatgccttctcacagctgatcaacacagaagggaggtgaatttggagtgaaattgtcctaagagtcactgcaaaaaaatgttgaacatgttcagttagggaaaatgagatgtttcttgctcagttgattgtctacactcttgtttgattttgcccagatatatataacaagccttcaattgcattgaatttttgttaaaaaaaaaaaaaaaaaaaaaaaaaaaaaaaa

SEQ ID NO: 99201 - DNA, 451 bp, Oryza sativa
  Clone ID: PAT_MRT4530_97034C.1
ccccgggctgcaggcgagtaatggctcttaaagtgtctgagattagttgtcagcaacagaatgggatactgtaaagagtgatattctgtttccctgcttgtttggttatggttaggtttagcaggttctttgaaatttaggtttgcttggatgaatcaattgggttaatgcgacaatcccgctcaccaattatgggaattttcattgatgattctataccggtttgtttgaaagaaaagaagaacattgaacgcagtcggggatggggggttctcatgcgtacctcctgcttgctcctttctatggtgacatggacatgaagggattggctagaccgatatagttcaggggagctatgcaattgatgtaataggaggcttggtgcaaatcatttatgcagcagtataaagaaaggggaaaaatatatatgcatataaggaaaacaaggaga

SEQ ID NO: 99202 - DNA, 311 bp, Oryza sativa
  Clone ID: PAT_MRT4530_97035C.1
ttttgggtttttcttttttttttattttcttttttgttgttaaagttctggaggtgggggcgggagccgcagagaaaccccgcaccgaggagctcaagcggctatgggcctacataaagaagcacaccctgcaggagcctggggacaaaaaggagatcgtgagtgatgagaagctgaaggtcctggttgagggacaagaacgaccagagaaaacggagggcgacaagatgatgaacacggactacgggaaaagaccggccccaaaagaggagacaagttagcctaaaaggctgaacaggagaacggagggg

SEQ ID NO: 99203 - DNA, 1857 bp, Oryza sativa
  Clone ID: PAT_MRT4530_97036C.1
atggaaaggtatagatttgtgcgatccgagaatgagggcaagcctgttggccttgcttgccacgaggcgtattcttgttcgattgctctgtataacttcgctctactgacgtggattcccttaccactgataacaccccgatttgtgactgagcaagaggtgaaatattccatcatcgcattcgtagaacataagatcaaagatcttgaaaaaggttggagctcaaatttcgattatctgtatgaggccgagaaagaatgcaaatgtcttgtgcatgctcttccaggtggacttcagatctgtccagctcttgacagcatcacatcgttcaagacaaatggtggacacaacttatttagtttgctggagatccgaatggtgcacggttggttagctaatcccgaggataacatctatgagacggtcaggtccttctcttgcgatgatctggagtcacacatttctgatgctctgaatgataattctgaagctgcacagaggaatagggatgcaagcaaaaggactactatacacttttatttgatgaacactgcaattcactcatttaatacattatcatctggactacacagatatcagtctttgtgccaaggattactgaaggatgaatatgctatcctttatcgggggagtgacaccttcaatcttattcgcgaggcggatgaggaaccaatttacttgaattgcaaatacattccacttaagaatcaaccccacatcgctaaagcaaaactatggtactatgagaagttgaattcaagaaatgaatatgctccaagaaatgtaacaaaggatgaagcttctattcagaagccaacaggaagtgagggaaaactctcaaatcaggaagcaatattgcaaacgaaacaggcttctgatgagacactgcactatagagttgttcagttcaagcatgagaacttgcttactagcattatttgccacaagggatattcactttggactgctctctataaccatttagttttgaatagagctctcgcagtgaaaccatcggaagtaaaactccaatttctgcctgagagagaggtgaaagacgcgatcattgcacatctcaaacttgtacttggtgagatagaaaaaagcgagaaatcaaaacatgaaaagctgtataactgtgagtttatctggaaatgtttcatacgttctacagcagatactcatcagatctatcctgttcttgacagcttcacatcattcaaggattcttttggacgtagcttaatttgtgtgctggggatcgaattggtgcatggttgggtagctaatcccgaggataacatctatgagacggtcaagtccttctcttctgatgacctggaatcacacatttcatcccttgatgctcggagtgataattctgaagctgcacagagggatagggatgcaagcaaaaatttgttggctgcaaggaatcagtttacaagttatggatatcagtctttatgccaaggattagggaaggatgaatatgctattctttaccggggcgatgacatattcaatcttattcgcgagaaagatggatccattttgatcctggaaacagacacagatatattagatgcttaccccaaagcaaggtggaggattctggaagaggtggacgaggaaccaatttacttgaattgcaattacattccacttaagaatcaaccccacatcgctaaagtaaaacgatggtacttggagatgaagtcaaagaagaaaattaatgaggcttcaagcaacgaaggtgctggtcagaagcagtgttatcgagacacgcgtgtcagtgtgtcgactcgtgtcaggcgtggcaagacacagctgtag

SEQ ID NO: 99204 - DNA, 916 bp, Oryza sativa
  Clone ID: PAT_MRT4530_97037C.1
aaaaaacaaaaaactgttttattttataatttttaggcccgaaaagtgaaaattaaacctaaagggtgaaattataaacccttttatggggaatgggagaactgaaaactgaacctttttggtttttttttttttgattgactataaaaatttactatactacgcatcgaacatatgtaagaatttacatcacagctttctatggctaaactaactgaagctttacatcgcaacagccaagctaaaattacttatagatgaatgattacaatataaaccgcttaatcaatccaagtacagactaacaaacgaagagaatcctttcccactaccaaactcgtgctctactccactgaattcctcttctccacagccgcaggcaatcctggccttcctgggaccaagcttgcatgatttctacaagaagtacgtcagctgctgcttcttcctggagccaccttctccgtataggtcgttccattgcttcagctcattcattacagcaccctcggtggcgaagctcgcagcaacttgattctttgcctgcctcaagtcttccatcgtcagtggcctgaggtcaattgtcccttcagttccaccttcagcctttgagttatcctgcttgttttctgttttctcttctttgttttctgaattctccttcctctccttctccttctccttactttctggattttctgaattctccttctcctttttactttcaggactttctgaattctctgccgtagccgccttctcttttgcctcgtttgcccttctttccatctccttctctcgttctctcttgaggagctccctaacagggcggtaagcagctgtcacacaaagcttcttaccgttgcctccaccgtcccctcgggccgtgttccgcgcgccgcctcgtccatatctt

SEQ ID NO: 99205 - DNA, 299 bp, Oryza sativa
  Clone ID: PAT_MRT4530_97038C.1
tgcttgtattcgaaaccccaacttatcgtgtgtattcattcctgtctgcaattcagattgctttatcttgttcttgcttgtttcttcgatttgcttgtaggaataaggttgatctgtaccggcaagatcagtaacccacggagaggtgtatcgatcgcaaaggcgcaacacaacgtcttgtacggttgtagtcggatcgtcaacatttctctcaaattgtagttatccacaactcaccgaaagatcggaccaaaaaactaccttaagtgtcttgtagaactcagggttcattgactgtt

SEQ ID NO: 99206 - DNA, 309 bp, Oryza sativa
  Clone ID: PAT_MRT4530_97039C.1
atgtgttcattttaacgcaaactgcaggtcgcatgttcttcgttgccaatacgttgcttcacgtgggattaacacaagtttcccaggtgcaggcttactttggctagttgctgtgaacttggtgctttcgatgccggggggggggtccgataacgatagggttctctgagcgtaggctacctacgaaccgtgagtggtcgaggaacaacacgtgcttgaggcccagactcccaagctggtccttgaaatcccacacgggcggattatgggacttgagacgctttctagtcgtggctatgccgccccggg

SEQ ID NO: 99207 - DNA, 1353 bp, Oryza sativa
  Clone ID: PAT_MRT4530_9703C.1
ttatgatagatctggtgcaaatgcaggtacgctgctggcagagccaactggttcttgtagagcaaggttcagtggaaacatctcacattgagcaatgtgcgccatcagctggtccatgaggactaatgcggccatggactccaccatcggcacagcgcgagggacaacacatgggtcgtggcggccccttgctaaaagttcaacatcctcatgctcccttgaaacagtatgttgtttcttcccaatagtcgcggttggcttgaaagctactttgaagtatataatttcaccatttgatatccctccatttccagcctcatccatatagaactcatcattatgctcacttccagtgtagtcagtacctgcaaatccactgccgatctcaaaccccttgcttgcaggaagagaaagcatagctttcgccaattcagcctcaagtttgtcaaatacaggagagccaatcccacgaggaacatttcttgcaatgcatgtgaccacaccaccaatcgaatcacctctaactcgtactttatcgattgcatcaatcatcttctgtgcatattctggatcaggacatctaacaatgttgctttctatctgttccattgttacagtgtcataatcaacggcatcttctggtagtacaacttgatgcaccttggacacaaacgccaagatctctactccagatttgagcttaagaattttctttgcaagagctcctgcagccacccttccaatggtctctcttgctgatgatcttccacctccctgcactgctctaacaccgtatttgaagtcataagttgcatctgcatgtgaaggtctgtaggccttagccatttcactgtaatcaccccctctctgatctgtgttcgggacaaaaacatgaattggtgtcccagtggtcattccttcatgtgtccctgaaagaattttgcaagtgtcagtctcctttcttggggtggttattctgctctggcctggccgtctccggtcgagttctacttgcatatctgcttcagtaagtgggattctgggtgggcatccactgattacgcaaccaacaccgcctccatgagactctccataagttgcaacctggaagtagttcccaaatacatttgcagacgccttcacctctaggcgagcggcgcggcggcggccgacggagaagcggagggaagccggggcggactccgggaaggcgcggaacccgccgccgccgccgcgggggaggacgcgcgccaccggctgcgacgacgttggcgcggccatcggagcgaggttgttggtttggttggtgagagccgaagcgaggccgacgcggggcgacccggaattccggcc

SEQ ID NO: 99208 - DNA, 434 bp, Oryza sativa
  Clone ID: PAT_MRT4530_97040C.1
atacctgttgttgtactctatagtttgttggagaaattactccattgcaaatgttatgggctctgttccatttaatgtttcttttaggataacattagtaggacaaattttggtcaattggcataacttatgtgctttaattgtgcaaatacaaatcagaagaaaaagacatttttaaatggaattttcatcaaaatggtcaactcattgttccatttatgtacttagccttaattaataatgtttatgttgagaggaataagattatttggaaacttaagatacctcttaagatcaagatttttatgtggtatttgtttaaagatgtggtgttaataaaagataatttggttaggaggaattggcatggaagtatgaggtgttctttttttatgaaaaatgagacgatacatcatttgtttgtggattgccat

SEQ ID NO: 99209 - DNA, 244 bp, Oryza sativa
  Clone ID: PAT_MRT4530_97041C.1
tcaaatcctggtgctgctgctggtgccacagccggagctgtttctcttgatgcattgcgacaacctgcacaggtccaagcgctggttgcattggtccaggctaattcccaaatcttgccgccaatgcttgaagagcttgggaagcacaatccggaaatcttgcggttgattgaggaaaatcaagatgaatttctccggctggtgaatgaatctcctgatagcggcgctattgggggaaacatac

SEQ ID NO: 99210 - DNA, 455 bp, Oryza sativa
  Clone ID: PAT_MRT4530_97042C.1
atggtcaagaagaactgggacgacgatcctcactgtgacatatgcccagcaatagaaactgcaggccatattattccaagatgcaaggcagccacaactttatgggagaaactaggtctccgagacctagctaattcctcgcagtcagcagcaattttcttagaaacaatctgggacagctacaacagcattcagggtatacaagaaatctgtcgcctacccgccctctgggagggcgattcagagggcggcgaaaatgacgtggcagacggccgttcgctctcgggcgacggccgtcaacgaaatttgcaggcggaccccttgccgccctccgcggagggcgattttgtactggggcggggggcccgcctgcaaatgggcttcgagggggggcatggattttttgcaggcggcatccatgttcccctggggttgggccgtgtggcctcttttct

SEQ ID NO: 99211 - DNA, 1155 bp, Oryza sativa
  Clone ID: PAT_MRT4530_97043C.1
atggcgtcgagcagcagcagcagcagcgacgatctcgccgcgagcaccatcgacctcgcgctcgaggagaagatcgccgccaacgcgctcggcggcggcaatggcggcgcggaggaggaggcggcggcgtgggagatcgacctgtcgaagctgagcatccgctccgtcgtggcgcaggggtaccacggcacgctgttccgggcggactacggcggccacgacgtcgccgtgaaggtgctcgactggagggaggacggctactcgacgccggagcagatcgcccacctgcgcgcgtcgctcgccgacctcgccgccgtctggcactcgttcgagcaccccaacgtggcgcgcttcttcggcgcgtccatgggcaccaccgacctcaacatcccggccgccgcctccgccgccggcggcggcgagcagcgcaacaccggcgagaagccgccggcggacagggcgtgctgcgtggtggtcgagttcctcggcggcgggacgctcaagaagtacctgatcgaacactaccggagcaagctcccctacggcgaggtcgtccgcctcgcgctgtccatggcgcgcggcctcagcttcctccacgccaacaatatcgtccaccgcgacgtcaagacggagaacatgctcttcctcggcggcggcggcggcggcgacctcaagatcgccgacttcggcgtggcccgcgtggaggcgcgcgacccgagggagatgaccggcgcgacgggcacggtggggtacatggcgccggaggtgctcgtcgggaagccgtacaaccgcaagtgcgacgtgtacagcttcggcatctgcctgtgggagacgtactgctgcgagatgcccttcacgttcgggctcagcgtcgcggaggcgtcggcggcggtggcgcagcgggggatgcggccgccgatcccgccgtgctgcccgcccgccatggcgcgcgtcatggcgaggtgctgggacgccgacccggcggcgcggccggagatggaggaggtggtgcggatgctggaggcgctcgacacgagcaatggcggcgggatggtggcgccggggaagatgaagaagaagaagaagacgacgaagaagaagaagaacgaggaggagaagatgccagggtgcttctgcttcttcggtcgctcgtag

SEQ ID NO: 99212 - DNA, 1511 bp, Oryza sativa
  Clone ID: PAT_MRT4530_97044C.1
tttgcaacaatcatctctgaaacacgtacaaattgaacagctagcctccaaatcctccctccatggccaacgcagccaaccaacacacctgcgatggccctcaaccgtcagcaccaacgcacttccttattgtagcctacggcatccaaagccacatcaaccctgcacaaaaccttgcccaccgtctcgctagcattgacgcctcctcagtcatgtgcactctctccatccacgcttctgctcaccgccgcatgttctcgtcgctgatcgcctcccctgacgaggagaccaccgacggtattatctcctatgttcctttctctgacggctttgacgacatatccaaactgagcatactttctggcgacgagagggcacgtagccgctgcacaagctttgaaagcctctcagcaattgtctctcagctcgccgctcgtggtcggcccgtcacatgcatcgtgtgcaccatggcgatgcctccggtgctcgatgtcgcacgaaagaatggcatcccgctagtcgtgttctggaaccagccggccaccgtgcttgcagcttactatcactactaccacggctacagagagctctttgcatcacatgcctctgacccatcgtatgaagtggtcttacctggaatgcaacctctttgcatccgtagcttaccatccttccttgttgatgtgacaaacgacaagctgtccagttttgttgttgaaggctttcaagagttgtttgagttcatggatagagagaagccaaaggttcttgtgaacacattgaatgttttggaggctgccacgctcacagccgtgcagccgtacttccaagaggtgtttaccattggccacttagtggctgggtcagccaaagaaagaatccacatgttccagcgggataagaagaactacatggagtggcttgatacacattcagagaggtctgttgtttacatatcatttgggagcatactcacatatagcaagcgacaggtagacgagatattacacggcatgcaggagtgtgagtggccatttttgtgggtggtgcgtaaggatgggcgtgaagaagatttgagctatttggtggataacattgatgaccatcacaatgggatggtgatcgaatggtgtgaccaactagatgtgttgtcccatccctccgtgggatgctttgtcacacaatgcgggtggaactcgactttagaagccttggaacttggtgtgcccatggttgctgtgccgaattggtcagaccagcccacaattgcatatcttgtggagaaggaatggatggttggcactagagtgtatcgcaatgacgaaggagtaatagtggggacagagttggcaaagagtgtcaagattgtcatgggagacaatgaggtagcaacaaagataagagagagagtaaattctttcaaacataagatccatgaggaggcaataagaggtgaaacaggtcagaggagtctccaaatatttgccaagacaataatagaatcagattaa

SEQ ID NO: 99213 - DNA, 2933 bp, Oryza sativa
  Clone ID: PAT_MRT4530_97045C.1
tgctagacagcaaatcttggactaggcttgcagtgtggcaccttagggtttttctatttagaaaaggcttagccggccatttccagaccactcaacatgtaatgagtgtacgcgtgttagagtttaaataatcacttacaaaaacaaataattttaaaaataataactgcttttgcagcggacacgtggtgctcgacacgcgtcttgtatttgtgagctacgaattcgagttggatgactcagaatttacacagcaatctggacatagtagtgacgttaatgttattaaagtcattaataatactgcttcgcagaatgttgaatttttggatcatgctggattttataaagtagatccttcaggtgaattagatgacacatttaaacttcaagatagtgatgatttaccactgaatgagttttttaaaagacctatacaaattgctggttttggatggggtgttggaactccattcgctctcacttttgatccatggtcgtcttattttaataatccccgtgtagttaataggatttctaactacaaattattgagagctaagctgcatgtaaagtttattttgaatggtaatgctttttattatggacgtattatggcgtcttatcatccagcaaagtctttagactcttttggtaatagtcctcttgtgtctgaggatgctgtgattgagtcgcagagaccacatgttttcttggatccaactaacagtcagggtggagacatgattttgcctttttattggcgccataattatatggatatagtaaatgccgattggggtagtatgggtcagatcgatatgagatctttacctattttacgaagtgtgaatggatcaaatgaaactatttccattattgcgtatgcgtggtgtgaagatattgagttctctggtattacacagtttgagcctgcaacaatcgtgcctcagtcaggttccgagattgacgaagctaatgctaaaggatttatttccaaaccagctacagctattgctagttttgcaggtaagcttgaaaatgtaccagtgataggtaagtatgctaccgctactgctactatagcaggagcgacagctgatgttgctaggaattttggatattgtcgtccacctgtgacggagaatgcagctccccgtagaccgacggttgtttctaacatggcattaaccaacacgccagataatgttgaaaaattaaccactgatgataagcaagagcttagtatagatccaagtattatgaatttaccaggagtagattgtttcaatataaaggaaattgcaaagaaggagagttatttaactacattccaatggtccgatggaggatttggatttttatggaattcacgtgtttccccgatgttgtggcgagctgtggcaggacctcctgcccaagcatggtttcctgcttgtgcgtatgccgtcatgccgtttgagaattggtcgggatcaatgaagtttagatttcaagttgtgtgttctagttttcataaagggcgtttgcgtattgtgtttgatccaacaggtgctcaaacaaatcctgagttgaatgtcgcgtattctcacgttattgatatttcagatactcaagattttaccatagaggttcctcatatgcaaacacgaactttgttaactagggctgaaccgccatttacactggttaccacacaatacggcactactttgttgccaccgttgtccactggtaatggaactattgctgtttatggtgagactattctcgccactcctaatagcacagtggatgcaccagttgatattaatgtttttatatcgatgggagatgattttgaagtatataatccaggtaatggatttcaatattatggttttgttccccaatctggaacggagttacacccagtttcaaacacgaccgaggagctaaatgctccattaaaggatgagtctttaatgattgggggcaaacatgtcgtgaatgataagattccattagtgtatatgggcgagtctataaaatcctttagaacattgttgaagaggtataatatgcatagacgtgatatgttttcaaatactgttggagttaaggcttatcacggcatacgaccgcagtttcctccattgcgtggccaatatgggggtgctgaggatttgactgcagcaagtgatccttatatgtatgttaaccagttacttttgcactgggttcgacacgcatttcaaggtcacagagggtccatacggtataagttgttggttgggcagtatgatgcgagttacaaccatatgactggggtagtgatgcgtagacggtttgatcaggataatagttggtctgatactaggttggatgtcgcattgaatacatctcaatcagttatggcacgtacatggatagctgaaggcccgttagattatcctgatggaccgaacggtgccgtctattttaattcgagagtaaatcctactgttgaatttgaagtgccttgggaaaatgacgctcgttgttattttgcccgtaacaccaactacaattctacaaatggaactgcccgttcgcaacccgggtacaaatttgcgttgcagggtaactcgagtgattatgatcatttagagacttgggttgccgctggagaggatttccaatgttatttctttattggattacctcgctgttttcagtatttgtcgccacctgcggcagcaccttaagaaatcgtctatcagacgttaaatgaaccatactgtagccgtatgggtgcgcattgcgtgaattggctacgccgtatctgttgtaattacagttttctcggcgtagccgagtttttatggagttacaattttaattagcgtagtcaacattgaagagagctgaagttttgtacaagctctcacgtttggcttcttgtgcaaaaaaaa

SEQ ID NO: 99214 - DNA, 638 bp, Oryza sativa
  Clone ID: PAT_MRT4530_97046C.1
atcgaacgactcctaagtctctaacatctgcggtgcccttactgtctcgctcatctcccagtttctctttatttaggatgcggtgcttcacgtacaactctcgccagggggtcgaggatcgtctcgtttggcgatggatgtctgaccagcgctgctcagcgcattcggcgtaccaggcattcttctatggcctccattcttttgcctgtactaatcttctctgacacacaaaggatcctgctaaatgcaggttcttcctttagtttgcattccagcagtgctgctggacggctgatctcctccagaaacgtggtatcgatagtcactcggcttgccccttttgtactcaggatcttgagacagtgaaccacattctccttgattgcgtgttcgctcggcaagtctggttatggttccaggactggtggccatcctccagagcttgcttacctgagcatctctgtgccggcttcgaccccctggtgctcctggtctcttagcagttatggaaggaacggaactctagggtttttgactccgtgctctcttccgtcacagtggttctgtagtccatccgttctgagggccatctgtggtctttagctggcgttgccgcttttggggacttgttgagagtg

SEQ ID NO: 99215 - DNA, 183 bp, Oryza sativa
  Clone ID: PAT_MRT4530_97047C.1
atgacgatgctcggctccggaagggtgatgacatttctcagcccctcgctggtgaccaagcatgtgcggcacccggcctcgatcttcgccggtggccaagatgggtcgcacacatattttaattctaatgcacctaagtgccacatcaacgccacgtggaacgaagaccaggtaacctcatag

SEQ ID NO: 99216 - DNA, 649 bp, Oryza sativa
  Clone ID: PAT_MRT4530_97048C.1
gttactgtagtttagaagttaggggccaacctgttgtgccctggcatgcaaagttccatccacgtctgaacattgcatcgtatgataatgctattggcgttccccagtgatctgagagattgaaatcagatatttttgttgagctggtagtactttcagcgttggtcatttcagcattgcacgatttttaacatatcactatatcagatgctccgtctcaatgtatcgggtggtttgtgcagcatttcagttaagtcagtgttgcaaatggttatcaggcgacaaagataaaaggagatgatcacttgcagtaaacatatggcatgcagcagcggagcagtagctgggagctgtgtattcgccgacggagaaattcacgtcggcattggtagcacaaatctgagtttacaatgtgtttggaaaaatggaaagtgaatcccaagttgtgtgttctcaatgaaagcctgatttatgaacgatacagacatggcatccgtttttcaggactgtttggtcccagtgttatttgcctggttctcatggctattttactttcgcttaaaaacataataattgtaaactgaatttcaatttgaagatctgcacagacctattcttggtgctttgtttttagcacaattgttttcac

SEQ ID NO: 99217 - DNA, 1216 bp, Oryza sativa
  Clone ID: PAT_MRT4530_97049C.1
cgcccgtacccgtcgcgtccacctctccagtccagtccgccaccgcgccaccatgaggatcgacgcggcgatcctcgccgccgtcgtcgccttcctcctccccctccgccttctctccctcctcgcccgcctcagcctcaccggcagcgccggcgacctccgccgtccctgcgcggccttcgcgctctccgccgcgctcctcgccgccatcttcgccctcccgcgcgaccacgccagggagtgcgccgcggcctccgtcgtcgtccccgatgacggagagggtgccttccgcggcgaggtgcggtcggatatcgagcagctgaagctccagctcgccaggctggagtctatgtgggataacaattcaaaaccattggatgggaaaagtggtcctttggaggaggatggagaggttgtgagagcaatggggctggatattcagtccctgatcaatgagcatgagaatatcaagattcaaattctaatggatgaatcaagaaagatgaactccaatattcacaatatatggtcaatggcaaaggatacagataatagagtcagcgctctgcattcagatgttaatatggttctaatggatgaatcaagacagatgaactctaatgttcgtgaattatggtcattggctaaggatacagagagaagagtagagggtctacattcagatatgagaaaggttcaaattctaattgatgaatcaagaaagatggagtctagtatatacaaaatgtggtcatttgcaaagcagacagagaaaagggttgaagatctatattcagatgtgaaaaagaaatgctgtattaaggggataaaagttccttcctggatggattggtgatgttgtcgactcggtgaactatcattaaccttggcggagtatagtgcaccccttgatattgtaagttgcaacactacttatttagcagctgatcatgcatttatctatgtttttttgtgatatagatatatgtcacaatagggtccttggcgtaagttcatcatgtagttatcagttatgtggcctcctctgacgcgtccggtttgatgtcactacgccgccatggtactgtacatatgtcgccattcggtaacacgtgacctcaaagacttgagtgcttgtaaataagtttgtgttaatcttgttttgaagagttcaaggataatgatcgctcataaaaaaaaaaaaaaaaaaaaaaaa

SEQ ID NO: 99218 - DNA, 927 bp, Oryza sativa
  Clone ID: PAT_MRT4530_9704C.1
gcaaggggtttgagatcggcagtggatttgcaggtaggggctacactggaagtgagcataatgatgagttctatatggatgaggctggaaatgtgagaacaagaactaatcgttcaggcggtgtgcagggagggatatcaaatggtgaaattatatacttcaaagtagctttcaagccaaccgcgactattgggaagaaacaacatactgtttcaagggagcatgaggatgttgaacttttagcaaggggccgccacgacccatgtgttgtccctcgcgctgtgccgatggtggagtccatggccgcattagtcctcatggaccagctgatggcgcacattgctcaatgtgagatgtttccactgaaccttgctctacaagaaccagttggctctgccagcagcgtacctgcatttgcaccagatctatcataatgccccctcccccccccccagcttgtttatcatctatcatatttctgggttttctaaggggttcgcagttttgccacaaagcctgtatcctagtttatatctcgagttattgtacccaaggaatccgttatacagtgagcatgaagatagaaatgcgttcatgcgtgttttgtgatatggacaatctgtgcttacatcaggttattttgagcaataaaaatctccatttatgagagagactgcctcctgtatgcactgaagcacgtacctcattgagaacttacattacacagtagccatagtggagagcatccatcgaccatgcagatggaggttttacatgtcaagatagattatggagacaaacctgaactcgttgacatatcaaatatggcaattaggcccttcctactgacagatgtaacttttagcgttctcaagagtagtcgcagaagtagcaaggcatttttactcgatggctatagataaaatt

SEQ ID NO: 99219 - DNA, 213 bp, Oryza sativa
  Clone ID: PAT_MRT4530_97050C.1
caattagaagatatactcagcaataaatagaatagatctataaaacctgaaacactttctcgaatggcttccaatgaccatcatctcttcacttggtaaacttccaaaaccaggcaaaataatgccaaggaatttccccgtgggaagtggaaaacaaaaattaaaaacttagggaaagccaatgttccccagcccttaggctccaaaaagtag

SEQ ID NO: 99220 - DNA, 800 bp, Oryza sativa
  Clone ID: PAT_MRT4530_97051C.1
aaattactgaaggcaaccctgaattttcaccagacatgggcttgaagaagataataataaagtattgggccatgtattccatggaattcccagtgtttcggcagttgaggtgctcaatttacttgttgatatttgcacaaagcaatcggtctggtcctcacaggtgcatacgttgacagcaagaccagcagtcatgtttatgaatttgaagcatctgacttatgagatacttatttttactaaagatccaaacagccacagtggagttcttcagctggctcagtatttagcttttgcaccgcagctggagactctagaattgcatatgttgtatcattcgactcactgccgctgctggcatgagggtgcgggagtctcctacggacatatgccccatcatcacctcaagatggtctacatgagtgggttcaggtgctaccgggctcaggtcgagctgctgtttgccattcttgaaatgggtgatgagcttgagcatgtgaccattgatccaatgacgagagtaccgtatagccctgatttgatgaatttaggcatacctgaggacgagatatgtcaatgggcgaaccgtacctcacaacggtttggtaaagcaatctctgttgtaaaacctccctaggtggtgttggtagtcctgtgcatatacgacttattaccacctagataagtgtttgttcagattcagtactgaaattgctgacacaggggtttctgttttgtttccatgagtaaattgttttttattttattgtttgacaataaaaggcttggacttgtttctt

SEQ ID NO: 99221 - DNA, 479 bp, Oryza sativa
  Clone ID: PAT_MRT4530_97052C.1
ggaagggaatgaaccagaaggatatgatcgataggggaagaaatagaatggcctggaaattgccggctcagaacacactgaagatcaatactgatggtgctttttaagtgcaataccaatcaaggaggttggggctacgtgataagggatattggacaggagctgttgttcaagcaggagcaggtggagcagaacattttttggatgctttccacgcccaagtccttgcctgtgcagcagccctcaacgcagcaagcgagagggggatgatgagagttgagctggaaacggattcgttgatgttgaggtactgtccccgggaatgtaacaaggtggctcacgcctcacgctcttgctgctatgggttgtaatgtaatctccaaaacgcgtcctactaggctaattgtcctcctggtttgatcgtttggtagccaacgatttagctgggctgttaagataaagttatcggttactcccaa

SEQ ID NO: 99222 - DNA, 2235 bp, Oryza sativa
  Clone ID: PAT_MRT4530_97053C.1
gagcaacaaaattaacacagctgcaataaaatgcttcaatacattcaagttcttacaagatacaacagattcagatggagtgctgatatcctacaaatatcatttggcattttgactaactgtactatttctgacaacagagatacagatacaaggccaatagctcccatagctcaaacatacttacgatcccgaattaaagcactctaatcctcgttatctgtactaccttgcctccactacagaatctcaggatttaatcagattactctgctgactgctgacattgaggtacattacggaattgcgttgctacaaaaacgtacacaaattcggaaatcggtgtttccatgcctacttttggcaccccctgaaaatctggacttggtaaggctcctggctctcccctcgcagctttaatccccgcccccagcctctgtccggtggaatcgcagcagcacacggcggccgtaggcgaggccggagcagggatcaacgaagggcgaggaggagggggagcgtcgggcccgcagggaccgtgatggggtacgatcccacattggtgtcgtccacgccgcggtgcccctcctgccttgccgtcatcctcttctctctcgtcgtcaaggaatgcctcctctcgctgtggtcttctgcgtctcacccgcgatttggttggggggtaccccttctctacttctcgcttccgagtctctacttccgttgtgctttacctcacttcctatctcattgtagattctctgcttccgtgattatgtacctcttgtgaaaacaaaacagattcagatggagagctggtatcccaccaaggtcacttggcatttggactgactgtactatttgcgtttggggaaccaacgaaccgagcacaatgatctcggcgatcagcaggtgctcgcccctgcggcatcgcctcaggccgaacatcttaaggtagcagatgcaggggagcagcatggaggccatgacgctgagcagcgagccgacgagcgccatgaggtggccgaagaagggcaccgtgagggcgatcaccaccgtgctgacgacgatgagggtcctgatcagcacgttgacggacctcttgttgccggcgagcagcttctcctcgatcgccgtcgcgaccggggtcaccatcagggcgtacttggagaacgggttgatcagcgtcgtgtagatcgccagcttcgagctgatctttccctccgggaggttcagtgtcacctgagatttgacgtcgtcgccgtacatgaggtagccgagtatggccatggatccgtagttgacagtgcacgccacgaagcatatgaccagtaccctggagaacttgtccttttcctgcatggagttgcagagcgtggggaatatggcatgaccgcagtagcagaaggtgtacaggccaagagcagtaggcaggccactgacattcagcatcctccccttcccgtggaacccgacgccgtcgaacaccgccgcccacagcacgcagaacaccacgacgacggacgcgagcacgccgctggccgacacgtaggcgagcacggcgaggctcctcagccacgtcgtcggcaggatgacgacggcgacgaccacgacgaacagctgcttcccggacaccacgagcccgccgacggcgaggctggtgcccgggaacagcttgtccaggttgtccccctccagtatcaggaacccgatggcgacgaggtagagctcggcgtagaggaacgccgacacggcgagccggcccttggccccgaacgccagcgcgccgatgtccgggtaaccccgaacggccggcgacgcggccatgcaccgccgcaggaggaggccggtgtagcagcagaccatggcgacggcgagcaggagcaccaggctcagccaccctccctccgacaaggcgtacggaatcgacagcagcccaacgccggacgaacagctcctacgaccaaatatcgagtgtttcttgtactcgcctgacagcgcgttgaggccattgaagcaggtgcgcacgaaggtggcgccgtcgccgtcggcctccggcgagcactgcgcctcgtggtcccgctccaccggctcctgcttcccgcgggccggcacggcggcgtgggcctggaggaggggctgctcgaagtccggccgccgcgcggtgctgctgtcctccggcgagccgccgccgccgccacggggcgggtgcggcggcgctgctccgccaatggccat

SEQ ID NO: 99223 - DNA, 344 bp, Oryza sativa
  Clone ID: PAT_MRT4530_97054C.1
cgcttttctaaattgggttatagctggtcgagtggcatgggtgcccttgctgaacaatagggagaccgaatggctaacatgcacttgacactactgctataacatggagcgcatgcggatctgaacgaaccagagcagaataggcatactctgggcggacaacaaacggatggcattgttcgtggaggtatattaaaccagctccaagacttatgccagttaacataccagaagatttcagcaaagccattatcgctgagttgtcgactttctgggaatatattggcggatgaattagtccgtgctgctcttgactgtttaggacccttaggagctcctatacc

SEQ ID NO: 99224 - DNA, 1269 bp, Oryza sativa
  Clone ID: PAT_MRT4530_97055C.1
cgggcgcggcggcatcagctaccttctacgcattaacgcaaacatctgcacgacacgacacaagcaatggcgccggcggcggagccgtacgtggtggaggactgccgcggcgcggtgcagctgatgagcgacggcacggtgcggcgcagcgccgagccggcgttccacgtcgacctgcccgacgacgccgacgccgccgtcgagtggaaggacgtgacgtacgacgccgaacacgacctgaacgcgcggctgtaccggccgcgccacctcggtgccgccaacgacgcgcgcgtccccgtcgtcgcctacttccacggcggcggcttctgcatcggctccggccggtggcccaacttccacgcctggtgcctccgcctcgccgcggagctccccgccgtcgtgctgtcgttcgactaccgcctcgccccggagcaccgcctccccgccgcgcaggaggacggcgccacggccatggcgtgggtgcgcgacagcgccgcgcgcgacccgtggctcgccgacgccgccgacttctcccgggtgttcgtcgccggcgactcggcgggcgggaacatcacccaccacatggcggtgcggttcgggaaggccgggctcggcccgcaggtccggctgcgcgggcacgttctcctcatgccggccatggcgggggagacgcggacgcgcgccgagctggagtgccgccccggcgcgttcctcaccgccgagatgagcgacaggtacgcgcgcctcatcctgccgggcggcgcgacgagggactacccggtgctgaaccccgccgggccggaggcgccggggctggaggcggtggcgatggcgccgtcgctcgtcgtggcggcggagcacgacatcctcagggaccggaacgagcactacgcgcggcggatgagggaggagtgggggaaggaggtggcgttcgtcgagttcgccggcgagcagcacggcttcttcgaggtggatccgtggtcggagcgcgccgacgagctcgtccgcctcatccgcagcttcgtcgtcgagcacatggactcggagtagccaagcactagctagctacatgatcaaagattagtcaattattaaaagtgatttagactttttctacataattgatgagttgagagcgatttgtatttgttaggtgtgttttgatcttatcttagttattattgatatgtttcttggtaatttgagaatgaatcaataatggaatgccacatggatggcatgcttcttgatcaaaaaaaaaaaaaaaaa

SEQ ID NO: 99225 - DNA, 1308 bp, Oryza sativa
  Clone ID: PAT_MRT4530_97056C.1
atggccatccaacagacccttcagggacttaccactgcaggccgattccagcaggatactccaaggtcgaagtcgagttggtggaagccgcgtacgaggacctcgagttggactaccctggaggagacggctcctacaccgattcctcctcaagctcctcatctggcaccttccaagtcaagggcccctcaagctccaccgcctgcctctacaagggcaacgaagaaggcgaaagttgacgccgccaaaaacaaggacccagggtacgattgcacccaagaggagcttgacgcttatgtggcatcaaaagacaggagacaattgaagcctcgaagtccagaaaagaagattcctatagacccgagtgttaggaacttcttcaggggtatgtctgcacctgccaaggaggctataaagctgtcggactatgagcgaacacttaagaaagcatcttctggaaagtccaaaccagtccctcagcttggagagcaaccaaaccaggagatcgagccgttggtgaccggtgaagaatttggaatacaagattttattaatgacaccgggctaactacatatcaattgctacgaggcgcaccaatcgaaaaggcgggagtgaaatacatgtacgaactcggtaaaccacttgtcaagcctgagcagctgcagtccctaccgacacaaatgtacaaattccatcaactgtacatggagatgagcgccaccggtagagagatgatcggagcaaggatcagggacacggacttcttgcaaggagaagatattctctggatcaatttcaagggtatctacgaactataccagctggacgccctcgacgtctctattatgagttgttggactttaatggagattcaaaggtcccgacggcggggggttttcgatactggattcatcgacccttggaaagtaaacgttgaaatgatcaccaagtatccgcaagccacagaggacaatctcgtccatctcctaaaggcgcagcattacaagacgttcatactattgccgtacaacacagagttagtttttactgtcttcctaccaaatttcattctcgcctacgtagtcaatgtatatgactcaatggataaaaaagagtctacgtttgacatggtttttgaacttatagacagggcttggtatcagttccgtcatttagtccgcggcaaatggagagaaagacttaggcagaagtttaaatttcatgttatttgcatgagggataacctcacacataagaaatttatcgcggcggttcaagaacaactcatgggattcatcaacgaataa

SEQ ID NO: 99226 - DNA, 741 bp, Oryza sativa
  Clone ID: PAT_MRT4530_97057C.1
atgccgccgctccgctgccgccactgccgaaaagtcattcccgaacgtagactaaacgtgaatgaacgtgaaggagcaaacaaaatgcgaacgaacatggctgattgcgatgaggaacagatattgtacgatacaatcgcagagggaagcggccagtactggaatgaagaagaggggaacgaggatccaaaccaatacttgaacgaggaagggaacgtggagagggatgcggaggggaacgaggaggggaacgtggagagggatgcggaggggaacgaggaggaggaggctagtggaagtcaacccaccactagacagaagagggcacgcggacaacgagttgatggctctctggtcttcagcgatcagatacgcgaggctgcgagtcgactaacggacgtagtggaagcctcttctcagggcacgttccgacccgacagagagaaggacgagctgtcactcgccctgcagactcccgagcatctaggacgaacacgagggaaaggggtgattccttggaagattggattcaaggaggacatccacatgtacaggagtcggataaggagcaagagagatatcgaggcgaagattgcagatcttgagtacagggtatcgagctatgagctcagcatgcaagaggaggtggcaaggaaggtggatgaacgcatggccgcacatcggtcccaggatccccagccatacattcctcctgcaatggtcatatatatatgcacataa

SEQ ID NO: 99227 - DNA, 2934 bp, Oryza sativa
  Clone ID: PAT_MRT4530_97058C.1
atggctgatcgcgatgaggaacagatattgtacgatacaatcgcaaagggaaacagccagtactggaacgaagaagaggggaacgaggatccaaatcagtacttgaacgaggaagggaacgtggagagggatgcggagaggaacgaggaggggaatgtggagagggatgcggaggggaacgaggaggaggaggctagtggaaacattcacccttcccgcgggtacagagaacatagtgaaaaggtggactctaaagaaaatggcagacaatttcagaacttcaagggagatctgtaccagaaatacatcctgaaggggcagacaccaaacttcaacacattcccgaagctaagggatcactgggacgaattcgttgcttacaagacaagtcaacaaggggaggcgatgatggaaagaaacaaagaaaatgccgccaagaagaagtaccatcaccacttggggtcaggcggctatagcgtcacgatgccaaagtgggaggagatggaggcaagcttgcttgagagggtggatggctccctggtctttagcgatcagatacgcgagggtgcgagtcgactaacggacgcagtggaagcctcttctcagggcacgttccgacccgacagagagaaggacgagctgtcactcgccctgcagactcccgagcatccaggacgaacacgagggaaaggggtgattccttggaagattggattcaaggaggacatccacacgtacaggagtcagatgaggagcaagagagatatcgaggcgaagattgcagatcttgagtacagggtatcgagctatgagctcagcatgcaagaggaggtggcaaggaaggtggatgaacgcatggccgcacatcggtcccaggatccccagccgtacattcctcctgcaatggtcagcccatcaggcaatcgtagcagctgcgcctcaacggggcaggtggcgtcgggcatgaccatcccaacggaaccttcagggacttccactgcaggccgattccagcaggatactccaaggtcgaagttgagtttgtggaagccgcgtatgaggacctctagttggactaccctggaggagacgcaccatctccacctcaggctcctgcaccgactccttctcaggctcctacaccgactcctcctcaagctcctcgtctggtaccttccaaagtcaagggccccccaagctccaccgcctgcccccacaagggcaacgaagaaggcgaaagttgacgccaccaaaaataaggacccagggtacgattgcacgcaagaggagcttgacgcttatgtggcatcagaagtcaggagacaattgaagcctcgaagtccagaaaagaagattcctatagacctgagtgttaggaacttcttcaagagtatgtctgcacctgccaaggaggccataaagctatcggactatgggcgaacacttaagaaagcatattctgcaaagtccaaaccagtccctcagcttggagagcaaccaaaccaggaggtcgagccgttggtgaccggtgaagaaattggaataaaagaatttatttctgacaccgggctaactacggatcaattgctacgaggcgcaccaatcccaaaggcggaagtgaaatacaaggggattttctaccgaatgttagataggcggcggttgcgcggcgtggcggcagctctagcagcggcggcgtgcggccagagattggctgcggtggcggagctcgggtgtggcggcgagagcgcggggtttgggaggggcggacgtggcagggaggtggccggattcttcgccaacgacgtggggagggtgctgatcctcctcaccctaggcttcctagaagcaattgctgagaaaccagcagcacagcagccgacggaactccaaggctgccccgcccccgatatgtgcggcaacatcaccataccccatcccttcggcatcaaacctggctgctacctcgccggcttcgaggtcatctgcgaccgcacgttcaacccgccgcgagccttcctcgcaggcgacccgccattgttcggcgacaagttgccgccgaacgttaatagcagtaaaccattcacggtgacggccaatttctactactctggcacagatgcaggcatgcccagcgaaatggtcaactacacccgagggcctctcgagctcctcgacatctcggttaatcagagcaagctacgtgtttatgcagccatcaactccgactgcagcacgaatgaaacacaccatatcctatttgagcagtcaatcaagcttcagccgtcaggtccattcaccctgtcggcaaatgataattccctagttggcgtcggccaaaacgtcatcgcgatgttcgcggattcatacgccggagaagaatactcgacgatttgcctgtctttcctcagttcagtgtccaaggcgaggaatggaccgtgcgagaatgccacggggcttggctgctgccagcagacactgcctcctggcgtcaacacgactcttgtgagattccagcacaggaacaacagcaagtggagaacctatccatgctcatatgccatgctggtggagaagtcatggtacaatttctctacagaagatctgtttgagtaccctgcttttcccaacaagtaccccaggggtgtactaccggacaagtatcctacgggtgtaccccttgtgcttgactttgctatcaggaatgggtcctgcccacaggaaaatcgtggcccacctggaaaagactatgcttgtgtcagcggcaacagctcttgcctcgatgcaggaaagggccgaggatataaatgcgagtgcaaagagggctacaatggtaatccttatatgcctaatggatgccaaggccgctgtggccacacagcggtctacctcctgtggccgctgctagccacggcgacggtggtagctgggtag

SEQ ID NO: 99228 - DNA, 198 bp, Oryza sativa
  unsure (1)..(198): unsure at all n locations
  Clone ID: PAT_MRT4530_97059C.1
ggccgcctctcttcctgtagagccagtaccgcagtaaaccatgcctgcgcctgcctgcctcctcttccaatttttcctccccggatgcgaatctcctatcccgtccccgntgagttctgcttttccgccgcattcatcattcactcctctctcatttgccccttactttcttccccccccccccccccctaaattctt

SEQ ID NO: 99229 - DNA, 1167 bp, Oryza sativa
  Clone ID: PAT_MRT4530_9705C.1
gcacgaggcctcgtgcggcacgagggcggccatagctcgagagctcgaggtcaacccgaaagccacgcacgcgccgcgcaatgggttccgacgccagcagcgccgccgacgctatgggagtgctccgggcggcggtgcccctgcaggcggacgccgacctcgtcctggctaccggcggcggcggcgagcgggggcaggtggtggggctcgtcctcgtcgacgtctccaacgggttctgcaccgtcggcgccgggaacctcgcccccgtcacgccaaacaaacagatagagaagatggtggatgaggccgctaggctcgccaaggtgctctgcgagaggaactggccagtctttgcgtttcttgacacccactaccctgataagcccgagccgcctttcccgccacactgtataattggttctggcgaggaaaattttgtcccagctctggagtggctggaaaaggatccaaatgtaacgatcaggaggaaggattgtattgatggttatcttggtgcatttgagaaagatggctcaaatgttttttcagattgggttgcgaagtttcagatcaaaaccgtattggttttaggaatatgcacagacttttgtgttttggattttgcaagttcagctttggctgccaggaacattggccgagtgcctccgctggaagatgttgtcatttattcagagggttgtgctacgtataacctcccagttgaagtagccaggagtatgcaaggaaccttggctcatcctcaggatctaatgcaccacatgggactttacatggcaaaaagcaggggtgcaaaggttgttgacagaatcattatttaagattagaggtgtaaaactaacacaagactgtaatagtgacctggatcgattatctagtttggtttttattgctgggacgatgatcctagtgttctctttacttcttccttttatctcttcaatgtacaacaatctgacatatatttctttacttcttccttttatctcttcaatgtacaacaatctgatatatatttgcggttggacagaatactgatattttgctaatgtttcgtgcacggttgtgcgtaattaatctaaggaatttggtaaggaaaaaaaaaaaaaaaaaaaaaaaaaaaaggggagggcctcgtgccgaattcct

SEQ ID NO: 99230 - DNA, 408 bp, Oryza sativa
  Clone ID: PAT_MRT4530_97060C.1
ccctatgaagacctccgaaagactaggccgacatatcttgagatcgacgaagtcatcacaggtgcatggactggcatattttgagatcgacgaagtcaccacagacgtctcgctgtcgatggatatgtcaccaaccacgcgcatgcggccgttgcctgcctcgatggccagcgtgcggcgtgccaacgctggcgagcgagatgagatgtccgcggcgcggcatgtgcacccgcggctcttcgtttcgttggttggttggttgatttggtcccctgaatgcaacgccgaaacgccactgcggccaagggatcgtgctagcgtggctggcattggcatgggccaatcaatcccgttcatttcaggctgtgcctgaagcctgaaagtcatgcccgatagatcaagcatcat

SEQ ID NO: 99231 - DNA, 131 bp, Oryza sativa
  unsure (1)..(131): unsure at all n locations
  Clone ID: PAT_MRT4530_97061C.1
gancgtcaggaggacatgtcggaggaaagcggcggcggcntnnncntcaaannatgggaggatgacgatggtggtaggggtggacgagagcgagcacagctactacgcgctgcagtggacgcttggccact

SEQ ID NO: 99232 - DNA, 221 bp, Oryza sativa
  unsure (1)..(221): unsure at all n locations
  Clone ID: PAT_MRT4530_97062C.1
ccgcgcgcctgcagcccgagaagccgtcgatcgacaacatcacccgtctnctcccccaccccgcagagcccagcacttngncgncgccgcccgggatggagatgaagaagatcgnctgcgccgtgctgctcgccgtggcggcgtccgnctgccgcggtcgaggcctccgagtccccggcgtccgcgncgggcccngggtccgncagcgggccancgncgtc

SEQ ID NO: 99233 - DNA, 206 bp, Oryza sativa
  unsure (1)..(206): unsure at all n locations
  Clone ID: PAT_MRT4530_97063C.1
ggntcttaaaatttaaaaaacttttataaagggaattttgggcctcacattccataaatccccgggctgggaacaaacccgggggctttttaacgcgttgatttaacccaacccggaaagggtttcaatttccccccccaaaaatgggaacattaagatttccgggggccccttaatccaaaggccccgttaaactgtgtttgggg

SEQ ID NO: 99234 - DNA, 307 bp, Oryza sativa
  Clone ID: PAT_MRT4530_97064C.1
gtattcccctccttcgtttcgccgcggcggggggagccacatttgtgatccccggcgccgccagcaactgctccgaccgccgtccccgggcgcgccgccggcgatgtggaagagatttttggagacgacaaataagggcggcgacgccgttaccgctaccgacgcaactggcccgcagctcgacacgcggaaaaacccttcctccaggcgtcggacggccgatacgccggccaccgctggttccttagcaggcatgctgcgactgatgaaggggagcttcactaagaggaccaactctgtgctccac

SEQ ID NO: 99235 - DNA, 751 bp, Oryza sativa
  Clone ID: PAT_MRT4530_97065C.1
gcccggtggcgtgggtgcgcaagcgccgagccgctagctcaacccggctcctgaagtgtgcgcgtctgtatatccactgccggtcgcagcgacatttggttggcaacgttcacactgcctctctggataataataagaataaggccccaagtgatttcttctcaacgggccggggagatgcactgcgcgacagcgcccggctcgttcttgcgaaggcgcttcgttcgggatggtcctccgtcggctctacatcgaaagcattgcgagagtgaagaagctgttcattaagtggtgtactaatgctgcaagctacgaatagctgatcagttcttcgtgcagtggccccagctggcagcaaagataccctcgagcatggctatgccggccggttaatgtcaaagatttcacgcatagatgataatattgctcttcacagcaaaatccctaatggcgccatattgcagatgttcttcttgctagttgtaacgtttgaataagtgatgtagggaccttgttaacattcggtactggttattagctaaaaaaaaacagactggactggagtgatagatagatgccatgaaccgaggagatattgcatctgtatagaagtaattttgtgtaactatactatgtaactatactcattttgtacctccagttccttctattactggtgaaactaatgaatatatcttcgtgcattatggccaggcaaaggcggataggctaaaaaaaaaaaaaaaaaaaa

SEQ ID NO: 99236 - DNA, 348 bp, Oryza sativa
  Clone ID: PAT_MRT4530_97066C.1
cccccggaaaaagagccccaaggtatttttggcttttcaaaaaaacccaggagctggggttttcccaaaccaaaagggggttaaaacaaaagcaaaacattcacgggggaaaaaattttgggcgaccccaacggggtaacaaaaaaaaaagcggaccaaacggggggtataacccgggcggaaaaacaaaggaggggccaacccctcaagtttaagggaattcccgttcaagggttttggcggagaataagggggggaaaaaggccaatccttcgggaaacccaaccacatggaaaaacccccagggttttatggttttaggagggggaaaccaggtaaaacagggaa

SEQ ID NO: 99237 - DNA, 486 bp, Oryza sativa
  unsure (1)..(486): unsure at all n locations
  Clone ID: PAT_MRT4530_97067C.1
ctactgcagaggctgcagaggaaaaaatatccatacttgaggaaaatgaaacattactcaaggacaatgaacgactcaatgctgaaaatgattccttgatgaagagcagggaaggagctaatagtcaggttgccgctttaaggaagtctttggaagctgcacacaaggatataaaagacaaggaaaaaatgattcaagacttgaggcagtcactggatgtccagaggaaggagctgaatgactgcagagctgaaatcacagccctgaagatgtacatcgaagggactcaatcaatcaaacaattgtttgttggaactagtgatggtgtaaagtcgcattcctttgctaattctgtgggagcatcatcattgaataatgaagatgaagattcaaaaggatctgaagccataacatataagctagcatcagcagtaaatattactgatgatacgcagaaagatcgccangttctagaaagtagcgctg

SEQ ID NO: 99238 - DNA, 492 bp, Oryza sativa
  Clone ID: PAT_MRT4530_97068C.1
cccacgcgtccggtgttcacctggctaatttttacttatgataaaaggcagttgtaggttaattgttgacacatcttcctcagggtgctgtgttcatgtgatgacctggtcatgcaatagaatttttacttatgataaaaatgacagctgtgggaaggttttgaatatgtttaactgttcaatgtgatacatttattttgtgttagcatacacatccttttcttttagttctgaacatattggttttgtttgtatattggctgttgcaattcattttgtaccctttttgtaggcttgatgggctcttgtttccgctgaggtcttttcctccagaatatctagaggagcaaataaactatgggtgtgttcggagggggcattttacagcagcggctgcggctgcagcagttcaaaactgctgcggcagcgatgccgccgaacagagtcgatgtgttctctattgaaaggtcctggatcaatcgttcaattagt

SEQ ID NO: 99239 - DNA, 516 bp, Oryza sativa
  Clone ID: PAT_MRT4530_97069C.1
gggcatccctcaggaggtgcgtttcagaaaaaaaaaaaaaaaaaaaaaaaaaaaaaaaaaaaaaaaaaaaaaaaaaaaaaaaaaaaaaaaaaaaaaaaaaaaaaaaaaaaaaaaaaaaaaaaaaaaaaaaaaaaaaaaaaaaaaaaaaaaaaaaaaaaaaaaaaaaaaagggggggcccttttaggggggccggggttccttccccggccttccgacttaatactttttttttgggggcccctaatttaatttcctgggccggggtttaccaccggggggccggggaaaccccgggggtcccccaatttaatcgcttgggggaacttccccttttccccggggggggtattaccaaagggggccgccccttccccctttccaaaaatttgcccaccctaatggggaatggggcccccccctttacggggccttaaagcggggggggggggggggttccccccagggtgccctttccctttgcaggccccttagcccccgcccctttggttttttcc

SEQ ID NO: 99240 - DNA, 384 bp, Oryza sativa
  Clone ID: PAT_MRT4530_9706C.1
aggtgggcggcaacggcaaattaacagagccgaggatggatacatgatgacgaacacgacagcacacatcaagcgcgcatgatcacagggccagggaacaagaacacgcaaggcacccccgagcaagcgctgcaaagcataggccatcgccggaaacctacaggaaatagcagaggtaaaagatcaacgaaacacacgtctaaaagaaacatacaccggcggaggaattggaaacctaaagaagagacgaagactatggcggcatacagcactcttcaggggggcggaggaccaaaatatatccttacaccattgctgatagtgctacaagatctgcacccgtaaagagcgagggagtgccaatgtataccacaagtgcctact

SEQ ID NO: 99241 - DNA, 1152 bp, Oryza sativa
  Clone ID: PAT_MRT4530_97070C.1
ttttattagagagagaagagagaagcgcgggggggaaaaaaatcacaagagaggaggagaaaaaaaaatcgcagcagcaaaccctcctcctccgccatccgccgccttccctcctcccccacgatctccggcggcggcggcggcgatggcccggaagaggaagacggacgcggcgccgcggctggacgaggccgaccggacgctctactccaccttctgcggcgccgccaactccctctcccagctctacacccaggccatggcccagcagaagctctccttccaggccggcgagcgccactccctcgaaaaactccaccagtggatattgagaaagcatgaggaagagtcgaggctcacggcggctgatataatgtctcatatccagcatgagttggattatggaggtaatgatccacatgtttcccccagagtacatcagcatagtgcaaatccgtttgcaaactcaagcatccaaccctcagctggttcctatggtcaagcaacagtaggatttgcgcctagacccagcatcagtgatcagtcaaagaatacaattttctcaaatgctttatcaagcccggtccgtcggagccttcagagctatcatttaacccaaggatctggtaatggaggccggaatgcagaaacaaactctgcaggacagaatagggagaccaactctggaggctccaatgacacctcaatggacatggtttcggacagcgctggtaacgaatactactgaagtggattgtggtgagaaggaatactactgaagtggattgtggtgagatgaatactactgaactggattgtggtgagatgctgcatgcaaaaccaggcagcaacacaataccagtgttgtctcctgttgctgtatgttatgtattttcctaaaaccttatcatctgtgcggccttgtagtcacagatgaaatggttctctttaaggcttttaagcttttgtattttctatttttgttgaagcctgattggagagaaatcaagttgttcgtgggttccatcaggaatactttatatccaactgtgttcgtgacttcgtgttaaagattttgaatgtaaatgaaaattgcattgtgataaaaaaaaaaaaaaaaaaaaaaaaaaaaaaaaaaaaaaaaaaaaaaaa

SEQ ID NO: 99242 - DNA, 678 bp, Oryza sativa
  Clone ID: PAT_MRT4530_97071C.1
atggcccggaagaggaagacggacgcggcgccgcggctggacgaggccgaccggacgctctactccaccttctgcggcgccgccaactccctctcccagctctacacccaggccatggcccagcagaagctctccttccaggccggcgagcgccactccctcgtagatggtgaggatatctacaagatagataaacaaaaacttcacattgaacttggtaacaaccttttgggactcgaaaaactccaccagtggatattgagaaagcatgaggaagagtcgaggctcacggcggctgatataatgtctcatatccagcatgagttggattatggaggtaatgatccacatgtttcccccagagtacatcagcatagtgcaaatccgtttgcaaactcaagcatccaaccctcagctggttcctatggtcaagcaacagtaggatttgcgcctagacccagcatcagtgatcagtcaaagaatacaattttctcaaatgctttatcaagcccggtccgtcggagccttcagagctatcatttaacccaaggatctggtaatggaggccggaatgcagaaacaaactctgcaggacagaatagggagaccaactctggaggctccaatgacacctcaatggacatggtttcggacagcgctggtaacgaatactactga

SEQ ID NO: 99243 - DNA, 1269 bp, Oryza sativa
  Clone ID: PAT_MRT4530_97072C.1
gcacgagtggctcgcccggccttacattcgacgaactgatcgaatggagatgagcgaccgccaccgccgccggcagccgcacaagttctagacgacacggccggcgccggtggagcagccgcagttctgcatgcggccgatgatggcggcggagcagcacgcggccctgggcggtggcggggcgacggcggcgccggcggcggcggtggcggggagaggaagcggcggttcacggaggagcaggtgcggtcgctggagacgacgttccacgcgcggcgggccaagctggagccgcgggagaaggcggagctggcgcgggagctcgggctgcagccgcgccaggtggccatctggttccagaacaagcgcgcccggtggcgctccaagcagatcgagcacgactacgccgcactccgctccaagtacgacgccctccacgcccgcgtcgagtcgctcaggcaggagaagctcgccctcgcagaccaggttcgtgcgccattgccgaccaatcatcagctaagagagaggctgagggaacgggaggagaggagcggcaacggtggtgccgccacgacggcagcaagcagcagcagctgcaacggatcaggcagcgaggaggtcgacgacgacaagaggaatagcgtgatgaacgcgagcagcagcggcctcgtggaggaggactacgtgagctgcctcgcggtgccggtggtggacgtctcggaggacggctcggcggcgtgcggcgggtcgtcgtacgagtacgaccatcacctagactacttgggcggcggccagctgcccgatccgttctgcggcatgccggatctgtgggagatatggccaatggtggaatggaacgcagtagcatgaaagacagagagtagtatattaccctaggttaatttgtgtgtacatgtagcttaaagtacgtggatcacgtctcctcgactgatctgccgtctcccttggacagagagggaaaagagggccgtggcaatgacgtgtggggccggtttgtagattggggttgcaagaggaatctcgttggagtagtggtggtggaaaccttggaagcaattaagccaatggactttgtgttttggatggtgctaaaatggagaaaactagatcgagctcattggaagagttgcataggaattcaagcatcttttgtggtcacttcgaattcggatttagtagtaatctattcgaaagatgttcaattgacgatattattaaactagttttatatctaaaaaaaaaaaaaaa

SEQ ID NO: 99244 - DNA, 118 bp, Oryza sativa
  Clone ID: PAT_MRT4530_97073C.1
tatacgcttgcatcctatcaacagaaacagtagggggaaatctatagatatgtgcgatcgtgctaatcacattgatgaacgacggggacgaatactgctagtaacctagtttatttca

SEQ ID NO: 99245 - DNA, 225 bp, Oryza sativa
  Clone ID: PAT_MRT4530_97074C.1
gcgtccgcggacgcgtggggcgaaaatttcacgggaaagcacgggagcctttctttctccttcgatcgagcgtgcgcgcgtgtgtgtgtctgcggacagcacacagctgcgcatttcgatgcgagtttttggaaaccagaaaagaaaaagaagggaagggagtcagctctgaggagggagagggagagggagggaggaggaggggatcagggggagaggagggag

SEQ ID NO: 99246 - DNA, 161 bp, Oryza sativa
  Clone ID: PAT_MRT4530_97075C.1
gggaaccaagggttgcaagttgcacccctcaatttcccacaatctccatctataattaattgggcccctataattcctaaaggcggtttaagtaccctccttgatagccctaacacccgtgtttgccaaaacccccgtttaaccaagggataaaaattttc

SEQ ID NO: 99247 - DNA, 2248 bp, Oryza sativa
  Clone ID: PAT_MRT4530_97076C.1
ctgcaggaatcggcacgaggcgtcgcgtcgccggctcaagcaaacgcaccggcgcctctcgccgtcgccgtcgccgccatctaccagcgccttcttctccggcgcatccgtttcacgccctctcacttcctcaccggtttccacggaggagggagcgatccaatcctccgaggaggcggcggcggctgcgggatcgcgggattcgtcgttcgatctgtgtggctgcgggtgcgggggggagtggtcgatggcggcggcggcgtccaggaaggaggaggagaggaacgagcgggtcgtgagggggctcctcaagctgccgcccaaccgcagatgcatcaactgcaacggcctcgggccgcagtacgtgtgcacgagcttctggacattcgtctgcatctcctgcagcggcatccaccgtgagttcacgcaccgtgtgaagtcagtatctatgtcgacgttcaccacgcaagaggtcgaggccctccagaacggtgggaatcaaagagccagagaatcgttcttaaaggaatttgatgctcagaaaatgaggctacctgatagcagcaatgtcgacagtcttagggaattcataaaagctgtttatgtggagagaaggtatgctggtggaaggttttctgaaaggcctccaagagataaacagaatcaaaagaccaatgaacaagagcatagaagggctagttcgtaccattcattttctcagagcccaccttatgattaccaatacgaagaaagacgcaatggcaagcaatccgtgatgctaactaggaaacctggttcagatagggggcatgatgggaagatgtctggatttgcttacagtccacagagcctgcatgagaggatgtcagaagaccgatttgccaatgagaattctggaccaagaatttctgactgctcagggtcaagcatcagtaatacatttagaacgacaccacactcaccgaatttccttgataaagggtgttccagcccctctatgcaacaaaatcaatcaaacatacaggcttctagtggaatcactcaatctgaggtgagaactatatcaacaggaaacatagattcgtcatctacaaaatcaagcaaatcaagcttagctgatatgttttttgaatctgatattgctcatagaactcagcaaacgaaggattgcattactccaagtttcacagctttctctgatgttgccaacattgcacagaaagatctccttaatgagcctgttgcgcagcaacaacctgtaactggtttggatcaaccagtagatttttttgctagcatgcctccggcaactccatccactgatagaatgctcacagcagctccatcaatggacaatgctgggtgggctacatttgacacaccaccagaagaaaagcaacctggagtgattgggctttctggcatttccgtaatggataaacatgctttgagtggtgatttgttttcgtttgaaccaaataatgatcaaccaacgtggctccagagctcaaagacatcaaaaaataatgcttctgtgactgatcagtctgatgtaccttgtaaatatacatcctctgatgcaagtaattctcaggcttggagtgcttttgaggccaaaagtgttagcacccaacaagcctcgccagatctttcactaatgagttctatagaacctaaagaaccaattgatgaaaataaattgcagctctggcattcattcgatgatgcaagtgagactatgactctcaatctgtccaatgctcagctgcaaactaatgagcacaagaatgttgataacaattccctaacaacaagcaatccatttacttgctccataacgtcaaaggaatctcgtggtaatgattcccaagaaattttcatgggtggattagctcctagcgaaccctttgctccattccctgagccatcactgtttgctactacttccgtgggagaagcctctgtacagcagatgccgttgaatccatttgatcttccatttgatgctgactcggattctccagatatgtttatggatgtgacagcgttgcaagcggttttgcctaatgctgacctatcaacttctttcgttgatggtttgccggaaacatggttctccaacaatgcgtccgcttatgttccaccggggtcacatggtggacctccatgccttgtcgagcaaatccccaactctgcactcaggaacataacattgagcgctgtatcaactggaaatccttttgcatag

SEQ ID NO: 99248 - DNA, 542 bp, Oryza sativa
  Clone ID: PAT_MRT4530_97077C.1
cacttttattcctttcgaccatggaggagtatgtgagagaggctccacgcatggttccaattaaggaacctttggtcagttcttagttaaaatgacctgctatttcttttaaaaatgccttctacgtttcgatatgcctcctttatattataataatcaagcagcagccctgatgatgatgtttgtgcaatatttatcttcaattgaaatttgaaaccatagcaaaagaagaatcacatgtgttgtgtcaccacagtaaaataatcacatgttgatttgtactaaaataatcattcgatctataaaacggattcttaaactcttaataattgttatttcaccaggagtttcctgagagactcctcctgacatacaaaccagaagaatcagaagagattcctgagcctggttctgctgaggaggaaaaaccacaaattgaagaacctgctgttgcagtgccatctactgaaggagttccaccaccacctgctaaacctgaggtcgtagacacccgtgatttattgggattaagcgatcccacc

SEQ ID NO: 99249 - DNA, 254 bp, Oryza sativa
  Clone ID: PAT_MRT4530_97078C.1
cccacgcgtccgcccacgcgtccgcgactacctggggaaccctaacctggtgcacgtgcagagtatccaggctatttctgcagtcatgtcttttctcactgaaaattcttaccttttgcatccatatttttttcttatctcaatatatgtttggctaggattatgttgctattcattgggttgtaatccgtattttgaagagcttttttcttgtttttatgacttttaggtttgtatttgtatggacatatatt

SEQ ID NO: 99250 - DNA, 1653 bp, Oryza sativa
  Clone ID: PAT_MRT4530_97079C.1
gttctagatcgcgagcggccgtccttttttttttttttttttttttttttttttttttttttttagttagatatgctcaacaaagtcaataaaaaaatactatagcatatgatgtcacctgcacatgaacgcccaaaccgaaaggtgcatatactcaaaatgcatcagctaaaaccactaaataacagggaatacatcagatgccacagagatctacaaagacgacatacctacccaagtagtgcggtttcatgtttaattcatatgcgaggaatgaataaggcatggatttaattcggccttgcgtcaatatatttgtctctcttctcagctccctgaattcgacaccttggcgatagcctcctgagggggtgggtggtcgaacttgcactgcataccaaacttgcacacgccagtcttcatgtagaaggcacataccacggcatcctctcttcttggtaggccagcaagagtaagctgcacagactcctcagcaggctcccagtttgcagagggatcgggagcagaacgatcaattgggtggtgaaacttgcatcggtcagcaaacttgcaaaatcctgtcttcatgtagaaatcacaaacagttgctccaggcctctggggataggtgactggcccaggtccaacaggcatgtgtaccgcatgaaaatacaagccttgcaagaagtctgcagaggtaataaggaacatggatccctgagaaggtagaatggtgtgtccccatggaagaggaaaatttacttctccacggtctggatggttgtatagacaggtagaaccgaactttcaactgtctatctaaatgtaaaaaggacaatcaactttacctgttctcataggcagtcctttagagttaaactcttgcgcagcagcaactggagtttgcatcttcgctgaaactgaatcagctgctgaaccagtatccgtttcacttacaggagtcgctcaacttacgggagcatcatgacttgaaggtatgtcaatatggttggaatgattggacgtacacaatgcaagaaatttggatcagcctgtttgaacataaaaatcactcgtattttccaacggtactgcatcatcctataactttggatgattgaacttgcatttcgatccaaacttgcatttaccagtcttcataaaaaaaggacaatctggttccccttcttgttctggataggattcttcaacatttgcagcctctttccaatttggaatcccaccctctggaacccattgtggatggtcaaatttgcaggaacctccgaatttacaggttcgggtcatcatatagaaggcacagtccttttcccccggtcgctgtggatatataggaaggctgctttcaagcctagggcgcttggtcatagtatttgaagaatacaaagcctcaatctgttcaacagtactatggcttcccataattggctgatgatagagaactcccatggatcgcctcgcgccggccagccgcgcgtcgaggtcggcggcggccgaggaagggttggcgagcgggcggccgccgtagcgggccgcgatgaggtcgacctcgtaggacgagtaccccgccgcggccgcgccctcgccgcccgcggcgccgccgtggccgtgcgggtagaaggggtccgacat

SEQ ID NO: 99251 - DNA, 264 bp, Oryza sativa
  Clone ID: PAT_MRT4530_9707C.1
atgggaggggatgctactgaccttgacgcaaatgcattgaacgaagaagaggaggagctccatcgcggtgtgccggtggcagcggcggcggccatggtcgccggtgaggaaggagacgcgaagaggaaacggagtcggtctcggtggaagtatgtgcagcccattaagcccaagaaaagcccatcctttctcagtgctcgaagagtggtcaggcgcacacagataaaggaggagctcgctcaggtcatgacgccgtcacggtga

SEQ ID NO: 99252 - DNA, 685 bp, Oryza sativa
  Clone ID: PAT_MRT4530_97080C.1
gctcgccaacccttcctcggccgccgccgacctcgacgcgcggctggccggcgcgaggcgatccatgggagttctctatcatcagccaattatgggaagccatagtactgttgaacagattgaggctttgtattcttcaaatactatgaccaagcgccctaggcttgaaagcagccttcctatatatccacagcgaccgggggaaaaggactgtgccttctatatgatgacccgaacctgtaaattcggagggtcctgcaaatttgaccatccacaatgggttccagagggtgggattccaaattggaaagagcaggctgcaaatgttgaagaatcctatccagaacaagaaggggaaccagattggcctttttttatgaagactggtaaatgcaagtttggatcgaaatgcaagttcaatcatccaaaggaaaagggtaatgcattatcgtctggaaataccaatgataagcatctaattgctgataggtctatcttaccagtgaggccttctgagccactttgttctttttatgcaaaaacaggcaaatgcaaatttcgtgcaatgtgtaagttcaatcatcccaaggatattgaaataccttcaagtcaaaatgaaccccaaagtgcagtgactgttgaaggagaaacggatattggttcagcagctgattcagtttcagcg

SEQ ID NO: 99253 - DNA, 1611 bp, Oryza sativa
  Clone ID: PAT_MRT4530_97081C.1
atgtccctttcaaaaaaagtttgtcaacagagcagaatactggagaggattgctcagctcaattggccaataatgccacgcggagcgtcaacaagagatgtttgcatagacataaatcatggactcagcaacatctcgacaacattaagtttgaaccgcaagtgttcagtctaccgtatccctgcccatgtacgtgagttggacaaggcttattatgagccaaggatggtatctatcggtccatatcatcgaaaagagaagcatctccaagctatggaagagcacaaatggcgctacttgagagatttcctctcccggggattggtgaacgaaactgccgatcatcgtatgaggaggtacacggacatgataaggagattggagcctgaagttcgtgagtgctactttgagagcactgacctggactcgaccgagttcgtggcaatgcttcttctcgatgcatctttcatcatcgagttcttcgtgaaatggtttagcggcgaggacgacccactgttttcggtcagctggagcttgcctctcctcttgaatgacatgctgatgctcgagaaccaaatacctttcttcgtgatagaaagattgtatgatatctctacatttgatccagatcgtccagaagacgctcaaccaaagccttctctcattgggatcatcacggattacttacgagggattgaagatgcagaagtgcggcacgaccgagaaaatgtgcatcacatgctccatctctatcactgttgctttgttcagccactcgaactgccaagaaatgcaaacgaagaaggtggaaatgcgaataatattggtaatcccttcctgttcttgcccaagatgatcccatgcgcaacacagctccgcgaatttggtgttcacataaaaaagaacaagcatgcaaggagcatgtttgatatctccttccggaacggcacactcgaaatccctcgcgtcgccattgaggagatgacaaggtccaggtacatgaatctcattgcattcgagcagtgccatgacaacggcaagtatctgaccagctatgcggtcttcatggcttacctcatcaacactgctcaagatgctatcctcctgcagcgctacgatgtcatcgacaacaagctagcaaatgaggaggaggccgccaagttcttcagccagcttcatgcctgttcctacattaactatgacgagcattacctggcccctgtgttcagagacatcaatacatattgccggcgatggtggcccaagcggagagccaggctatgccacgactacttcgccagcccatgggcagttatctcgttcttggcagcactgatctttatgggcttctcaatctttaagatagtcgtcatgattttgagtgtcttctttcatttccacgaaagaaaccggaccatgaaatgggtgtcaaacagactggtggtgtatcttgatgccttgagtgttatcagtaatggattgggagtcttctcgggagaagttgatgtccagacaatcaggagatcatataggatgcttaggctaaaaagcaatacatgtggtggtgaagatttcatatggcatacaagagtaattgtgtgcaggagttaa

SEQ ID NO: 99254 - DNA, 225 bp, Oryza sativa
  Clone ID: PAT_MRT4530_97082C.1
ccatcctcagacccgatcaccgccaaacgaaccctaacgcgacaagtagagacaggcgcaggagcgaactcacctcggaccgcgcgtggatcgaggagggagggagggagggaggatcagaggatgcgtgcggcgggaggaagggaatggccagaaccagaggcagagccaaagcctagctcgccgctcgtccgtcggaagaagggaaagggcaaagtccagaaa

SEQ ID NO: 99255 - DNA, 690 bp, Oryza sativa
  Clone ID: PAT_MRT4530_97083C.1
atgcgggacggcgcgggcggcgctgcagggcagggtggtgccgagctgaacaacggtgcgggctactgggcgacggcggaaggtggcgtccgcgcgcatggtgacgacggcggcggcggaggatgcaagcggcggccgcgagcatggcgacggcggcggcggcggaggaggcaagcagcggccgcgcgcatcgcgagggcgccagcggtcagccacgggcagggcgacggctacagacggcggtggcgcggctccagatctggtacacctctcgatctccactctcactccaccctccctctccaccgtccgctgactcaccttcgccggccggcgacgacggcgatggaggggaggtcgcgctggaggtgaggtcgcgtcgcggaagtccggatgggggcgggagaggcggctgttgcaaaatggcgtgaggagagagacactccatttttgcctcttctctctcctaatttggcgcatccgccacttttggagggcctgttagcgtatctgctggagctgatttttccccttttatacggcaaatgaaggatggatgaccggttagaggaactgctggggatgctctaagtgcattttctttctttcttgaggaggatgcattcaatatcacccaaaaatttataagaacttgtcagtgaattgctgaacaaatgcatagatgcattc

SEQ ID NO: 99256 - DNA, 220 bp, Oryza sativa
  Clone ID: PAT_MRT4530_97084C.1
aattcggcacgagaactagtctcgagtttwttttttttttttthttttaaccacaaagtcaaacccccagattgaactgatcaaatataaatgaatttacagttatgcacttgaacaatgactacaaatctaccctatttacatctaagtgcacagtagtgaacaacccctgctgtttttgcatttagggtgacaaatccaacttcttacacaargrggg

SEQ ID NO: 99257 - DNA, 396 bp, Oryza sativa
  Clone ID: PAT_MRT4530_97085C.1
atggagacggcggcggcggagtgggatcatctcttgtgcagcttgctggaagaaggccgttccggcgtggaacgggagccgccgccgacgaccatcacggcggcggaagtcgtcgccgccgttgcccagccaaaacacgggagagttgatactgagaatcggtggaagcctacccatgccctcgcctgcatgcgcgtagctgtgtggttcttcaacaccgttagtctcgtgctgtttgggatcgtcgttgtgaaggtagttccacactgcaagaccatggaggaggtgtttgcatgcattctcgctatactcaccgtccttgggatactaatcatgggttattgcatgataaaaaacactaaagaggatataaaggccatggagggaagcccgtga

SEQ ID NO: 99258 - DNA, 144 bp, Oryza sativa
  Clone ID: PAT_MRT4530_97086C.1
atggccgccaaatctgcatacgacctccgtttttggcccaaacaaggtgttgcttcacttatattgggccaatgggcttgtaattttatttggggctccggcccacgtggggcccatgacgggaacaaaaaccctcgtggttga

SEQ ID NO: 99259 - DNA, 157 bp, Oryza sativa
  Clone ID: PAT_MRT4530_97087C.1
tttttaactaccactcccagtccggactgtgacgcagtaattatctctagaccgttgattaggaaaccggaacgtacatggctaccgaccccaatgcttaatatcacatagagcccagggagtcctatatccacattgtggctaaactatcacacgt

SEQ ID NO: 99260 - DNA, 225 bp, Oryza sativa
  Clone ID: PAT_MRT4530_97088C.1
gaccattctatttctgagctcttatagttcgagtgagagagcagcttaagggggtagtgcaagaggccaatccgcactatcggcgctgggagccaccaggaggggtcccacccgggagcactcaaggcagcgccggacgagatcatctgcaccctcatcttcgtgttcgccagccagggctccaccatggcctgcagctaggggaccggcggttgatcgccgact

SEQ ID NO: 99261 - DNA, 1761 bp, Oryza sativa
  Clone ID: PAT_MRT4530_97089C.1
atggacaagctgcggggatcggagctgctcaccacccatgacgtccgggccatcatggacctacttcttgcacgccagtgcctgcctgccaacatggacttcttgtgctgcccaaatggcgatgcttgtgctcatcgagccaccaaccatggcaccctgcaggttgccacctgcattgggggaggtgcttttgctcgaatctcgaccgaaatcgtaaccccagatcacatccgacctcagcaactccaatacatctccaacctgacatttgatgatagctcagccatggagatgaagctttccaagtgcagtagtggtggttgtcaactggactatgatttttcctcgccatgcgagtacatactgtccctgaaaatgtgcctccttgatgccatccatggcttctacatccgggcactcgccgtgctgcccacgggtgacgactccatgcgccttggccgccttctccgtgccctccttgtgtccggacactgctatggccccttggatcctgtgtcaaacataatcctgaatgctgtcttgtatgatgccgcataccctccgcaaccacacgaaggtgatggcaaggctgagttaccacatgatatctttgacacccgcgccatgcgggacatggcgtcctgttccctcgatggcctcgttgccctcctctgcaccatcaccaccaccaccactggcaccccgctctcaaagcatgaggctgtggagtacctttggtcctggcagtgtgacctcaccgagaagctgcagcagaccgtgatggcaaagaacccctacgccgctgcagccatggcttccaagcacccacagcacaccatgctcggcgcgctgctcgtgtccttctccagcgagaagctcgaccgcctgcgctactttctgagatccattagtgatggctctgggtgtgttatctccggtgatgattgggagcagctaaacaaaatgatcaaaacacagctaaccacaattatcacgacaagagaagtgctaccattcaatccacaagccttgtcagcatcattgagagtgtcagcctatgtgaactcgcatagttttgctcgcagcaagctggaagagttgctactgagatattctaggcaacatccctgggaaccaaggtataagcttgatctcatctgcggagtagaggaacccagatcagcccgatgtggatgctaccatgctaacttcttggcaagcgcccatggcagtgtgctcaagttcaatggtgagacaaccgtagcacaaaccactgtgcgcagactcttcttcgctgaattctgggactcacaacctggtcgattttatgaatcacatgcaaaacccatgtgctgccctgttcaagatagtagcccttgttttggtcgttgtatcttctgtggtgaagcaagcacgattgtgcatccaccatgtgcagctagaagtcatcttgatgatgatgattatgcccccatccttgactatgatgtccaggccgccattcgtggtttccaaaagccaaatcaggggatgttgctaacttgggggaagctggcttatgagtctcttaggctttctcaacttgttgtcaattatgttggaattcaggtggatgatatacctgatgctatatagttatataggggtcgacctgtattttgtttcagaagttcggttagatgaagtcttcttagatggttttgaacttatgaactcttttaaggtctaatcaggggacgttgctaacttttggggaagctc

SEQ ID NO: 99262 - DNA, 228 bp, Oryza sativa
  Clone ID: PAT_MRT4530_9708C.1
ttttattatccagcctgcacatatgaatgggcgtggcgaggattcgtcctgagttgttcaccatagggtactaaattttgctacatgcaagtgaattgaataccctgttattattgcaatttagcattcacaggcgaccataacattgatgacagggctagaccattatctatccacttctgtgatgcagaagatgcaccgtcacctactaatatgagagtgtgacca

SEQ ID NO: 99263 - DNA, 309 bp, Oryza sativa
  Clone ID: PAT_MRT4530_97090C.1
atggtgcgcatggctggtgtggaccgggagtggtcacacagcattagatgtgttcggctcaccgatgcaccacgtgccttagatctactaccaccactgggccctggctacaggtggcatggcacggggcctactggtgcaacaagatccgcttgcaatattgaacagttgtttctttcgctggggtcaacaacccctgaagggtactggtacatgcatgcagagaagccggtgccggcgatcgaggacgccggagaagagctgtatatgcataaaaagctggatggacgaggaccacaaacagcttga

SEQ ID NO: 99264 - DNA, 293 bp, Oryza sativa
  Clone ID: PAT_MRT4530_97091C.1
ccttttatctaactcgcggcagaaacactgggcctttttagtccgatccacaggaatcacggggaggtatactccggggggcagagctcttaaacttggtacatctgtctaggatggctgaaggactatttcctagacctgcgctttacatggtcgactaaagtatctgatgtatccgatgtcattttttcttcctaacatatgaatcgggccactggaactgatacaatacaaaaggtatgtgacagaacagatcactcatgatgactggccaccggaaattattcgagtga

SEQ ID NO: 99265 - DNA, 350 bp, Oryza sativa
  Clone ID: PAT_MRT4530_97092C.1
acccgtgtgtggccgggtccagaataatgtgccgcgtattccttacccccaaagccttaccaaaggacttgccgtccctggtaagcaatttccccaacccgtccggttggttattctgggtaacctggccaccattgttaccaagttattagttagttataaggaagaacccaaaaaaagtcaatgccaagtccaatgtccgtgttgttgaccaagttggaaacaatcggggtgatacaaaatcttggaattaaaaatgtcatccaagttttaaaccttaagccctcggtaaggataaatcctagtacatttgtggaaattaatatcatcaccgtctaaaaaaaaaaaaa

SEQ ID NO: 99266 - DNA, 471 bp, Oryza sativa
  Clone ID: PAT_MRT4530_97093C.1
atggctagctaccacttcgacttgagggacgacgacgacgtcttctctgcaacattaccagaaaaatcgttcgttcacgttcgttcgcgttcgttcacgtttcgttcacgttcgttcacgttcgacaatgtcggggcgcgcggcagtggcggcagcggagcggtggcgtggcggcgcggcggagtcagggcgcgcgtcgcggcgtcgtggcgcgttccggtggtgtcgggcggcccggcaacgtgggggcgcggcggcggcatggcacagtggcggcgtggcgtcgcggcggcgtggcgagctcgaggcggcgtagcgcggcgttggcgtcgtcgccgtggcggccgtgtggacgttacgtcgtcggcggtggcgaccgtgtcgaagtcggggtcagcatcggcgggaggcggagtcggggtcagggtcggccgcgcgtcgacgtcggcagcggcgtcggcaatgagctag

SEQ ID NO: 99267 - DNA, 167 bp, Oryza sativa
  Clone ID: PAT_MRT4530_97094C.1
ctgctgctaaggggaggagcggcattgctgctctcgccgcggcgccgcgcggcacggccgacgacccgggcctcgccgtctactggggccgccacaaggaggaaggctctctccgtgagcctgcgacaccggccgctacaccaccgtcatcatcaccttctacgacg

SEQ ID NO: 99268 - DNA, 447 bp, Oryza sativa
  Clone ID: PAT_MRT4530_97095C.1
atggtgccgccctcagacgaagcgcttcttcacggggctattcctgaaaggggaaccaacgtaaatcaagtaggggttgtagttgatgcagatgcggctaacaggatagaggagcctgctaacgggatagagaagcctgggataggagtagatgttgctaatacaaaggccactaatgtagatgcagatgttgctggtgggaaggagcatggcaccacaatacatgatatatcacaatggcaggctatgttttggactgatgcttttaacggtgacccagatagattgaatgaggaagatgagccaattggtgttgatgaggagcacttatatggggttgatgataccgtgtgtattaaagaggcaacaataccttctatgattgtaactcagatgttcccgatgagtctgatccactttttgtgtgtgaatatgatggaccactag

SEQ ID NO: 99269 - DNA, 583 bp, Oryza sativa
  Clone ID: PAT_MRT4530_97096C.1
ttttttttttttttttttgataaaacatatgatcagaatggtagaaattctaccattcgatgttcgcctacaataaccttaacatttgtacaacgtaaataaaaccggtactagtagtagcatgaaaggagcatctcctgatacactgctataagaggatactgtaatgcttaactgacgatcggatctagagttctagacgctttggctcatgagtggaattccgagacccttcgtgtgatttcctgccagatcggcagcttaccgctgaaaatttatgccaggtcaattcttgcatggataatgatgttcatccgcctcttttatccagagaaccctcttcagaaatgcaagctcgccaaccatacctcctttgaagaacagctggagttcctggggacaacacgattcttgcttttgcagggttaacgtgcaactttgcagaaccacgaatgtacggagtagtcaagactcaagagaaggctgcagggactgtgcctatcatgccacttcaatagcctccttttctgatttcacgatatgttctaagttcattatctttactggcttccccagtctggac

SEQ ID NO: 99270 - DNA, 151 bp, Oryza sativa
  Clone ID: PAT_MRT4530_97097C.1
atgacggttctgtccaccatccattgtgatcccaaggatagcttcccgccattgaatcgttatggttttctgaggacgctcactttcccccttctcaggaagtggctccaacagcataaaaattcatcatgcaacaacccatcccacacaa

SEQ ID NO: 99271 - DNA, 479 bp, Oryza sativa
  Clone ID: PAT_MRT4530_97098C.1
caccacccaaggtagttcatctgcctaatgcaccatgtataatgcccagttcaaagttcagggtgaaaaatggactacaaggaaatttcaaatgccaaaaaatagacttttacctttttataatttatagtcaattacagttaccaagttgaaatttgaatgactaatgttcatgccttgtaccttttgaaccatctagtcgtattatttggttcctaatcctgaatatagttaaggcaaacgaagagaaatagttacgtaattttgaatatgtttgtatatgtactttattttaccaagtaaacttgtattcgatgtgattgcaaactgttctaccttctttcagttcatctgttataattaatttttctctaaaccattcttttttgtcatttctttgccaccaatgatatcattgtactacatgatcatattatcaatatatgcactttattttaccaagtaagcttgtattcgat

SEQ ID NO: 99272 - DNA, 273 bp, Oryza sativa
  unsure (1)..(273): unsure at all n locations
  Clone ID: PAT_MRT4530_97099C.1
actatgcaaaccaggcgggtgcactattgaataatttcaccgataatagcacgggaacattacatcacacaaattcatacgttgatacacgcatagtcgccgaagcgaccagctgcttaattaatcgataacacacgggtttaatttagcaataatcagcgcacacacaaaccacacttatatgggnggggtgtattgtggactaattaaggtaggtgacttaattgcggcgagagaacagttgcttcgtgacttcactcgccaaacttgcag

SEQ ID NO: 99273 - DNA, 594 bp, Oryza sativa
  Clone ID: PAT_MRT4530_9709C.1
ggggggggggggggggtatttttatttttttttttttttttttttttttttttttttttttttttttttttttttttttaaccttcaaaaccgttattaaaaaaaacctctaccggccaaatcattaacccaaaaaccaacaaaaaaaaaagggggtttgttgggggtcctttttcccccttccccaccaaaaaggaaccccccccaaaaaaaacccctttccacccccctttcctccggggggggaatccccccaacccatctcccctggtttgcctgagcccctgggccccttctcttgggatgccacatccctttcccggaacctcacttgggggagccccgcggatgggcccctttcccgcaagggggcttcccccagggttggggcttgtcttgcttgccttcttagcccctccttctctttgggccctttttcccaccccctaggggggggggcccctaaggggcttcccccccccaccctctccctgggacccccgttggccccccgggtcccccccgggtttcccgccccggcccctttgggcccccccctttccccctttgggccgcctcccccccccgtgacac

SEQ ID NO: 99274 - DNA, 432 bp, Oryza sativa
  unsure (1)..(432): unsure at all n locations
  Clone ID: PAT_MRT4530_970C.1
attcagaagaacattgaagttcatcatttattcaccacatatatataaatagatgcttcctgacaaaagaaagcactaattatttagcaaccccacattgtctcacacacacagctaactatagtagcctagtggccggttcttggggtccttggttccccaagccngttgcngacaccaccnggcccattggggatgtccacgttgcagaacgccggggggctcgccgccgcgcgctccangtcccctctccggcngccggggaacccctcggccatggggtgcccggcctcggtggcgccgngctccctgttgttgcctgncngcttgtgttcgtgcgccccgctcctggccctgccgttgtttgcggcggcgtgcttccggccgcngtcttgcctgtcttgctcgtccgcggcgctggccgcgccccgg

SEQ ID NO: 99275 - DNA, 228 bp, Oryza sativa
  unsure (1)..(228): unsure at all n locations
  Clone ID: PAT_MRT4530_97100C.1
tggcccgtgtgccccccttcggaacttctttgccngtgacttgcttggttagtgtgagatagtatgataagagtgtgtagcccgggtgtgcccatgnccaagtgtgctgctgtttttggttcttggttgaagggggaaattgatgtaatccagataagnccagtaattgtggacatattggtttggtgagattatattttcccagatccgcttcatagcttaaaaaaa

SEQ ID NO: 99276 - DNA, 141 bp, Oryza sativa
  Clone ID: PAT_MRT4530_97101C.1
atggcggctgcttctccctgcagcgggtgctgcttctcccggcgacgactactgcctcttcccaacaacaaacggacaccattcctcaccgtccctttcaccaatcgtcctttatgtgcaatcaactatagcccgctatag

SEQ ID NO: 99277 - DNA, 675 bp, Oryza sativa
  Clone ID: PAT_MRT4530_97102C.1
atggcgccgccgatgatggcgacggcagcaaggcctcgcgacgaccagccgcggcggcggcaggctctgctcctcgccgcctccgccctcctcttcctcctctgcggcggcggcgctcctggcgctggcggcgtcgtcgtggcggtcgcggcgacggcgtcggcgacggcgacgccggggctggtgttccacgtcggcgggccgcgcgggtggcgcgtcccggacgccaacaccagctacacctggtgggcgatgaacaaccgcttccacgtcggcgactcgctctacttcaggtacggcggcggcgactcggtgctcgtcgtcgaccgggaggcgttcgacggctgcaacgcgacggagccggtggccaggttcgccggcggcgccaccaccgtgccgctcggccgcccgggcttcttctgcttcatcagcggcgcgccggggcactgcgacggcggccagaggctcatcgtgcgcgtcatggtgcacccggcgcctggagccccggcccccgcgccgtcggccgcggcggcggcgacctcgcatcctggcgcctctgcctccggccccggcgcgtcgtccggagccgccgcggttgccgccggcggcgccggcgccgccgtcgccgcggcggcgatgggtgttctcgccggcctcgtcctgctgcttcagtga

SEQ ID NO: 99278 - DNA, 1459 bp, Oryza sativa
  Clone ID: PAT_MRT4530_97103C.1
tagtggatccccgggctgaggctttcccctgcagatatcacaagctgaagctgctgcacctgcacacgccttctctagttctctccagcttacagctagctgcagtgcaagcagctgctgaattcccccatgagcctctgcctccctgcctgcccccgtatgtagcaagaacaagaacaccagcgagtaacacaggctcgctacagtggtactagattaccgcttgtgcgggcatagtgatcgtctatagttgtgaattgtgatgcagcagcataggtggtgagctgctgctgctggtacgtagatggaggatctgtacagcatccacccggggatctcgcgggtcggcggcgcggcgagcgaggcgtccggcgtgggcgtcgtcgtcggcggcggcggcgggtcgtcgtcgtcggatctgacggagctcatgaaggctcagatcgccggtcacccgcgctacccgaccctcctctccgcctacatcgagtgtcgcaaggtgggagcgcctccggaggtggcgtcgctgctgaaggagatcggccgggagaggcgcgccggcggcggcggcggcggcgccgggcagatcggcgtcgaccccgagctcgacgagttcatggaggcgtactgccgggtgctggtgcgctacaaggaggagctgtcccggccgttcgacgaggcggcgtctttcctcagcagcatccagacgcagctcagcaacctctgcagcggcgccacctcgccgccggccaccaccgccacgcactccgatgaaatggtggggtcctccgacgaagaccagtgctcgggggagactgatatgctagatatagggcaagagcaaagctcccgcttagctgaccacgaactcaaggaaatgcttctgaagaagtacagtggctgcctcagccggctccggtccgagttcctgaagaagcggaagaaagggaagctaccaaaggacgcacggtcggcactgcttgaatggtggaacacacactaccgctggccatatcccacggaagaagataagctgaggcttgcagcgaggacaggtcttgacccaaagcagatcaacaattggttcatcaaccagaggaagaggcactggaagccatcggacgggatgcggttcgcgctcatggagggcgtggcgggtggatcgtccgggacgacgctctacttcgacactggcacaattggaccatgaattcatttttgagcaatgccgcctcttgagaaaattggccatttaggcagtaatagtaggacatggtatttggtggtgattgtgtctagctatgatcaatctttcagcaggtcagtgttattcagttcagggtaaagtaattgcctcattgttttggcagatcatgtgtatatggcatcgtaccaaatcaaaatgtataatcgttaggtaatatatatcttggggagacctgaaaaggctgttattagt

SEQ ID NO: 99279 - DNA, 630 bp, Oryza sativa
  Clone ID: PAT_MRT4530_97104C.1
atggccttcgccatgagactttcgcctgtacggttcccttctcgattttcgccgcttgcctctggtctaagcttgtcgctcaagtcctcggtttcggcaggtcgggccgaaggcccttcgtggtatacctccaacaagcctctcacgggcaaggttcgcacattggaggatgctgaggcggaggcgtcgaaaatggttgaaggtttaaccaccgccgaattcggttgcctgcttcaacgtcaagccgacgggagggcaaatcgcgttcacgccggcgaactggcctgttggtcgattccttccagggttgctgacgacgatgtatggacgtcaaggaagcacaagcgagccgttgcgaaaggccgccaggtgcgaacccagcatgtcaccaaggacgcggccgacaccgatgccgatgaggaggacaatgacgaaagggaggccgggtctgacgaagatggcggatcgcgcggttatacccccagtccaacctggctgaatgctgggacgggttctcatgcttcgcccacgggtcctcaggacgtcgccggcgcgaacgtgctcctggagatctccagctccgtggtgaaaccgggagtgattgacaggaagaagaataagggttggtga

SEQ ID NO: 99280 - DNA, 447 bp, Oryza sativa
  Clone ID: PAT_MRT4530_97105C.1
ttttggttttttttttttttttggtgtttttttttttttttttttttttttttttttttttttttttttttttttttttttttttttttttagaaggggaagctggcccccccgaaaaaaaaacagaaaaaaggtgggactgggccctaacggaacagggaacccccccaaaaaaaacaaattttgggaaaccaagaagcaagggaccaacagggccggggccccaaaaaaatagggggggccccgggggaaccggggacaaaaaggggaaaaaccgggaatttacagggggcaaaacaggggaacttccttaggtttcccggggggggaaacccccttttcttgggcaaaaaaattgcccataccgccaccaagggaaaggcactccaggccgggggggaaagggacagcgggggaccctattgaaacggggggtttggagaaaaa

SEQ ID NO: 99281 - DNA, 243 bp, Oryza sativa
  Clone ID: PAT_MRT4530_97106C.1
atggaggacgaggcggcgcgcggcggcgagaccttcgatccggatctgatccgtgccatcttcaagctggtgtggagccggcggggcgagaggggcggcggcggcggcgatgccggcgacgaggtcatcgaggtcgagcctgccccggagacatcaaggaggaatcgtagtgccactggtaaatcaccttctgctacagtaaaacatgcgatttatgcgttttgctttgttacatctgattag

SEQ ID NO: 99282 - DNA, 344 bp, Oryza sativa
  Clone ID: PAT_MRT4530_97107C.1
gtgagctgggcgaggagtgggcggcggccgagtgcggcaggagggggtcgaggcggtggtccaggaagaaggcgagggggcaccaccgccgcggcgggggcggaggcggcggcggcgggctctgcaggagcagggaggaggcccccgcggggaggaagcgggtgatggtggtggtggaccagagctccggtgccaagcacgccatgatgtgggcgctcacccacgtcgccagcaagggggacttcctcaccctgctccacgtcctcccccacggcggcggcgacgcctccgcgctcgccaactccctcggctcactctgcaaggcctgcaagcccgaggaatga

SEQ ID NO: 99283 - DNA, 2044 bp, Oryza sativa
  Clone ID: PAT_MRT4530_97108C.1
gcattgggcagccgagtttatttccagactttcagaaggaaaaaagaggaacagaaacgtatataaattaaaaagaatcaaaagaatatcgcgaggaaagaatatagagcatacgtttctcttcttgtgatccgacccagcctaaactaaaaacagccacaggccatcactttcacaagaaacaattgaatatctatagttaactaatttaatcacaatcatgaaagtgatcgcatgcatcacaacttcacaagccaaacccccaagtacatgcacttgattccgtttcgtctccctgctagtcctcttgatcatggcacagctccttcctgagcctctgcgagaagagcttgcaggcgtccatgcagaggtcgacggcggcggcgagcgcgacgaacagcgccacgtcgcccatgcacgtggcgtgctgcacgccgacctgcacggtgggccggctggccctcccctcgccctccgccgtggagcccatcacgaagccgccggcgaacggccacgcggcgccggcggcgcccacggggaacgtggccgggtcgatgacgaactggccgccgcgcttggtgctgatggacgactcggcgatggggacggcgcactcggtggggcccgagtcgaacaccagctcgagccggtagccgagcgcgtcgacggggccgcgctcccgccacgcctccagccgcgcccacggcttccagctcgccggcccggcgccggtgggctgcaggatgagccaggcgccagggttggcgcgcgagacgcgccccgagcccgccggcgacggcacgaacggggtcaccatggacgccatggccaccggggagcccgacaggtcgtggatcgtcaccgtccaccccttgcgctgctcgcgccgcgcctgcgcgtcgcggtcgccgtgcagcgtgctcagccaagaccgcagcttcctgctggtgctccgagtcatggacgactccgacgtcaacgatctggtcctggttgccctccgcccagcgctgaaccggcaggtgaacaccggctgccgctggccaccgccggcggcgcccccgggcacctggtagacgaccggcccgcactccggctcgccgccgaactggaagacgtaccgtgggtcgggctcggcccgcacgaccatgtggatctgcgcgcgcgcgtggccgtgggacgccgccgccgcggccggcttgcccacgtccacccacccgtcgcgcgcgacgacggtctccccggccgcggcgcgcgccacgtcgacgggcacccgcaccctgcccagcgcgcggccggcgctcatgccgcagccggcgttccccttctgcccggcgtgcacggacacgacgagctcggcggcggggcgcgccgagagcctctgcaccgcggcggcgtcgaggcttatcaccacgggctccccggcggcgacggggcccggggactcggatgacgcgagcggcagctgcgcggtgcgggagtgggagccggcggaggggtggtcctggaggtggagcgtgcagaagcatggggaggtggaagggtggacgccggcggcgccggagctcgggcgcggcacggagggcagcttgaggaggagctggtccacggtgaggcggacgaacgcgcaggggtccatggcgccgcgcgctagctgcgctcgatcaccccggcccggtttgtcgcaggtgttatcgcggccgttgctgctgctgctcccctcgcgcgtgttatatgtagtggtggtgtagccgcgtgcggcccggtttgggtcgctgcgcatccttggctcgaggccagaggaaacaatcggtgcaatcatctcgtagctggctaggccacgcttcaccactccaccactccagcttcgaggctgtttattaccaacttcgatgagtgctccaccactccaatcaggtgctcggaagatgatatggtagtagtctctcgtatcttgaaaggagaggctcttgactatgatggacatgatgaccttggtgcaactcgtcctctcctccacctcggtgcacctctcccttgccat

SEQ ID NO: 99284 - DNA, 538 bp, Oryza sativa
  unsure (1)..(538): unsure at all n locations
  Clone ID: PAT_MRT4530_9710C.1
gttttagatttttaaaaaaaattttttttttttttttttttttttttttcaaaaaaacattaaagttcatcatttattcaccatatttatatatccttcctaacaaataaaaccactatttatttaccaaccccacatttttttacacacaggggggtttantaccctatttaccagttttttttaaacaaggataacctagccagtagcaaacaccacctttcccattgggaatttccactttccaaaaccccgggaggttcgcccccgccccctccaagtcccctttccggaagccgggaaacacctcggccatggggtccccaacatcggtggcccctatctccctgtaaatccctccaaccatgtggttgacccccgagcacctgcaccagttgtcgtcaaccgcgaaaagctgccggcaacaatcctgcccaaattgtttgtccacggcccccccgggtgccccctggcccacgcactggcgcttaaccaccccccggaagngtggcaacgaatacatcgggtagcccattcc

SEQ ID NO: 99285 - DNA, 321 bp, Oryza sativa
  unsure (1)..(321): unsure at all n locations
  Clone ID: PAT_MRT4530_97110C.1
cgccgcgccctcctactcatcggagcatggcngctcgcccagatagcncagctgaggctcgcgcgcttcatcgccatccattttcggagctattagattcggcaggtgatgttgtnatatatctccctatgcggatttcgncctccntgatccnccgnnnctgcctgnctctattccggagtcatncatcccnttntgtggcgttnctatcgttatgccgcgcatgctcggcatccggatacccgggcttcccggttcattcccgcattcgccaggctctgcttattctatatagtggcccatcctggatgctcccgattc

SEQ ID NO: 99286 - DNA, 2481 bp, Oryza sativa
  Clone ID: PAT_MRT4530_97111C.1
cctcccgtccataccacatttaattgcttaataagcaaacacttgcctgaacaaaaccaaaacctttacagggaaaaatttgaaggggttccaagggaggaccaaaaccatgttggaagggccaaaaaggtgatgaaggattgaaagccattggggaagccacccaaagaagggtgataaatcccattaactggcgggtccttcttttggagttcgattcaaaaaggccgggaaaaagcttatttgagacaaataaatcatgtgggcacaagttatcagtcaattccaccagcttactcaaacacagttatctcgtttggccccggaggatgctgagggcatacttttcccccatcaagacccgttagtaatatcagtggaaataacacagtgcgaagtgcaaagggtgttggtcgatggaggaagttcggcagatgtacttttctacgatgcatttaagaaaatgcaaattccagaagacagactaactcatgcaggaattcctttacaaggatttggtggtcagcaggtacatgcaatcggaaagatatcattacaagtggtgtttggaggaggagaaaataagagaagagaagaagtcgtgtttgatgtggtagacatgccatatcaatacaacgccattttgggaagatcaacaatcaacatttttgaagcaatcatacaccacaattacatctgtatgaagcttccggggccgaaaggggtcatctccgttcgaggtggtcaattagcagcaagaaaatttgagcttcaaggaactccaaatatgaaaggtgtacatattgttgaacaaaaacaaggagagtacaacaagaaccaaaagccagtaccagaagggaaaacaaagaaagtagtgttggacaaaaatgaacttgaaaaatacatcttgataggagaaaatttggagaaagaagttgaagaagaaatcttaaaagtggtaaaagccaacacggatgttttcgcatggtcaccggaagaacttgaaggagttgagagaagtctaattgaacacaatttagcaatcaagccagaacacaagcctaagaagcagaagttaagaaggatatcgatagataggcagcaagcagcaaaggcagaactagagaaattgttgaaggctaaagtcattcgagaggttatgcacctcgagtggctagcaaacccagttttggtgaaaaaaaagcaaatgggaagtggagaatgtgtattgacttcacagatctaaacaaggcatgtccaaaggacgattttccactcccaagaatagatcagttagtggatgccaccgctggttgtaagctaatgagttttcttgatgcttactctgggtatcaccaggtattcatggtaaaagaagatgaagaaaaaacatcattcataacaccttttggaacatactgctacataagaatgccatttggtctgaaaaatgcgggtgccacatttgcaagattgatatgcaaggttctggcaaatcaacttggccgaaacgtagaagcatatgttgatgacattgtggtgaaaagtaagaaagcttttacacatggaaaagacttacaagaaacgtttgagaacttgaggaagttttcagtgaagttgaatcctgaaaagtgcgtgtttggtgtcagagctggaaagttacttgggtttttagtatccaaaagaggaattgtgcaaaataggaatggagccacccaaaaatacaagagaaatgcaaagattaacagggagaatggcctcgcttagtagatttctttccaaatcagcagaaagaggtttaccctttttcaagacattaagaggggtaaacaactttgaatggaacgaagaatgccaaaaagattttgacgatctcaaagattaccttcataacatgccaactttgtcaagtccacaaaaaggagaacctttgttgctatatgtagctgccacactggtgacagtaagcgcagtcttagtacaagaacagggtaacaagcaaatgccagtttattttatgtccgaagcattgcaaggaccaaaaacaaggtatacagaagtggaaaagatgatatattctattgtgatggcatcaagaaaattgagacattatttcttatctcacgacataacagtaccatcaacttatccaataggagaggtgttgtcgaacaaggaaatagcaggaagaattgccaaatgggctatggaacttttgccttttgacttgaaatacacatcaagaacagcgataaagtcacaagtgttggcaaaatttgtggcagaatggaccccagcagagttagagaaaaagaaagaagaagaaaagccgtgggcagtcccctctcgtgcctaggtgaatccggaagcgacagaggccgtcgcagggcccgccctgctccatcacgcccacccttgcctggatgcgtcaactagaagaaagctacactacaggcctagccgttgcccacgctagcttat

SEQ ID NO: 99287 - DNA, 2370 bp, Oryza sativa
  Clone ID: PAT_MRT4530_97112C.1
ttacttcaccatagctgttgaggcgttgatgattaaggtgaggaacttgtatgcccgtggaacatcataatttggctcgtgagaaaatggcgactcgtcctcaatcgtaatatctgtcccacttggctcattagccttttgcttttcttcatctgaacttgaagatattccttgtaaatctgaaatcttggaaaccctgacatcttcttcaacacaattaatccatcgtatgttgaatctagaaatcctcgaatgcttcttagtggcatcacttaacgcaaactcagcggctctcttgtcagattcctctgcacccgcagcagctccaatttgtccaatgatctcttgaaggttcaacaggtgttcaatgccggtaagaatatcaccatactgttcccccctgtggacattgaattctatcttgagcttccggagatttggcattgcctccgcctgaaaagcaagacgcagcacaccacatctgaatttgaaatacttgagaactgggaatgccttgtcgttaaagacaattgtttcttcagtggattgctggacatccaatgagagaacagtgagctcctgtaacattgtgaggctatgaacatcactgcatagcagttctctaacaacaattttcagaatgcggagtctctttaactgtccgatccatttgggcagtctggaaaagatgcaaatggtaggtaataactcaagtctctgaagacagaggggcggagatgaaacgatgctcgagcaatccatgtacatgctcgtgcctgaagaaggagccagaataagagttcttagtttacgaagtttccctagagaagaagctagagcggtaagatttctcttcaggcggccagacaattctgtagagcagttgagataaagttcttgcaggttcgtcatctctccaagaccccacacattttgttcagagttattgctgaggtctaatgactctagcgtgcatagagatgccatgcagccaatgttgtcaggcagatttgccacatctcgaagacgtaagtgcaataatttcgggagatgaacaatatccgatggaacattcgctactcttgcatttagttgcagtgtttccaaatattgtaggctctgtacggtggctggtagcttaacgatcatatcagttgtaacctgcacgtatctcagttgtaacaatctgaaaattcctctgagatcaaactcctcttgatcatcccaaaattcaagtattagaactctaagttgcttgaactgcaaagtcgaaggcagacactcagctagtccatagaagttgagtgaccgagcttgtgacagtgatatgtgcaccggttttgttgcatatttggtattgctgacatggagagacaatcgacggaccttgaaattaagtcttgtaataggttgagagtaatctaatgcagtggtgaagttctcttcaacagacatgtccttgacaacatcaaataccatgtgatggactgtacaagacaacaccatgtcactgtaggttctgttattaggttgcatcattcccctgctgacaagctcatcaaaatagctatctgctactgcattggcatcttccctttctgtttccctgataaaatcttcagcagtccattgttttaccaaatcggccttccagattatgcacccctctggatacattgtaagatattgcagacaggtcttcaaacgacagggaagacatctgtagcaaaggcggactatatttctgagcttgtcttctgaagtgtgatttgttgccatactagaagataaatgtttctgcacatggtgccatagctccaagttgtccacttcgctcgccaagtctggctatattgataattcctagtggcagcccaccacaatttctgacaatttcagttgaaacttccctcaaccgttcagaacaattttgttcagagccgaatgcactgttcaagaacaagtttagagagtcatctctgctaagaggcttcatcttacagatatcgtcagattgataatcacagcactctagagctacatcctcaatagttgttgtcattaatattctactacagtcctgtcccttgggaaaagcactgttaatgatatcccaagatgttgtttcccataaatcatcaattacaatgaaatacctcttatcttgaatatgatcacgaatgttgtcaataaggtcttgcactgtgcagcgatcagccggtagtcgattatggcgtcgaaattgtgagagcatgcttcgaagaagccttttggtatctggcatccttgagacctgcacaaaagctcgacactcgaatcgccctcgaagttcgcagaacacttgtttggcaagcgcagtcttgcccacac

SEQ ID NO: 99288 - DNA, 2626 bp, Oryza sativa
  Clone ID: PAT_MRT4530_97113C.1
tttttttttttttttttttcaatcagcacgcgaaggcaacatgatcgatgaagtaaatcacatctctctctcccctcgtatgttcataacactcatctctgagagtttgcgttagtgtcatgacaaaataagttattgatacattaaaccaagacggaaaaggggtaaaattacacacgatcacttctagtacaacaaatttttttccttcaccacgaacataaccaacggcaaaactgtgttttgtctcttcttgaacatcttccccgcatgtaggttatcaaatttcactgcagtttgtctacggctagagttttgttactccttttaaacatcttccctcatggggttatcaaatttcactgcaataatttgtctacagctagagttccttcacccgtgcttttcatacctttttactcctcgacttcttataagcttcccattctcgcctaaccatccagttccttttcctcttccctccttggtcagtatctggcttcttttctttggttcctgatgttctcttgggaacagtttttttaattttagcagacacaggctgctttttttcacttgtaggctcttctttttcgttgtgtgtttcttttttaccactgccagggccattccgtttcttctcacccttcttatggtttttgagcgtcttttcaggcctatcatgtgtctgttgtttgtcctcagtcaccccatcaaggatggttgtctcttcattcatcttcttcacatctttgtgtatttttgactgaatgggctgttcttgaagatcgtcgctgctaggatcagtcttctcaattgcttcttcaggcactttagatgactcggatgtcactgggattgtattgctcaactttttcagctttgcaacaaaaaatccatccatgttgttcacatgaggataaaacctccttgttttatctaaagaagtatggaatcgatgctctcggaaccggatgaatcctggacgtccaaaatctaatccacaaggcacaagctttacgtttcgctttttaagggcatagtcaataactgcctcattctccggaatcatcaacgaacaggttgagtaaacaatgtaaccgccagttttggagttggcatcaaccaaatcaatagctgctaacaggagttgcttttgtacaaaagcgcagtctctgatgtcctcaatgcccttcgatgttttaatttgtgggtccttccaaatggtccctgtgcctgtgcagggcgcatccaaaagaactctgtcaaccgaattcatcccaagaactttgggtagctctttaccatcataattacaaactatggtattggtaacacccatgcgatgtatgttgcccaaaagtccatgcaaccttttctcattgaactcatttgcataaattattctcctataggagcaaaatgtactaaaaacaggcaaagcacactgaccagtattcttcataagagctccaatatatgtagtcttgccacctggggcagccgccatatcaacaattcgctccttctcctgaggagcaagagccatcacaggcaagaaagaacttgcaccttgtttcatataatgcccagccatatattcaacagtggcaccagctgaaatggtggagtcatatacaaccagaccaacctttgaccacttccctatcggatccagattaaatcctcttggtataagagcagcagcaagatcccttctccgggtcttcaatgtattcgtccgcaagcactcaggtggtcttttctcaaaagattccagtagctcaacaagctcaacagctgggaacatctcaataaatgcttcaacaagaaaatcattgtatccatagtatgacattacatcagtcttgagttgatcgacataatcctttcgcggcacatctttttgccttagcttactaaagtttgagagtacccggacaatttctgatatcctccttttaagatgtggcaggtttggtggtctaagtgcctcttcctccaactcctcctttgtaggcaatcggaactcatcagattctgatctaatattgagtttgagttcctcctcagcttcttcttctgccttccccttcgcttcatcaattgctcgtgacttagcctcaaggtcgtcagactcatctgaatccactccggagtcatctccttcggcactttcgtcgtcactacttccagcgaggaagtcgtcagcgagggggtcgtcgtcatcttcctcctcctcctcgtcatcgtcctcctcgtcgccgctgtctcctccctccaaggaggcatcgtcggagtcggagagctcctcggcgccggagtccgagggggcgtcgaggtccgaccctgactcatcctcctccacctcctggagccgctcctgctgctgctccagctcggagtcgtcggaggacggctcgagcagctcctgcttcttcttcggcgccctcttcgccgccttcgggggggccttccccttcttcgccacggccagttgccgcgccgccggcgccggctgctgcctgcgtggcgcgcccttcttcgccatgggaggagaccgagagagggagcggacgcttgccggcgaatggggaggagaagggaaaaaaaaaaccctaaaaca

SEQ ID NO: 99289 - DNA, 320 bp, Oryza sativa
  Clone ID: PAT_MRT4530_97114C.1
atcccctggaccaagctgttcgtcgtcgtcgtcggagtactacgccgccgagggttcgtcgtcggaccagggttactcggcgagggttctcggaggaggcctactacggcgtagcaagcaacagcaacccggggtatgacccgcgtgagctgaccagggcgagccaagtacgcggcgcaagctcccgtcgatgtcccggtttgagccccaccaagtcgcaagcatcttcgcccccgcccaagtattaagcctagctgccttccctcatagttagtaggatcacaccgtcctgtgtccaccaacgagatagtgaccaaacc

SEQ ID NO: 99290 - DNA, 2404 bp, Oryza sativa
  Clone ID: PAT_MRT4530_97115C.1
ggacgaaggcaatcacatactcccataactcatgtccgaaaagggccttagtattggtacattaaaccaagacggaaaagaaagggtaaaactacagacgatcacttcactagacttaagtacaacaaaaattttccttcgcctcgaacttgaaccaacgccaaaattgggtattctcgctccttctaacatcttccccgtatgggggttttcaaatttaactgcaatttgtctacggctagagctccttcatccgggcctttcatacttgtttactcctcgacttcttataagcttcccagtctcgcctcaccatccagtttcttttcctcttctctcctttgcccgtatccagcttctttcctttgttacctgatattctcttgggaacagatttttttattttagcagacacaggctgctttttttcacttgtaggctcttcttcgttgtgtgtttctttctggtctccctttattttagtactctcagggccattgcgtttcttacccttcttgtggttcttgagtgtctcatgtgtctgccttttgtccttagtcaccccatcaaggatgcttgtctcttcattcgtcgtcttcacatctttatgtttttttgactgaatgggctgtttttgaggatcgtcactgctaggatcagccttctcaattgcttcttcaggcacattagatgactcagatgccactgggatcgtattgctcaattttttaagcttcgcaacaaaaaaaccatccatgttgtttacatggggataaaatctccttgttttatctaaagaagtatggaatcgatgctctcggaaccggatgaatcctggacgcccaaaatctaatccacaaggtacaagctttacgtttctctttttaagggcatagtcaacaaccgcttcattctctggaatcatcaatgaacatgttgagtaaacaatgtaacctccagttttggagttggcatcaaccaaatcaatagcagctaatagcaattgcaatttcaaggtgattgaggtactcaaccagtatagaataacagctcgatttagaaaaaacttttgtacaaaagcacagtctctgatgtcctcaatgcccttcgacgttttaatttgtggatccttccaaatggtccctgtgcctgtgcagggtgcatccaaaagaactctgtcaaccgaattcatcccaagaactttaggtagctctttaccatcataattacaaactatggtattggtaacacccatgcgatgtatgttgcccaaaagtccatgcagccttttctcattgaactcatttgcataaattattccagtattcttcataagagctccaatatatgtagtcttgccacctggggcagccgccatatcaacaattcgctctttctcctgaggagcaagagccatcacaggtaagaaagaacttgcaccttgtttcatgtaatgcccagccatatattcaacagtggcaccagctgaaatggtggagtcgtatacaacaaggcctacctttgaccacttccctatcggatccagattaaatcctcttggtataagagcagcagcaagatcccttctccgggtcttcaatgtatttgttcgtaagcattcaggcggtcttttctcaaaagattccagtagttcaacaagctccacagctgggaacatctcaataaatgcttcaacgagaaaatcattgtatccatagtatgacattatatctgtcttcagctgattgacataatcctttcgcggcacatctttttgcctcagcttactaaagtttgagagtacccggacaatttctgatatcctccttttaagattcggcaggtttggtggtcgaagtgcctcttcctccaactcctcctttgtgggcaatcggaactcatcagattctgatctaatattgagcttgagctcctcctcagcctcttcttctgccttctctttctcttcatcaatcgctcgcgacttcgcctctaagtcatcagactcatctgagtccacaccagagtcgtctcctccgtcactttcgtcgtcactgccggcgaggaagtcgtcagcgagggggtcgtcgtcgccatcctcatcgtcttcctcctcctcctcgtcgccgctgtctcctccctcaaaggaggcgtcgtccgagtcggagagctcctcggcgccggaatcagaggggacgtcgaggtctgacccggactccacctcctgaagctgcccctgctgctgctccagctcggagtcgtcggaggacgactcgagcagcctctgcttcttgggcgccgccctcttcgccgccttcggggaggccttccccttcttccccgcggccagttgccgaggcggcggcggcggcggctgcctgcgcggcgcgcccttcttcgccat

SEQ ID NO: 99291 - DNA, 612 bp, Oryza sativa
  Clone ID: PAT_MRT4530_97116C.1
atgacggcgcctagatccgcgctggctgcaacgacgccagtgcgccgcctgcgagatgatgatgaggacgacaatgatggccgtgactggaactgccaccggttgcgacgacgccttgatccgccatcgggtggcctcaggcatgcggatccgtcgccgtgcggcatcgagcgcatggatctgccgccgatcgtcctcgggtgcttggatctgccgtgggtttgctcacaagcggtgacggctttgatcgataggtgcgttgataaactggcttcttttatgcccacgctgacaaaatcaacccatgagttctacgccgatagtgccgcagcgcagcatcccgcggcggcgccatccgtgttgggtgccgctttgagtgccttcgccgaccccttgccgccggggccagcacttctggccgggatttatttcgcatccccgaggcatccacgcagtactccagatggcgcaggcggtggcggtgcgctccagggcggcgtacagccgtacacactggtgttccggccacacgcacctgcgtgcgacgacgacctgcacgtcgctgtgacgccatcgttctccgcgtcggccgacgtctctgtgagcgagtaa

SEQ ID NO: 99292 - DNA, 474 bp, Oryza sativa
  Clone ID: PAT_MRT4530_97117C.1
agtaacaagaatacactctacttaccgttttgcaggttttcttaacactcttttggcattattcaggaaagcagaaatactgaaaccgtctcaagttttaaccaccagtgttggtcctgtccttttgcagcatagggaggtggttattgtattcatgtcatttgtagcaagttccgttgcccccttctatatttgaactgttggcgtatcaccatcacctcattgccaggcagcacactcgataaccttgggttgccaggcaacttgtagtcaacatttcataaaatcaccttttgcaatgtgatgcacagttatgtttaatgcaagtaaggaagtagtccataattaaggttgcttgtagctgtggatggaaggcctaaaatacattggtgatcttcctaagatacatttgtgatccggggagatatgcttttctgattgtcttaataaaatcgtagtgcgttttttccgctt

SEQ ID NO: 99293 - DNA, 990 bp, Oryza sativa
  Clone ID: PAT_MRT4530_97118C.1
atggcggcaattgcaaataatgacacatctgttgaagaagctgaacaacgcactattcaaagtatactcaaacaggacgagacagcagctgggattatatgccaactgaagattcgtcattatcagcatgcatcaaagctgccactgatgaaagatgtccttggtgtcgtagctaccttgggaaaaataaataatgacaacctcagcagggtactctcagagtacttgggattggacaatatgcttggtgtcgtctgcaagacttatgatggtgtcgagggtcttgaaacatatgacaaggaaggtatggttgataaaaccagtggcattcatggactaggtcgcacaattggaaaatttttagatggaagattcactgtcttttgtcttgaaaatataaggccattttctggtgattttatgatcgatgatcctcagaggaaacttcttttgcataaaccaaggttgcctagtggagagttcccacctggttttcttggttttgcagtaaatatgatacatttggaccaggcaaatttgagttgtctcacagctgggggccacggtcttagggaaactttattttacagcctgttttctcagttgcaagtctataagactagagctgaattgcgaaatgctattcctttgataaatgatggtgctgtttctcttgatgggtctatactaagacctaatggctcattctgcctaggtaatagggcaagcttaggaatacaatttcctgtaactgcaaatcttggggtctcaaacttacccgtaactatcactgaactggaggagcaagttaaacataagaattgggaaaaggaaaggcttctcgaggatataaaaagacaagaagatttgttgaaccaagttaaggatttgttcagcaagaaaaaggaacagttcatggcttatatcactcaaccaggaatgttacagtcaattgatgatcgtttgtttgatcaaattgtggctgattga

SEQ ID NO: 99294 - DNA, 1684 bp, Oryza sativa
  Clone ID: PAT_MRT4530_97119C.1
cttgtcaaaaactgtagtcgatatcagagatattctgcagtgctgattgtttaaccagctcacgccgctcgttgtacagatccaggttcttgcacggtacagggaaaacatagccaatgacctgcccctggacgaaggagcactggaaaacgtggttcttcctgtccaccaaaccgactgacatatcatggaaagtaacattcttcacggggatctctgcgctcccctgtatcctgactggtacacgcaccccatgtccatggattgaactgtacgagatgttctctatgatgggaactgccttggggtcgaagccttcgtccgggtgctcattgtagtcggtcttgatcacaatgccaactcggatgtgttctagggttatgttccggtacgtgatgttgcttacataggcccctcttccaggggcagtctttatcctcacacctcgccgtgaatcccagatatggacattctctaccaagacatttgaaacaccgccagacatctcacttcctatagatacaccagcactgaccatggagcggattgtgacgttgtgaataataatgttagtagatggacgcccataagcaattccatattggtcccaaccactctttatagcaatcccatcatcaccaacagaaatatagcagtttttaatcactacattctcacaagaatctggatctatcccatcagtgtttggagctccaacaattggagccaggatggtggtatctgatatagtaacatccttgcagtcatatatatgaagtgtccagaagggagaatcccgtagagtgatgttagaaatggtaatgttacttgaccgcatgagttgcacaagaggaccccttgtgtgattgaggactttcttccgaaatttgctccaccaactttgaccttgcccatttatggttccattttgtcctccagttatagtcacatccttgaggtcttgaccatgtataaggctcccatacctaggccccctgtgctctcttccgtacccatatgatggtaacggagacatcaacggccaatatctttcatcctggaccccgaggatctcagcgccggcggcgaggaatagcgtcatcctactggtgaggttgaacggcgcggtcagccacctcccggcgggcacgacgagcctcccgccgcctctctccgcgatggacgccaccgccgccacgaacgcctcggtgttgagcgtccgcccgtccccgacgcccccgaactccctcagatcgtagaccggcggcgcggccacccactgccccatcccctgggcggacggcgcgcgcttcggcagcagcggcgggcgggtgtagagccgcgcgcggcccaccgaggtgctctgccacaggaacacgagcgcgaacccgaccagccacagcgcgagcagcaccgccctgtacgacggcgagatcgccgccgcgccaccccaccgcctgtggtggtgccgcccgcccaccccgcccgcccgcggcgacgacgcgaccgacgccgaggaggcggcggcgcgcggggaggaggccgcggcgcgcggggaggaggcgacggccaccccggtctcccccatcggatctggcgcgcgggatctacggcgcgcaccggctggtcgtctgggccccgcggcccatggagcagggagacgcgcgctcaaaagagaaatcgt

SEQ ID NO: 99295 - DNA, 1482 bp, Oryza sativa
  Clone ID: PAT_MRT4530_9711C.1
atgagcatatcggtgaacgggcagtcggtggtgccaccggggttccggttccacccaacggaggaggagctcctgacatactacctgaagaagaaggtggcctcggagcgcatcgacctcgacgtcatccgcgacgtcgacctcaacaagctcgagccatgggacatccaagagaggtgcaggattgggtcagggccgcaaaacgactggtacttcttcagccacaaggacaagaagtacccgacggggacgaggacgaaccgggcaacggcggccggcttctggaaggccaccggccgcgacaaggccatctactccagctccaaccgcatcggcatgcgcaaaaccctcgtcttctacaagggccgtgccccccacggccagaaatcagactggatcatgcacgagtaccgcctcgacgacccctcctccgcctccgcctccgtctccgtcaacctcccctcctactactcttcctcctcatcgtcatcttccccaatgcacggtgtcgccggagaccaaggagctcaggaggaaggctgggtgatctgcagggtgttcaagaagaagaacctcgtgcaccacggcggcggcgccgccgcggcgagccaccacgcggcggccaagctcgcggcggcggccatggagggcagcccgagcaactgctcgacggtgaccgttagcgaccacgtcaaggcgcagatgctgcactcgtccgccagcgacgacgccctcgaccacatcctccagtacatgggccgctccggctgcaagcaggagaccaagccggcggcgatgtcggcgtcgtcggcggcagcggcggcggcgctggagcagcacctcagtacgcctcagtacggcaagttcatgaagcttccgccgctcgagcacgtcgccggcggcgtgggcctcctggcggcggccggcggcggcggcgagtactgctccgccgccgacgcgtcggggatcgccgactgggacacgctggaccggctcgcggcgtcgtacgagctcaacggcgccctctccgacgtcgcctccggcaagaacatggccggcttcttcgacgtcgtcgatcagcccgccggcgccgccgccttctcctccggcgacggcgacctgtggagccttgcgcgccttcatatacgggaggtggcaattaagataggcgtgcatggcgatggaggcgagcgacgtgtgcagggaaagggatgtgacgacccgagaggaaggttcgtcgcatgcggaaacgccgaaaagaggttgagagtgagacgacgcaagcggacgagccataaaaccgggtataacgccgcctccatccgccgtgacgaccgcggcgtgaggatgttgtacacaagttggaggtgcagccacgacgggagaaacaccttcacgggcacatcatcgtcgggcacctctgacgacggcggtgggagcttcacctcgggctccaacaataggggcggaagtcgagcttag

SEQ ID NO: 99296 - DNA, 486 bp, Oryza sativa
  Clone ID: PAT_MRT4530_97120C.1
ccggccgggaatctttggatcacggacttgccttctagtcactccttcaataacgctacgcgcttacaacattctcttagaccaacttacaacacagtccttcacaggcaaaccaaagtattccgaaaataccccaaaagtaacgtcttttctcgaaaaacaataaagatgaagttctcttcttccgccgttctcctggctgccgccatcggtgcctctgctcaccccagcggccacgctcaccagcgtgctcacgccaagcgcgacttcatcgtcgccaacaaacccgtcactgtctacgagactcacgttgtcactgctcccgccgctcccgacaccgctgttcctgaggctcccgctgatcctgctcccgttacctctcagaccaaggctgaacaagccgtacccaagtcctgggacaccggtctctggacctccgacgtttccaagctcaacaagggcccacaagaccagatccggcctcgg

SEQ ID NO: 99297 - DNA, 624 bp, Oryza sativa
  Clone ID: PAT_MRT4530_97121C.1
cgcgctcccgttcggcggcgagacggcctccgacgtgttcgccgccgtcctgcggggcaacctgaggttcccgccgaggctgttctccggcgtgtcgccggctgccaaggacctgatgcggcggatgatgtgccgcgacgtttacaggaggttttccgccgagccagtcctgaggcacccgtggatcgtgagcggagggggagcacgcgatgtgcagccgacctgaagaatccgtatcagatttcccaataatacggcttcttgtgtatacgcctttgtaaatgcgagtacgcctacgagagaggaagatgcattggtagaagaagtagagagtggagagtagtaaccctgtatacatcccaccacggagtggtgaggaggaggaggtcgctagcctctgtgtttttttcgctctttcttaagccctttttagttgccgctttttgcctgagagaagaacgcttgcttgtgtaatgggagtgctgctgtgaatactaacccctgcttgtataattaagatcgttaataaaaatgagagtggtctctcccaaaaaaaaaaaacaacaaaaaaaaaaaaaaaaaaaaaaaaaaaaaaaaaaaactcgagactagttctctctctcc

SEQ ID NO: 99298 - DNA, 1760 bp, Oryza sativa
  Clone ID: PAT_MRT4530_97122C.1
aaaacaaataaggtccagtctttttttatttgagattttcttgatactagtattttgtgataacaggatacattagcacactgttcttgtgatcagaacttcaggagcacaggactaatagtatatggggaatttgttctgaccataaaaagaacaacattttttattattttgcattattaatcggatcaatgcgccaaatacccccaacgtatacagcgagaagggaggtacatgatcactggtttagttccacagtccagcccatacaatcgtccacatgacccatctggaggcttgtaagtgaagtatacagctgctgacacaccacgcccactccttggttgccatattccaccctttgccccagataagttatgctccccacaggggacaccacaacagctgttcccgtgcagaaaacttcatcagcttcaagaagctcatccactgacacaaggcgctcctcaaccatgaagccttttctctgagcaacttcaagaatacttttccttgttataccaggcagtatggttccttttattgctggagtagaaataacattgcctttcacaataaagatattgcacgaagacacttcttccagatatttcttgtgaacggcatctagatagaggacatctgaatatcctttctgttttgcaatcctctgtgcttttaataccgaggcatagtttccaatggttttcactccgccagttccaccaggggcagcacggtgaaagttttcttctataatcaagttaataggggctaaaccttccttgaaatagttcccaacaggggagacaaaaatcataaaggtatactcaggagcaggtgcaagaccaaggacagctccacttcccataagcagcggccttatatacagggagcctttaccggttgggggcacccatcttttatttgccaaaacggtttgctttactgcatccacaaattgttcaagagttggtgcaggcatacacatcctctctgcaccatttctcatccttatggcattctcctccggacgaaacagcagaatgtatccatctgtttttctatatgcctttaagccctcaaacaagccctgtccataatttaagactccagcagatgggctcagttctataggtccaaatggtaccatttctcctttggaaaagttcccatctggcccgcattttgcaatatacataaaatctgtctggacaaggccaaaaccgaggttctcccagtccaaatcagccaccgcagaggtttccatgtagttagttgctagagaagcttggcatcctatcgcgcagtgagccttggagaaaggaggtggcactgaataagtgtgattcttgatcggaagcgacggcgtggagagagagaggtgaggacgccgctggccggcgagcggcggagacagcgggagggcgccgcgggaggtgaggtggagctccattcggtttgctctccgatgggtttgagcaggcggcggcggggggcgaagacgtcgtcaatgcgataaaatagcggcggccgcgagcgcaaaacacacacaaggctaactagttggtcccaccggtcattgactcgcgggaccagctgccgcagccatgccttgagctcggccagatccggcgcctcgtggccagctccgccagccacgacctcgccggcggccagctctggtgagaggaggttcaccggcgagtgcgggctccacgccgagcctgccgcccgcgggcccactagtttagagcgcc

SEQ ID NO: 99299 - DNA, 1377 bp, Oryza sativa
  Clone ID: PAT_MRT4530_97123C.1
agggatgcatgaaacgtgctgtcaatcacattgccactattacaacagttgcattagcacaatggcggcagcagagaggatttagcttagctagctgagctcagtcactggggagtggagctggagccgcatgtctgtgctgcccatcctgccggcgccgacgagcgtcaggccgtcggggtacacgtcgacgcggccgaaggcgtcggtgccgggcgggcactccagcgccgcctccagggtgcggtggtggacgccgcgggcgtcgacgccgtagccgcccctgtggtcgtggccggcgaggcacgccgcgacgcagccgtgccggtgcaccacgcgcatcacctcctcgtagttccacatcagccccgacggcgacgccgcgccggggtgcagcggcaggtggctgcacaccaccgccgcctcccgccgccgcgccgccccgcgcagcacgccgtccagccaccgcagctgcgcctcgccgacggcgccgttgaacatcacgaaccgccggtccacgccggcgaggccgctcgggctgttcttgtccgcgttcgggttcctctcgtccaagaacctcctcgccgccgccgccaccgggtggccgcgcggccatcccacggcgctgaagtcgtacgcgtcgaggacgacgaacctgtagcccgggaacggcgagaagtcgtagtaggcgcgccccgacggcatcctgagcagcgacacgagcttgctccggggaaggttgtagaggcagtggttgccgagcatgtggtaggccgggccatggaagcggtcgaactcggcgacgacggcctggacggcagccagcgacctgtccttggggcagaagccgtcgacgatgtcgccgaagttgacacagaagcggacgccgccgccggcgacgggatgcttgtggttgtgggcgttccaggagcggacggctctctgcaggatggtgaggctgtggcggtagtagcgggggacgccgaggaaggagcggccgtcggggatgtcggcgtactgcacgtcggcgatgacgccgaacgagaagaggggctccttgcccgccgccgtcgcccggaccgccacggcgttcggcggctgaaccagcatcggtcgtcgttgccgaatgattgccaatcggccggcgaccaccacaagcttgtcttcctctccggcgagctgtgaccactggccagtgacccatatgtaagtgaaacagctcgatgatcgtgcttcggcttgagcatcaccgtcaccagccatgtcaacatccacactgcccgtatggtttgcctcgtcgtccacgcggctccgccgccgccacatgtggggtttcgtgttatcttttattttcttcttgtgccacatcagcgccat

SEQ ID NO: 99300 - DNA, 251 bp, Oryza sativa
  Clone ID: PAT_MRT4530_97124C.1
gactaaaaaaatacaaccggggccttcataaattgcataaacatatgcctaacccaccatctactaaaatgtgctattaccactctcacttcataggatcattcattcatgcaaaactctaccatacactcagcccggtccacataatcaaaagacgaacaacaaactgcgcacacaactaaacaaggggttggtcataatcagatccaagttgaaccccataacatggctatataacaccatcactgctt

SEQ ID NO: 99301 - DNA, 202 bp, Oryza sativa
  Clone ID: PAT_MRT4530_97125C.1
cggacgcgtgggcggacgcgtgggcggacgcgtgggcggacgcgtgggcggccgagctgcggctagttgtgtgcgtgagagagagagagcgagctgcccatatatatagtgtcaaagccggccggcgacgatgccttccggctccgactccggctcctacgacccgctgctcgcactgggggacggcatggcggacggggat

SEQ ID NO: 99302 - DNA, 563 bp, Oryza sativa
  Clone ID: PAT_MRT4530_97126C.1
acagctgaccctgggcggcgaccggctctacgggagatccccgacgcgctgtgtatgctcgccgtcgtcccagccggacggctcgtcaaccttaccctttctatcaagtacttgacgtcgatgacaccgccgtgcttgcagatgctgaaggacggatgcctcactgcacggaataacgtgcattccgggctttgacaaccagcggctgccgacgaagcgcgcgtcgcttgacagggcactcgatagcgtgcccgacctcgagcgccatccacgtgcggtgcccctccggaactggcacctctgcccgcggagctcctcagacagcgtggactaggactactgcagcttacgtgacccacgccaccctgcacgagtgagcccggtggaggaggaggtcccctacgccgtgcatgttgcagaggggaagattgtgctagcgtgtcgcaccggcatttgatgttgcattcttggattctgtcgatgcgcacgagagtccactttgtgctctgccttctctgcacgggcgagttgttatggctgttacgcgtagatctcacgcttga

SEQ ID NO: 99303 - DNA, 249 bp, Oryza sativa
  Clone ID: PAT_MRT4530_97127C.1
atgggggaggtagtaggcgggaacgtgtgggtgaggggagaggcggagcgcgggatgcactggatcggcggacgcgtgtcggtacggacggctgtgatccacctgggggcagcctccggctacgcggcacccgtgaacgcgtgctactttccctcggttttggagcggaaattggagttggagctctaccagacaagcccgacagctctacaactccactccagacttaactcctggcgctacatttag

SEQ ID NO: 99304 - DNA, 963 bp, Oryza sativa
  Clone ID: PAT_MRT4530_97128C.1
atggccaaccgccccaacacgcacagtgatcaggacatgggaggttttgtcgccgagctcgcctgcatggcattcgtgattggttttacccaggagccggagtacaccaggattcaccccctcagtggcgagtttccgcatcaggttcgcttggaggtccatggcatcccttcctacctgcccaacatgacggtcacagctagtgggggcacgtttgatcatgcctgtgaagaagctactctcatgatgatggcaagactgcgagacctgcacgacaacgaccttcgtagcaccgcctaccgctactatccccgccgtggcgccaatgatgacaccagcaccttcaggtcttgcaggggagaggtcgacaccacctttggtcacatgcgaggggtgatgtgcagctacgacagggtctatgctgagcttcacaaggcgtccaaggccctcaacaatcagaagctagtcaggattgccagcctgcaggatgaggtcgctcgcctcaagagggagaatgctaggctgcagggacgtccagcagtggtaggagcccgcatccgcaccatgccgagcaagtctactacagcacctgtgcgcatccagttggtgcccaggaacccaccatccgggaacccgcctcctccaccttcagcacctcctatagcgcccgcagctcccactccagccccagcttcagcaccagcatcatcttcagctcccgcgcctgagttcgtcttcaccgatgctccagcttcagcctacaggggcccagccagtggcagtggaggttggttgcctgctactcccagtggcagccgcgaccacagcagcagttccagtagctcagagccgggcagtggcgagacgtacgtgcaggactccaggagccgctcagagggaccaggagatgagcaagaggacgccttcgactccatcgaccgcaggagccgttccgagcactag

SEQ ID NO: 99305 - DNA, 2442 bp, Oryza sativa
  Clone ID: PAT_MRT4530_97129C.1
atgcgtcaccgttctcttgctgctgctgcttctgcttctgcgccgccaccacaaatgccgccctcgttccacttccattggcgccaccatgctgctcgtcgcctctcctccaccaccgcctgcctccatccacctccactgcaacctcctcgagcgtcggcgtcggcgtcggcgtcgctcctcctccagctacaggaccacatcgccagcggccacctctcccgcgctcaccacctgttcgatcaaatccccagcccggacgttcgcacctacaacgacctcatccgagcctactcctcctcctcaccgaccgccgctgcggatggcctccacctataccgccgtatgctccgccaccgcgtcgcccctaacaactacaccttccccttcgccctcaaggcctgctctgcgctggccgaccaccactgcggccgcgccatccaccgccacgccatccacgcgggcctccaggccgaccttttcgtctccaccgccctcctcgacatgtacgtcaagtgcgcttgcctacccgacgccgcccacatcttcgccaccatgcccgccagggatctcgtcgcctggaacgccatgcttgccggctacgcgcaccatggcatgtaccaccacgcggttgctcacctcctcagcatgcagatgcagatgcatcggctcaggcccaacgcctccaccctcgtggcgctccttccgctccttgcccagcagggggcgctcgcccagggcaccagcgtccacgcctactgcattcgtgcctgcctccaccccaaccgcaacagcaagagcaagctgacggacggggtgctcctcggcaccgcgctcctggatatgtacgcaaagtgcgggagcctgctctatgctcgcagggtgttcgatgccatgcctgccaggaacgaggtcacctggagcgcacttatcggaggctttgtgctgtgcagcagaatgacccaggccttccttctgttcaaggccatgctagcccagggcctctgctttctttctcccacttccattgccagtgctctcagggcctgcgcctccctcgaccatctccgtatgggtgaacagctgcatgctttgcttgctaaatctggtgtccacgccgacttgactgcagggaactcacttctctcgatgtacgccaaggctggcttgattgaccaggcaatagctttgtttgatgagatggccgtcaaggacactgtctcctacagtgcgcttgtatcagggtatgtgcagaatggcagggcagaggaggcgttccttgtcttcaagaagatgcaggcatgcaatgtagaaccagatgctgcaacaatggtctcgctcatcccagcttgctcacacctggcggctttgcagcatggaaggtgcagtcatggttctgtcataatccgtggactcgcatcagagacttctatatgcaacgcgttaatagatatgtacgcaaagtgtgggcggatcgatctctccaggcaggttttcaacatgatgccatctcgggatattgtgtcatggaatactatgattgcaggatatggaatccatggactagggaaagaagccactgcattgttcttagagatgaataatctaggttttccaccagatggtgtcacattcatctgcttactttcggcttgcagccattctggacttgtgattgaagggaagcactggtttcatgtgatgggacacgggtatggtctaactcccaggatggagcactatatctgcatggttgatcttttgtcaagaggtggtttcctcgatgaagcctacgaatttatccagagcatgccactgagagcagatgttcgtgtgtgggtagccttgcttggagcttgccgggtttataagaacattgatttaggaaagaaggtgtcaaggatgatccaggagctagggcccgagggcaccggcaactttgttttgctgtccaacatatacagcgctgctgggagattcgatgaggcggcggaggttcggataatacagaaggtacagggttttaagaagagtccaggctgcagttggattgagataaacggctccctacatgcatttgttgggggagaccaatctcatccacaatcacctgaaatatatcgagagctggataacattctagtaggtattaagaaactgggttaccagcccgataccagttttgttttgcaagatctggaggaagaggaaaaggagaaggcactcatctgtcatagtgaaaagctagctatagcctatggtatcctgagtcttagtgaagataagaccatttttgttactaagaatctccgcgtttgtggggactgtcatactgtaatcaagcacataagcttagtgaagcgcagggctatcattgtacgagatgctaataggtttcatcatttcaagaatgggcaatgcagctgtggagatttttggtga

SEQ ID NO: 99306 - DNA, 1054 bp, Oryza sativa
  Clone ID: PAT_MRT4530_9712C.1
aagccctcctccttcctttggtccattttgctctctcccgagcccctagccacctccccatcacctgcccctctctcctgtaccgacggccatctccggccgcccctgccgcatcgcccgagcgccgtccggccgtgccgccgtcttctctggcatcgcagcagcctcctctcccccggcctgccctccgttttgcgcggagaccactggaggtgcgcccccgccggcaacagtggcgttgctgccactgtaccacctccagccgcctctgtctccttgcctgagcgccggccgacgtcgccaccacctccctcggctccgcgatgccgccatcatccccggcatcacctcctcctcgcccgaagctcgccggagtggcctcctcgtcggcgtccagtacctcccggtctccggtcggctcctgtacgtcgccggtacgccgatcgacgtcgccgtctcctccgtcgacgtcgcagcgttgtcctctcctccagctgctcctctgtttcgccggaacgccgtcgcccgtgccggcctctccatcctcgtcgtcgccaacgtccattcggccgccccttcctcctccccggctcgtcggctcgctgcgccgccaccgtcatcgtcatcgcagcggcgtgttcagcgccgtcctcttctccgtgcagccgctgctggctgccctcgtcgcctcctcaccggccccggtggtcatcatcgtcgtcctctcgtcgttcccggtcgtcgtggcgttcgtccctccgtcgagccgttctcgtccgtcgtccgcgtccgccaagcaagccgcggcagccccgtcctcgtcttcgtcctcgactccgcgtcgtcaagccttgtccaaggatcgccgccgaagtcgttccctcgccgttcgcctccgtcatccccgagctgtctccgccgcgcccgttcgtcgttgtcgttcccacgcctcgtcgcgtggtggtaaggatccgtcctctcgcttccccgtcctcgtccttttggtgtcgcgccgtacccgttgtgcggttgtcgaccccggtacccgtgtacc

SEQ ID NO: 99307 - DNA, 328 bp, Oryza sativa
  Clone ID: PAT_MRT4530_97130C.1
cctcattattcattttattttactggggggttttctttttcttttttttttttttcttacaggtttaaaagggttccaaatacgcgcacaaaaagcacgcaaaaaaaagtttacagattatgcaaaaagggggccagcgccacccgaaagagccccgcaagccaaggtacaaagaggaaaaaaccagaaacaagcgcgaaccggacaacacccccaccaaccccgaaagcccgggggtgtagggccgaccaagtgagccaagcagccccgatgcagccggaaaggaggcagacaccgccgaaaccccgttggaagggcaaccgggccc

SEQ ID NO: 99308 - DNA, 533 bp, Oryza sativa
  Clone ID: PAT_MRT4530_97131C.1
gctgcaggaatcggcacgaggctggtgcttggtttatttgcgggacatgttatttggtggccacttgattggcgaaccctttgttatccatatgtgtctgatgttttgtaatagctatatgataaccgccgttttactgaatgacttcaggatttttttttttttttatggttaccatctgcagatacgtgcagatttattagaaaacctcctgtattttgatatgactatctgctgaggtggatctttagtaagaaagaatccatgttgtactttgatctgtcttcaggttataatagtcagtgggatatgtatattgtttgattagaggacttacccacttccatccccaactcttgtacctagcatttgtagtttcatcgagccatccttgttgctagatacttcattttgcttggagtgagaatttcctctatggtcagacgctatatggttctgttgtgctcttgtgatttggttttcaacatttcttgtgtatgtacatctacatcattacacgttttgcttctagt

SEQ ID NO: 99309 - DNA, 1098 bp, Oryza sativa
  Clone ID: PAT_MRT4530_97132C.1
atggggaggcggcggcgctacttccggtgcggcacgaccatgctgacgatgctcctcttcgtcgtcaccaactccgcctccgttctcctatcctccggcgccggcgccttcctcctccgccgctacaagccggccaccgcccgcctttgggcatgggacgactccgccgcgctcctcgacgacctcaacgccacgcagtccgcgctcgccgacacccacgcccagctcgccgacctccacgcccgcctcggcaccgccaactccctcctcgagacgctcctcgcaaaaatggcggccgggcggcggaatataagcacgccgtgggctcgcgagctctccggcgaggctaaagcttgccgtcgcgccccaccggaaggtcaccggcaaggcgacggtgttcccggcgctgggacacgcgtgcgcccgcttccaggacgacctggaggcgtacatgagccgtcgccgctgacgaagagcctctgggccatcccgccggacaccaccgtcgtgtgggacgcgtaccggtgcaagaactactcgtgcctggtgcgcggcggcggcggcggcgagttcgacctgctcggccgggagaagcgccggtggatgcgcgacgacggcgcgctcgcctactccatcgacagcgtgctcgcggcgaggccgaacggcacggtgcgcatcgggctggacatcggcggcgtgtccggcacgttcgcggcgcggatgcgcgagcgcggcgtggccgtggcgaccacggccatgaactccggcgggccgtccggcagcctgatcgcgtcgcgggggctcgtgccggtgcacgtcggcccggcgcaccggctgccgttcttcgacggcacgctcgacatcgtgcactggacgtcgccggagcacgtcgccggcgtgatgctggagttcgcgctgttcgacatctaccgggtgctgaggccgggaggcttgctctggctcgaccacttcgtcttccccggcgagcagctgaacgcgacgttcgcgcccatggttgacagggttgggttcagaaggctacgatggaacaccggcaagaagctggtctccgcactgcttgagaaaccaatgacatga

SEQ ID NO: 99310 - DNA, 1218 bp, Oryza sativa
  Clone ID: PAT_MRT4530_97133C.1
atggggaggcggcggcgctacttccggtgcggcacgaccatgctgacgatgctcctcttcgtcgtcaccaactccgcctccgtcctcctctcctccggcgccggcgccttcctcctccgccgctacaagccggccaccgcccgcctctgggcatgggacgactccgccgcgctcctcgacgacctcaacgccacgcagtccgcgctcgccgacacccacgcccagctcgccgacctccacgcccgcctcggcaccgccaactccctcctcgagacgctcctcgccgccatggcggccgagcggcgggacggcggcacgccgtgggctcgcgagctctccggcgagctcgagctcgccgtcgcgccccaccggaacgtcaccggcaaggcgacggtgttcccggcgctgggacacgcgtgcgcccgcttccaggacgacctggaggcgtacatgaggtacacgcccggcggcgagtgcccctccgacgagcagctggcgcgccggctcatgctcaacggctgcgacccgctgccgcggcggcggtgccggccgcgttcgccggcggggtacgtgcagccgtcgccgctgacgaagagcctctgggccatcccgccggacaccaccgtcgtgtgggacgcgtaccggtgcaagaactactcgtgcctggtgcgcggcggcggcggcggcgagttcgacctgctcggccgggagaagcgccggtggatgcgcgacgacggcgcgctcgcctactccatcgacagcgtgctcgcggcgaggccgaacggcacggtgcgcatcgggctggacatcggcggcgtgtccggcacgttcgcggcgcggatgcgcgagcgcggcgtggccgtggcgaccacggccatgaactccggcgggccgtccggcagcctgatcgcgtcgcgggggctcgtgccggtgcacgtcggcccggcgcaccggctgccgttcttcgacggcacgctcgacatcgtgcactggacgtcgccggagcacgtcgccggcgtgatgctggagttcgcgctgttcgacatctaccgggtgctgaggccgggaggcttgctctggctcgaccacttcgtcttccccggcgagcagctgaacgcgacgttcgcgcccatggttgacagggttgggttcagaaggctacgatggaacaccggcaagaagctggtctccgcactgcttgagaaaccaatgacatga

SEQ ID NO: 99311 - DNA, 658 bp, Oryza sativa
  unsure (1)..(658): unsure at all n locations
  Clone ID: PAT_MRT4530_97134C.1
tgagaatcttgtttcggantcgtacaggaacatgggtatgttgctacactgcgcggagggatttacgaacgtgcacgtccattttatccatgtgtataggaactttgatgnttggacattgtaccttcttgagggtgctcaaagtgctaacgccnaacntatctttggtatacggatgttacntaccattttctggaacngctttgcttatttgtggtcagccggtacattggactccgnccnttgngctgagnccccaaaagtattcctccagtggccancctgaaaaattccgtagtgtcgacgttatggtattttgtttctanncccggtagtcccgtccattgtgcgaccggtgaggcgcgaaagcgtatgtgtgtcctacaaatttgtgagtcaccatcccagttggtagctccggccaacctgcaaggacaggtcaagtatccagaggcgactgatcgtaccgtgagttgtccgcatggtagccttgntcactgtacccggattgttattggtgagagtcatttgtgcaccattcttgggcaacctgtgtacatagtcatgcatatntgtatggatcatatggcgtcagaatcatcagataatataattgagacgttttccagttaaaaaaaaaaaaaaaaaaaaaaaaaaa

SEQ ID NO: 99312 - DNA, 1557 bp, Oryza sativa
  Clone ID: PAT_MRT4530_97135C.1
ttgaaaaaaaaaatgagagatgcgatcctggttgtcgtcgtcggcgttctgttcttgatggtcgccgttgttgtgatgacgaggttgggtgatggaggtgcggcgccgagcccgccggcgatgccggtgctcggccacctgcacctgatcaagaagccgctgcaccgctcgctggcggaggtcgccgcgcgggtgggggcggcgccggtggtgtcgctgcggctgggcgcgcggcgggcgctgctcgtgtcgacgcacgccgcggcggaggagtgcttcacggcgtgcgacgccgcggtggcggggaggccgcggctgctcgccggggacgtcctcgggtacggccacaccaccgtcgtgtgggcctcccacggcgaccactggcgcgcgctccgccgcctcctcggcgtcgagctcttctcgaacgcgcgcctcgccgcgctcgccgccgaccgccgggccgaggtcgcgtccctcgtcgacgccgtcctccgcgacgccgccgccggcggcggcggcggcggcacggtgacgctccggcccaggctgttcgagctggtgctcaacgtgatgctgcgcgcggtgaccgcgcgccgccacgccggcgacgagacgcgcaggttccaggagatcgtcgaggagacgttcgcggcgagcggctcgccgaccgtcggcgacttcttcccggcgctccggtgggtcgaccgtctccgcggcgtcgtggccaccctacaaagccttcagaaaaggcgcgacgcgttcgtcgccggcctcgtcgacgaccaccgccgaacacgccgcgccgccgccgccgccgccgacaaggatcagaagaagaacggcatcatcgacgccctcctcacgctgcaagaaaccgaccccgaccactacaccgacaatgtcgtcaagggcatcgtcctggtgctgctcaccgccggcaccgacacgtcggcgctgacaacggagtgggcgatggcgcagctggtggcgcacccggaggcgatgacgaaggtcagggccgagatagacgccaacgtcggcgcggcgcggctggtggaggaggccgacatggcgagcctcccctacctccagtgcgtcgtcaaggagaccctccggctccgccccgtcggcccggtgatcccggcgcacgaggccatggaggattgcaaggtgggtggctaccatgtccggcgtggcacgatgatcctcgtgaacgcgtgggcgatccaccgcgacggcgatgtctggggctcgccggaggagttcaggccggagcggttcatggacgacggcgccggcgccggcgcggtgaccgcggtcaccgcgcccatgctgccgttcgggctcggccggcggcggtgccccggcgaggggctcgccgtgcgcctcgtcggcctgacggtggcggcgctcgtgcagtgcttcgattgggagatcggcgaaggcggcgccgtcgacatggccgaaggcggcgggttgacgatgccaatggcgacgccattggcggctgtctgccggcctcgagagtttgtcaagactgtggtgtctgattgcttc

SEQ ID NO: 99313 - DNA, 162 bp, Oryza sativa
  Clone ID: PAT_MRT4530_97136C.1
atgaagatacaagctgtgctcgagcttgacgtgtgcgctaaggctgctagggcgctggatgctgccaaccctgctcgctcgcggagtcacgagcacggccaccgcagtatgaaaagcgccgaagacgcgggcttaagcctgacgagcatggtggccaattga

SEQ ID NO: 99314 - DNA, 528 bp, Oryza sativa
  unsure (1)..(528): unsure at all n locations
  Clone ID: PAT_MRT4530_97137C.1
gcacgaggttcctttcccccaccgcagagagcctggcgcgcggagacggcgacggcgccggaccagggagtggtggagcgacggcggggcgacagcgccgagcggcgggatgcgctcgccggcgcaccaccccctcctctcccccccgagcggcggggctgctcggagcagcagggcggcggcggcatgtcggcggcgggcagnacgacttggagcgggaagacggcgactgggcgtgattgcgaggcggncggtcggcgccctcctcccctggagttcggctgcttcgccccctctcctctctcctctagcggtggtgtgggtcccactgagctgaggagggcgcgcggttggacgacgaggcaaaggaatactagtcttcgcttttttgggttgaggctgaatgccacgtcggcccattgtgaatgccctttaacaaaacaagggtttatggctatgggatctggctgaggcattgacctaccttggtccttggcgagagagagagagagactccccctcactcct

SEQ ID NO: 99315 - DNA, 154 bp, Oryza sativa
  Clone ID: PAT_MRT4530_97138C.1
gctatcacgctccatgcacgcagctacgtacgtcttggtatcctcttttgttggccgcccttctttttttttttttaaaaaataactgatgcaggtttggaaatgtttttgagcagactcgaacgcagggtatttcatgtagagtacttctaag

SEQ ID NO: 99316 - DNA, 411 bp, Oryza sativa
  Clone ID: PAT_MRT4530_97139C.1
cccacgcgttcgaaaaaatctaaagaacaagcgaatcaaagctcagagaattatttctgtggcagtggtattagatatggttgtatgctccgccattgtgcaggtcgatcttaccggtgaaggagatggggaatattacggggggtacggtgacctgctacagtactggcggcttaggaaagatgaggacttcaaccgggacccatctggcctaaactacatcccgtggtggcgcgcagttgcctgtgaactgataaactaccaaaagtagccacagctggagctgctggagcagcactgtcactatctcgacataaagattatgcagggcatatgccacgagttacaagtgcagcagcttggcgagcttaactatgatgggaatctggttcaagctataattttgtagga

SEQ ID NO: 99317 - DNA, 342 bp, Oryza sativa
  Clone ID: PAT_MRT4530_97140C.1
atggaagacgccatcttctttgtggcgccattcttggccgccgcgaaggaggcggcgatggaagggagcggcgacgtggaagaggatagcaaggaggaggatgacgaggttcttcacggtgtacgacgggcatggcgggtcccacgtgcagaggtgtgccggaagcggatgcacgtggtgctcacggaggaggtgcgacttcggaagctgctgccaggcgacagcgatggcgttgatgtcaagaacaaggaccaggcccggtggaaggaggctatggcgacgtggttcaccagggtggatggcgaggtcgatggcaccgaggaggccgacacaggcgagtag

SEQ ID NO: 99318 - DNA, 546 bp, Oryza sativa
  Clone ID: PAT_MRT4530_97141C.1
aaaaaaaccaaaaaaacgggaaaactacggggtaaaaaaagcattacatatagaaaagggccctccaaattattgggtataaaccggaagagggaacaacggcccatatgtttttttaacttaccctaaaaaaaaaagtttatttataatctaaaaaccagctccaaacttaaagggaccaaacagggggccaaacacgggaacaagggtttttagtttttggggccaaaatccttaaaagggcaaatttgttcctcacccaggggaaacataaggggaacaataaaatccttcccctggggggatccatccttgatttgagaaagcaaagccttataactagggagcctcagggcatccttagggcccccactttcagggaggggggtgaaaaatccattttaaaaaagggcaatcaggtgaaaatcaaaacgggtcacgggggggacgtcacagttggggggggggggcacaatattttaaagctttttcccattgaaaatggcaagggccacaaaggggcattttggatggccatgcttccca

SEQ ID NO: 99319 - DNA, 219 bp, Oryza sativa
  Clone ID: PAT_MRT4530_97142C.1
atgaagcaagagaaggacaatacgattattgttcaagcattagcagcacctggaagtaatttcagaccaccccaaacgaggaaacggaatagaacttcttcatccaatggtgcgaaatcaaaagtggcatcgaccactggatcttcaggtccagctaatcctgaagatatgaacgatgtatttgagttcgccctgaacaacagtatattggatctgtag

SEQ ID NO: 99320 - DNA, 2951 bp, Oryza sativa
  Clone ID: PAT_MRT4530_97143C.1
atggccgagcaagcaaaggcgcacgacctctctccgagtgtgagtggcgacgacggggagccaaacccgcgccgtcgagctcgtactcccccacctcctccacgccaaagtcccaagcggggggaggcgctcgagagagtcgaaaaatccgcagcatcgccagtcgcgggtggtgcaggagaacggcgagatggggagcgtcgcctcctcgtctacggcgacggcagcacgcctcaaggcgcgcttcaggctgttggcgcgctcctacgtcacccgcctgtcgtccctgacccggagtctccagcccagcgatggctggacgacgtggccaacttggtcatgacggcacagcagcgcctgggtgctggtggacggtccgccaccaccaagaccttcggcgccgccacctccggctctgtgtcatcaaggcggagggcgcggcgagcggcggctgctgcacgccattcggctaccactccttcgtcggcgcctccgactcgggaggatcagcatgaagagccggatgcccgcctcgacatcgagcgccgacgtagtgatcggcgtgctccccgcgcaacggagggtgcctcttcgtccagggtgtcacctcgacatggacgtgaggaccagccctccgtgcccccggttggtggtgttggctgtagagcctttgtggcgagtcttcggaatgtccgttggcccccaaggttccggcccaccatcaccgagaagtatgatgggagcgtcaaccccaccgagtttctccaggtctatacgaccgggatcgaggccgctgggggagacgacagggtcatggcgaatttctttcccatggccctgaagggacaggcgcggggttggctaatgaacctgccacccgcgtcggtccactcctgggaggatctgtgccagcagttcaccatgaactttcaaggcacctatccacgcccagggggggtgtgcggcacaaccgcatgctcgaaaagatcgcctccaaagagccccagactaccgcagagctttttcagctcgcggaccgagtggctcgcaaggaggaggcctggacctggaacccctccggttccggagtggcagcttcggccgcccccggatccgccgctcagacagggcggcgtgacaggaggaggaagaagaggtcagcccattccgacgacgagggtcatgtcctcgctgtcgaaggcgcttcgctggccacccgaaaggggaggcctgcgagcgacaaaaagaaggaggccggcgctccctgacctcgactacttggaagagcgaaggcggcgcgcggccctccgagctgcgcgctaccagcagagcctgcggcgctaccatcagcgccacgtccgggcccgatcactctgcgtcgacgacctcgtcctacgccgcgtccaaacgcgtgctggattgagcaagctctcaccaatgtgggaggaagggggcccgaaggcctcggaagaagaaggaaaagctattaagattggcggaggcctgggggctcactccgatgcacccgggtcgccggcctcgtcgccactgtcgcccactccgccgtcatcgtcctcctcgtcggagttgagggcgaacgcgagccgaggattctgcccgaagagagagcagggaggagaggcccccgagccgaacggcggcccaaggcccccgacggccggagctggccctccgcttgcttgcccgacggtgccaggcgcccccgacccccaggatggccccgaggccactgcgggaaggccgcgcctgtcgccctctaaccccgaggtcgtcggcacagaagccgagtgcgccccgcgctgcctctcggatgaagagcgccctggagatgcggcctctagcgaagaggatcggccccgccgaaaggtgcagcggcccgtctactttgttagcgaggccctccgggacgccaaaacccgataccctcaggcccagaagatgctatacgctattctgatggctccgaaaaaagcgccatcaccatatctccaggcgaagcaaatcggctcacccagattcgtacgccgctcaagtgatatggcagtcttgaagagaccgcccattatggacagcaaagtcaccattaccaatgtgcgtgatttgagaccgttgggtattttgcccaactacggaaaccggtcccacctgtcaccaggctttagaggtggcgtcacacctgaccgcttccctggggaagggaaattgctctggcataacgccgggggctactgtcggtgatatgggaccgggagtatcatgaccagaggcttgaggcagacgcaatcgcccacgtggcctggcaccttcggggacgtcgggcccgagggtgaggtgtccgccctcctcctgatttccccccgaggggggggtcgggttgcgcttgccccggccccgagggccgaggcaccccgaccccctttaggaagtctgcgccactgcagcacggcgcgtccctttatccggtctgtgaccagtcacagaccggtcagatcacggacgatatttccacatacagagagagcgagagcttgagatttcaccctaagcccccggccgaactggcaaaggggggcctgcgcggtctcccggagagacatagcgttgtctctgatctcatcgggcacggattcgaggaggaagactaccctgtcgtcgactacgtattgacgaataaagagcaacaccggcttcggccaacaggagtagggctattacctatcatataagtggcccgaacctatataaatccttgtctccatctcttttacctcaatctcgcatataccatgataccaacaatcaccataccatgcaaataccgtaatcgtgacctgaaacgttgacacgtacccataaaaatcaagctgagcaaaaccggcggatgagagcgagatatttttagcaccacacccacgagaagtactactcgg

SEQ ID NO: 99321 - DNA, 153 bp, Oryza sativa
  Clone ID: PAT_MRT4530_97144C.1
atggaggaattttacgtcaatcaggcatacgtcaggactggatttccaactgccggtgaaaagcgcaaccccagaatgccgataaatctgcagaacaagtgcagtattgctactggtgctgaattgcagatgaaatcaatattgagcagttag

SEQ ID NO: 99322 - DNA, 5053 bp, Oryza sativa
  Clone ID: PAT_MRT4530_97145C.1
atggccgagcaagcaaaggcgcacgacctctctccgagtgtgagcggcgacgacggggagccaaacccgcgccatcgagctcgtactcccccacctcctccgcgccaaagtcccaagcggggggaggcgctcgagagagtcgaaaaatccgcagcatcgccagtcgcgggtggtgcaggagaacggcgagatggggagcgtcgcctcctcggcgacggcagcatgccccagggagtgcttcaggctgctggcgcgctcctacgtcacccgcccgtcgtccctgacccggagtctccagcccagcgatggctggacgacgtggccaacttggtcatgacggcacagcagcgcctgggtgctggtggacggtccgccactaccaggacctccggcgccgccaccaccggctctgtgtcatcaaggcggagggcgcggcgagcggcggctgctgcacgccattcggctaccactccctcgtcggcgcctccgactcgggaggatcagcatgaagagccggatgcccgcctcgacatcgagcgccgacgtagtgatcggcgtgctccccgcgcaacggagggtgcctcttcgtccagggtgtcacctcgacatggacgtgaggatcagccctccgtgcccccggttggtggtgttggctgtagagcctttgtggcgagtcttcggaatgtccgttggcccccaaggttccggcccaccatcaccgagaagtatgatgagagcgtcaaccccaccgagtttctccaggtctatacgaccgggatcgatgccgctgggggagacgacagggtcatggcgaatttctttcccatggccctgaagggacaggcgcggggttggctaatgaacctgccacccgcgtcggtccactcctgggaggatctgtgccagcagttcaccatgaactttcaaggcacctatccacgcccaggtgaagaagcggacttgcacgcagtacagcgaggggatgatgaatcccttcgctcgtacattcagcgtttctgccaagtccgcaatactataccttgcatccctgcacacgcggtgatctacgcgttcagggggggtgtgcggcacaaccgcatgctcgaaaagattgcctccaaagagccccagactaccgcagagctttttcagctcgcggaccgagtggctcgtaaggaggaggcctggacctggaacccctccggttccggtgtggcagcttcggccgcccccggatccgccgctcagacagggcggcgtgacaggaggaggaagaaaaggtcggtccattccggcgacgagggtcacgtcctcgccgtcgagggcgctccgcgggccacccgaaaggggaggcctgcgagcgacaaaaagaaagaggctggtactcccagcagggagcgcccagccagcaagtggtgctccgtccacaacacctccctccacgatctcgcggactgtcgcgcagtcaaaaacttggctgagcgaacgaggaagtgggaggaggacaggaggcaggaacgccgtgagggcaagtccgcggcagttccctccggtaaacggcgaagtgaggccagacagaaggcccccgccgttgacatcgatgacggtgatgatgacctaggtttccaagaacctggggccaccattgccactgtcgacgggggagcgtgtgctcacgtttctcgccggagtttcaaggccatgaggcgagagcttctcgccgcggcccctactcatgaggcgacgcgtcggtcgcggtggtcggaggtggccctcacctttgaccagaccgaccacccaccccaacttccgcacggagcgggtgaacttcgatgtggcggacctcagtctgccctacaacgcggtcctggggaggcccgcgttggtgaagtttatggcggcggtccactacgcctacctccagatgaagatgtcgggccccggtggccccatctctgtccgtggcgaccttaaagtcgcgctcgcttgcatggagcagcgcgcggaccacctcgctgctgcgaccaagcccgagggtggtgacgagaggcttggcacctccgcccccaccgccccgaggcagcggattgccacatgcgacgaggtcccggaagacgcgctcgtctccttcctgcgggcaaacgctgacgtcttcgcatggagaccagcggacatgcccggggtccccagggaggtgattgagcaccgtctcgccgtgcggccgggcgcaaggccggtccggcagaatgtacggcggcaggccccggaacgtcaagccttcatccgcgaggaggtggcgagacttctggaggccggattcatccgtgaagtcatccatccggagtggctggcgaacccggtggtcgttcccaaggcgaacggcaagcttcggatgtgcatcgactacaccgaccttaacaaggcatgtcctaaggatccttaccccctgcctcgcatagatcagatcgtcgactccactgcggggtgcgaccttttgtgttttctagatgcatactctggttaccatcagattcgcatggctagggaggatgaggagaaaactgcgttcattacccccgtaggaacctattgttatacatcaatgcccttcgggttaaagaatgcaggtcctacttttcaacgtactactcgaatttctttgggtagccaaataggacgtaatgttgaggcttatgtcgatgacttggttgtaaaaacgcgcaaccaagaaactttactttcagatctagtggaaacttttgagaacctccgctccgcccgcataaagctgaaccccgataagtgtgtgtttggtgtacctgcgggcaagcttctcgggttcttggtctctgcccgaggcattgaggccaaccccgagaagattcgagctatcgagcggatgcgcccccccagcaaacttagggatgtgcaatgcgtcaccggttgcatggccgccctaagtcgtttcatatcaaggctgggagagaaggcgctacccttgtttaagctcctcaagcgctcggggccgtttacttggacggaggaagctgaacatgccctcactcagttaaaggcatatctcagctctcccccggttctagtcgccccggagccaaatgagcccctgctactttacttagcggcgaccccccaagtagttagtgcagcgttggttgtggagcgcgatgaagacaatcctcatttcgtgcacccccattctgtgctaacttggcccgggagcgagcggggaggagaggcccccgagtcggacggtggcctacggcccctgacgaccggagccggccctctgcccgcttgtcagacggtgctaggtgcccccgaccctcaggagggccccaaggccactgcgggaaggccgcacttaacgccctttgaccccgaggctaaccctgtgctgactcgacccgggaaagagcagggagaagaggcccccgagccgaacggaggccagaggcccctgacgaccggagttggccctttgcccgcttgtccgacgatgccaggagcccccgacccccaggacggccccgaggccactgagggaaggccgcccctttcatcctccgaccccgaggtcatcggcacagaagacaagtgcgccccgaaaggccacttgaacgaagaacgccccggggatacggcccctagcagagaggatcggccccaccgaagggtgcagcggcctgtctactttgttagtgaggccctccgggacgctaagacccgataccctcaggcccagaagatgctttacgctattctgatggcctcgaggaaactgcgccattattttcaggcacatagggtcactgtggttacgtcttaccccctcggtcaaatcttgcataatcgagagggtacaggacgggtggtaaaatgggcaatcgagctttctgaattcgatctgcactttgaaccacgccacgctatcaagagccaggccctcgccgattttgtggcagagtggaccccggctccagagaccgtctcaatccccgaggccagcacgaacccctcgcagctgcctcacaccacccactgggtaatgcagttcgatggttctctgtccctccagggtgccgtcgatctggtccggcgatgcagagcgtgtcagttccacgccaagcaaatccatcagccggcccaggccctgcagatcataccactgtcatggccatttgctgtctgggggcttgatatcctgggaccgttcaaacgggccccgggcgggtttgagtatctgtatgttgcgatcgacaagttcactaagtggcccgaggcttatccggttgtcaagatcgataagcactctgctcttaaattcattaagggcatcacggcccgttttggagtgcctaaccgtattattacggataatggcacccaattcactagtgaactcttcggcgactactgcgaagacatgggcatcaagctctgcttcgcctcacctgcccaccccagaagcaatggccaagtggagcgcgccaatgcagaaatcctcaaaggccttaaaaccaagaccttcaatattctcaagaagcacggcgattcatggatcgaggagttgccagcggtgctctgggcaaaccgaaccacaccaagccgagcgaccggggaaacgcctttcttcctcgtctacggcgcagaagcggttctcccatccgagctcaccctgaggtctcctcgggccaccatgtactgcgaggctgatcaagatcagcttcgtagagatgacctcgactacttggaagagcgaaggcggcgcgcggccctccgagccgcgcgctaccagcagagcctgcggcgctaccatcagcgccacgtccgggcccgatcactctgcgtcgacgacctcgtcctacgccgcgtccaaacgcgtgctggactgagcaagctctcaccaatgtgggagggtccgtatcgagtgatcggcgtcccccggccgggctccgtacggctggccacgggcgacggcactgagctgccaaacccgtggaacatcgaacaccttcgtcgcttctacccctga

SEQ ID NO: 99323 - DNA, 216 bp, Oryza sativa
  Clone ID: PAT_MRT4530_97146C.1
cccacgcgtccgtccacgcatacgctgctaccagagaccgggacgtgtcagttagactgctggctcctatcaagggctagcgacaacccaaagaagtgtgattgtgtgtaaacatattccatgtgtaaatactgtcatgtgattgcctacttacagcggataattacctacgatgtgataataccgataccagcttgagataagggcggacgatat

SEQ ID NO: 99324 - DNA, 6051 bp, Oryza sativa
  Clone ID: PAT_MRT4530_97147C.1
atggccgagcaagcaaaggcgcacgacctctctccgagtgtgagcggcgacgacggggagccaaacccgcgccatcgagctcgtactcccccacctcctccgcgccaaagtcctaagcggggggaggcgctcgagagggttgaaaaacccacagcatcaccagtcgcaggtgatgcaggagagcggcgagacggggagcgtcgcctcctcgtctacggtgacggcagcacgccccagggagcgcttcaggctgctggcgcgctcctacgtcacccgcccgtcgtccctgacccggagtctccagcccagcgatggctggacgacgtggccaacttggtcatgacggcacagcagcgcctgggtgctggtggacggtccgccaccaccaggacctccggcgccgccacctccggctctgtgtcatcaaggcggagggcgcggcgagcggcggctgctgcacgccattcggctaccactccctcgtcggcgcctccgactcgggaggatcagcatgaagagccggatgcccgcctcgacatcgagcgccgacgtagtgatcggcgtgctccccgcgcaacggagggtgcctcttcgtccagggtgtcacctcgacatggacgtgaggaccagccctccgtgcccccggttggtggtgttggctgtagagcctttgtggcgagtcttcggaatgtccgttggcccccaaggttccggcccaccatcaccgagaagtatgatgggagcgtcaaccccaccgagtttctccaggtctatacgaccgggatcgaggccgctgggggagacgacagggtcatggcgaatttctttcccatggccctgaagggacaggcgcggggttggctaatgaacctgccgcccgcgtcggtccactcctgggaggatctgtgccagcagttcaccatgaactttcaaggcacctatccacgcccaggtgaagaagcggacttgcacgcagtacagcgaggggatgatgaatcccttcgctcgtacattcagcgtttctgccaagtccgcaatactataccttgcatccctgcacacgcggtgatctacgcgttcagggggggtgtgcggcacaaccgcatgctcgaaaagattgcctccaaagagccccagactaccgcagaactttttcagctcgcggaccgagtggctcgtaaggaggaggcctggacctggaacccctccggttccggtgtggcagcttcggccgcccccggatccgccgctcagacagggcggcgtgacaggaggaggaagaaaaggtcggtccattccggcgacgagggtcacgtcctcgccgtcgagggcgctccgcgggccacccgaaaggggaggcctgcgagcgacaaaaagaaagaggctggtactcccagcagggagcgcccagccagcaagtggtgctccgtccacaacacctccctccacgatctcgcggactgtcgcgcagtcaaaaacttggctgagcgaacgaggaagtgggaggaggacaggaggcaggaacgccgtgagggcaagtccgcggcagttccctccggtaaacggcgaagtgaggccaaacagaaggcccccgccgttgacatcgatgacggtgatgatgacctaggtttccaagaacctggggccaccattgccactgtcgacgggggagcgtgtgctcgcgtttctcgccggagtttcaaggccatgaggcgagagcttctcgccgcggcccctactcatgaggcgacgcgtcgggcgcggtggtcggaggtggccctcacctttgaccagaccgaccacccaccgtgcgttgcccggggagggcagattgcgatggtggtttctcccaccatctgcaatgtgaagttggggcgtgtcctcatagatggaggagcggctctcaacatcctttcccccgcggcctttgatgctatcaaggccccggggatggtgctccagccgtctcaaccgatcatcggtgtgacgccggggcacacatggccgttaggtcacatcgacctaccggtcacctttggtggatcagccaacttccgcacggagcgggtgaacttcgatgtggcggacctcagtctgccctacaacgcggtcctggggaggcccgcgttggtgaagtttatggcggcggtccactacgcctacctccagatgaagatgccgggccccggtggccccatctctgtccgtggcgaccttaaagtcgcgctcgcttgcatggagcagtgcgcggaccacctcgctgctgcgaccaagcccgagggtggtgacgagaggcttggcacctctgcccccaccgccccgaggcagcggattgccacatgcgacgaggtcccggaagacgcgctcgtctccttcctgcgggcaaacgctgacgtcttcgcatggagaccagcggacatgcccggggtccccagggaggtgattgagcaccgtctcgccgtgcggccgggcgcaaggccggtccggcagaaagtgcggcggcaggccccggaacgtcaagccttcatccgcgaggaggtggcgaggcttctggaggccggattcatccgtgaagtcatccatccggagtggctggcgaacccggtggtcgttcccaaggcgaacggcaagcttcggatgtgcatcgactacaccgaccttaacaaggcatgtcctaaggatccttaccccctgcctcgcatagatcagatcgtcgactccactgcggggtgcgaccttttgtgttttctagatgcatactctggttaccatcagattcgcatggctagggaggatgaggagaaaactgcgttcattacccccgtaggaacctattgttttacatcaatgcccttcgggttaaagaatgcaggtcctacttttcaacgtactactcgaatttctttgggtagccaaataggacgtaatgttgaggcttatgtcgatgacttggttgtaaaaacgcgcaaccaagaaactttactttcagatctagcggaaacttttgagaacctccgctccgcccgcataaagctgaaccccgataagtgtgtgtttggtgtacctgcgggcaagcttctcgggttcttggtctctgcccgaggcattgaggccaaccccgagaagattcgagctatcgagcggatgcgcccccccagcaaacttagggatgtgcaatgcgtcaccggttgcatggccgccctaagtcgtttcatatcaaggctgggagagaaggcgctacccttgtttaagctcctcaagcgcacggggccgtttacttggacggaggaagctgaacatgccctcactcagttaaaggcatatctcagctctcccccggttctagtcgccccggagccaaatgagcccctgctactttacttagcggcgaccccccaagtagttagtgcagcattggttgtggagcgcgatgaagacaatcctcatttcgtgcacccccattctgtgctaacttggcccgggagcgagcggggaggagaggcccccgagtcggacggtggcctacggcccctgacgaccggagccggccctctgcccgcttgtcagacggtgctaggtgcccccgaccctcaggagggccccaaggccactgcgggaaggccgcacttaacgccctttgaccccgaggctaaccctgtgctgactcgacccgggaaagagcagggagaagaggccccccgagccgaacggaggccagaggcccctgacgaccggagagcccccgacccccaggacggccccgaggccactgagggaaggccgcccctttcatcctccgaccccaaggtcatcggcacagaagacaagtgcgccccgaaaggccacttgaacgaagaacgccccggggatacggcccctagcagagaggatcggccccaccgaagggtgcagcggcctgtctactttgttagtgaggccctccgggacgctaagacccgataccctcaggcccagaagatgctttacgctattctgatggcctcgaggaaactgcgccattattttcaggcacatagggtcactgtggttacgtcttaccccctcggtcaaatcttgcatgatcgagagggtacagggcgggtggtaaaatgggcaatcgagctttctgaattcgatctgcactttgaaccacgccacgctatcaagagccaggccctcgccgattttgtggcagagtggaccccggctccagagaccgtctcaatccccgaggccagcacgaacccctcgcagctgcctcacaccacccactgggtaatgcagttcgatggttctctgtccctccagggtgccggtgcgggggtcacgttgacctccccgaccggagacgtccttagatatctggtccgcctcgactttcgagcgaccaataatatggcagagtacgagggactccttgccggactcagggtggcagccggactggggatccgccgtctcctagtgttaggcgattcccagctggtcgttaaccaggtctgtaaggagtaccggtgctctgacccgcaaatggacgcctatgtacgccaagtgcggcgtatggagcgccattttgacgggatagagcttcggcatgtgcccagacgggataacatgatagccgacgaactctcacggctcgcgtcctcgcgagcccagaccccaccgggcgcctttgaagaaaggcttacccagccgtcggcgcgacccgaccccttaggggagacggatgcgcctgaccggcccccgaggcccgtcggagtccaggcctcgggacccgaagggagcgctccaagctcccttagattgattgcttggatctctgagatccaaacataccttacagataagactctacctgaggaccgcgaagggagtgaacgcgtacaacgcatttccaaacgctatgtgctggtagaagggaccctctatcggcgcgcggctaacggaatcctcctgaagtgcattcctcaggaacaaggcgttgagcttcttgctgacatccatgagggcgagtgcggagcccattccgcctcgcgcaccctggttggcaaggcctttcgtcaaggattttattggccgacagctctcaatgatgcagtcgatctggtccggcgatgcagagcgtgtcagttccacgccaagcaaatccatcagccggcccaggccctgcagatcataccactgtcatggccatttgctgtctgggggcttgatatcctgggaccgttcaaacgggccccgggcaggtttgagtatctgtatgttgcgatcgacaagttcactaagtggcccgaggcttatccggttgtcaagatcgataagcactctgctcttaaattcattaagggcatcacggcccgttttggagtgcctaaccgtattattacggataatggcacccaattcactagtgaactcttcggcgactactgcgaagacatgggcatcaagctctgcttcgcctcacctgcccaccccagaagcaatggccaagtggagcgcgccaatgcagaaatcctcaaaggccttaaaaccaagaccttcaatattctcaagaagcacggcgattcatggatcgaggagttgccagcggtgctctgggcaaaccgaaccacaccaagccgagcgaccggggaaacgcctttcttcctcgtctacggcgcagaagcggttctcccatccgagctcaccctgaggtctcctcgggccaccatgtactgcgaggctgatcaagatcagcttcgtagagatgacctcgactacttggaagagcgaaggcggcgcgcggcccttcgagccgcgcgctaccagcagagcctgcggcgctaccatcagcgccacgtccgggcccgatcactctgcgtcgacgacctcgtcctacgccgcgtccaaacgcgtgctggactgagcaagctctcaccaatgtgggagggtctgtatcgagtgatcggcgtcccccggccaggctccgtacggctggccacgggcgacggcactgagctgccaaacccgtggaacatcgaacaccttcgtcgcttctacccctga

SEQ ID NO: 99325 - DNA, 6144 bp, Oryza sativa
  Clone ID: PAT_MRT4530_97148C.1
atgcgctacggtggggcagccgttgaggtagggccgcgaggtgtgccctacatcggtgtcgccattgccgaagaccttatcaagaacgcacaggtgcaggccatcatcgtcaccacggaagcgcatacggccgtggttgcccgccttcgccgccgccaccgcgtccccatcctcgccttccccatctccggcggctctcctccgccgtcacatcatccaccccaccatgcaacggcgacggcgccgccgttcggcgccgatcacacttcagccaaggcggcgctcaccggcatcctcaccgccatattctcatcagcacggcgcgcaggcggctcgccgccccatggccgccgctacaacgccggcgctccgactggtcgtcgtctcgaccgccggcgattggcggggagaaggtcatcatcgtcatcgtcatcaggcgaggttctgaggatcgccgtgccgcggaagaccgggttccaggctttcgtcgacatggaatcgcccacgtggcctggcaccttcggggacgtcgggcccgagggtgaggtgtccgccctcctcctgatttccccgagggggggtcgggttgctcctgccccgaccccgagggccgaggtgccccgaccccctgtgggcctaatggccgagcaagcaaaggcgcatgacctctctccgagtgtgagcggcgacgacggggagccaaacccgcgccatcgagctcgagaacggcgagatggggagcgtcgcctcctcgtctacggcgacggcagcacgccccagggagtgcttcaggctgctggcgcgctcctacgtcacccgcccgtcgtccctgacccggagtctccagcccagcgatggctggacgacgtggccaacttggtcatgacggcacagcagcgcctgggtgctggtggacggtccgccactaccaggacctccggcgccgccaccaccggctctgtgtcatcaaggcggagggcgcggcgagcggcggctgctgcacgccattcggctaccactccctcgtcggcgcctccgactcgggaggatcagcatgaagagccggatgcccgcctcgacatcgagcgccgatgtagtgatcggcgtgctccccgcgcaacggagggtgcctcttcgtccagggtgtcacctcgacatggacgtgagggccagccctccgtgcccccggttggtggtgttggctgtagagcctttgtggcgagtcttcggaatgtccgttggcccccaaggttccggcccaccatcaccgagaagtatgatgggagcgtcaaccccaccgagtttctccaggtctatacgaccgggatcgaggccgctgggggagacgacagggtcatggcgaatttctttcccatggccctgaagggacaggcgcggggttggctaatgaacctgccacccgcgtcggtccactcctgggaggatctgtgccagcagtttaccatgaattttcaaggcacctatccacgcccagggcggcgtgacaggaggaggaagaaaaggtcggtccattccggcgacgagggtcacgtcctcgccgtcgagggcgctccgcgggccacccgaaaggggaggcctgcgagcgacaaaaagaaagaggctggtactcccagcagggagcgcccagccagcaagtggtgctccgtccacaacacctccctccacgatctcgcggactgtcgcgcagtcaaaaacttggctgagcgaacgaggaagtgggaggaggacatgaggcaggaacgccgtgagggcaagtccgcggcagttccctccggtaaacggcgaagtgaggccagacagaaggcccccgccgttgacatcgatgacggtgatgatgacctaggtttccaagaacctggggccaccattgccactgtcgacgggggagcgtgtgctcacgtttctcgccggagtttcaaggccatgaggcgagagcttctcgccgcggcccctactcatgaggcgacgcgtcgggcgcggtggtcggaggtggccctcacctttgaccagaccgaccacccaccgtgcgttgcccggggagggcagattgcgatggtggtttcccccaccatctgcaatgtgaagttggggcgtgtcctcatagatggaggagcggctctcaacatcctttcccccgcggcctttgatgctatcaaggccccggggatggtgctccagccgtctcaaccgatcatcggtgtgacgccggggcacacatggccgttaggtcacatcgacctaccggtcacctttggtggatcagccaacttccgcacggagcgggtgaacttcgatgtggcggacctcagtctgccctacaacgcggtcctggggaggcccgcgttggtgaagtttatggcggcggtccactacgcctacctccagatgaagatgccgggccccggtggccccatctctgtccgtggcgaccttaaagtcgcgctcgcctgcatggagcagcgcgcggaccacctcgctgctgcgaccaagcccgagggtggtgacgagaggcttggcacctccgcccccaccgccccgaggcagcggattgccacatgcgacgaggtcccggaagacgcgctcgtctccttcctgcgggcaaacgctgacgtcttcgcatggagaccagcggacatgcccggggtccccagggaggtgattgagcaccgtctcgctgtgcggccgggcgcaaggccggtccggcagaaagtgcggcggcaggccccggaacgtcaagccttcatccgcgaggaggtggcgagacttctggaggccggattcatccgtgaagtcatccatccggagtggctggcgaacccggtggtcgttcccaaggcgaacggcaagcttcggatgtgcatcgactacaccgaccttaacaaggcatgtcctaaggatccttaccccctgcctcgcatagatcagatcgtcgactccactgcggggtgcgaccttttgtgttttctagatgcatactctggttaccatcagattcgcatggctagggaggatgaggagaaaactgcgttcattacccccgtaggaacctattgttatacatcaatgcccttcgggttaaagaatgcaggtcctacttttcaacgaactactcgaatttctttgggtagccaaataggacgtaatgttgaggcttatgtcgatgacttggttgtaaaaacgcgcaaccaagaaactttactttcagatctagcggaaacttttgagaacctccgctccgcccgcataaagctgaaccccgataagtgtgtgtttggtgtacctgcgggcaagcttctcgggttcttggtctctgcccgaggcattgaggccaaccccgagaagattcgagctatcgagcggatgcgcccccccagcaaacttagggatgtgcaatgcgtcaccggttgcatggccgccctaagtcgtttcatatcaaggctgggagagaaggcgctacccttgtttaagctcctcaagcgctcggggccgtttacttggacggaggaggctgaacatgccctcactcagttaaaggcatatctcagctctcccccggttctagtcgccccggagccaaatgagcccctgctactttacttagcggcgaccccccaagtagttagtgcagcgttggttgtggagcgcgatgaaaacaatcctcatttcgtgcacccccatcctgtgctaacttggcccgggagcgagcggggaggagaagcccccgagtcggacggtggcctacggcccctgacgaccggagtcggccctctgcccgcttgtcagacggtgctaggtgcccccgaccctcaggagggccccaaggccactgcgggaaggccgcacttaacgccctctgaccccgaggctaaccctgtgctgactcgacccgagaaagagcagggagaagaggcccccgagtcgaacggaggccagaggcccctgacgaccggagttggccctttgcccgcttgtccgacgatgccaggagcccccgacccccaggacggccccgaggccactgagggaaggccgcccctttcatcctccgaccccgaggtcatcggcacagaagacaagtgcaccccgaaaggccacttgaacgaagaacgccccggggatacggcccctagcagagaggatcggccccaccgaaaggtgcagtggcctgtctactttgttagtgaggccctccgggacgctaagacccgataccctcaggcccagaagatgctttacgctattctgatggcctcgaggaaactgcgccattattttcaggcacatagggtcactgtggttacgtcttaccccctcggtcaaatcttgcataatcgagagggtacaggacgggtggtaaaatgggcaatcgagctttctgaattcgatctgcactttgaaccacgccacgctatcaagagccaggccctcgccgattttgtggcagagtggaccccggctccagagaccgtctcaatccccgaggccagcacgaacccctcgcagctgcctcacaccacctactgggtgatgcagttcgatggttctctgtccctccagggtgccgagtatgagggactccttgccggactcagggtggcagccggactggggatccgccgtctcctggtgttaggcgattcccagctggtcgttaaccaggtctgtaaggagtaccggtgctccgacccgcaaatggacgcctatgtacgccaagtgcggcgtatggagcgccattttgacggaatagagcttcggcatgtgcccagacgggataacatgatagccgacgaactctcacggctcgcgtcctcgcgagcccagaccccaccgggcgcctttgaagaaaggcttacccagccgtcggcgcgacccgaccccttaggggagacggatgcgcctgaccgacccccgaggcccgtcggagtccaggcctcgggacccgaagggagcgctccaagctctcttagattgatcgcttggatctctgagatccaaacatacctcacagataagactctacctgaggaccgcgaagggagtgaacgcgaacaaggcgttgagcttcttgctgacatccatgagggcgagtgcggagcccattccgcctcgcgcaccctggttggcaaggcctttcgtcaaggattttattggccgacagctctcaatgatgcagtcgatctggtccggcgatgcagagcgtgtcagttccacgccaagcaaatccatcagccggcccaggccctgcagatcataccactgtcatggccatttgctgtctgggggcttgatatcctgggaccgttcaaacgggccccgggcgggtttgagtatctgtatgttgcgatcgacaagttcactaagtggcccgaggcttatccggttgtcaagatcgataagcactctgctcttaaattcattaagggcatcacggcccgttttggagtgcctaaccgtattattacggataatggcacccaattcactagtgaactcttcggcgactactgcgaagacatgggcatcaagctctgcttcgcctcacctgcccaccccagaagcaatggccaagtggagcgcgccaatgcagaaatcctcaaaggccttaaaaccaagaccttcaatattctcaagaagcacggcgattcatggatcgaggagttgccagcggtgctctgggcaaaccgaaccacaccaagccaagcgaccggggaaacgcctttcttcctcgtctacggcgcagaagcggttctcccatccgagctcaccctgaggtctcctcgggccaccatgtactgcgaggctgatcaagatcagcttcgtagagatgacctcgactacttggaagagcgaaggcggcgcgcggccctccgagccgcgcgctaccagcagagcctgcggcgctaccatcagcgccacgtccgggcccgatcactctgcgtcgacgacctcgtcctacgccgcgtccaaacgcgtgctggactgagcaagctctcaccaatgtgggagggtccgtatcgagtgatcggcgtcccccggccgggctccgtacggctggccacgggcgacggcactgagctgccgaacccgtggaacatcgaacaccttcgtcgcttctacccctga

SEQ ID NO: 99326 - DNA, 463 bp, Oryza sativa
  Clone ID: PAT_MRT4530_97149C.1
aaaaagcgtgtcacaagtatccaaaatttaatcttccccttacacaagaaacgaacaggccgtgttctaaacataaaaaaacatcattttatacgcactagcgcctcatggccgtccatgttggatggctctggccaggaaattataaatttcaatatgattcactttgtttattgattttggattactaagcaagcaagcaaacacttgttgacgagcatcgaccgatcgacggttgacctaagtcaaggcttcaagcttttgttgacgagcacgcacgcagcacgtggtccggcgtgacggcggcccagaactcgccgtcgagctccagcgccgccatgtgctccggcgccagcaccacctccgcgttgacgccgtctccgccgttccgcgccgggtacagtgacgccttcccgtcggacttgttcgcctttccggttcgggccggcaccgtctttcccca

SEQ ID NO: 99327 - DNA, 173 bp, Oryza sativa
  Clone ID: PAT_MRT4530_9714C.1
ggcacgaggtgaaagatctcgcctgaaatcctccccggagatcacaccccaggctctccgttccgcttcccggcgtcgacatgttcgtcgtcgaggaccggggcggcgccgtcgccttgatggtggcctccctcctcttcctgggcacctggcctgctctcctgactctcctg

SEQ ID NO: 99328 - DNA, 1314 bp, Oryza sativa
  Clone ID: PAT_MRT4530_97150C.1
atgacgccaggagcccccgacccccaggacggccccgaggccactgtgggaaggccgctcctgtcgtcctccgaccccgaggtcatcggcacagaagacgagtgcgccccgaggggccacctggacgaagaacgccccgggggtacggcccctagcgaagaggatcggccccgccgaaaggtacagcggcctgtctactttgttagtgaggccctccgggacgccaagacccgatacccacaggcccagaagatgctttacgctattctgatggcctcgaagatactgcgccattatttccaggcgcatcgggtcactgtggttacgtcttaccccctcggtcaaatcttgcataatcgagaggtcgatctggtccggcgatgcagagcgtgtcagttccacgccaggcaaatccatcagccggcccaggccctgcagatcataccactatcatggccatttgctgtctgggggcttgatatcctgggaccgttcaaacgggccccgggcgggtttgagtatctgtatgttgcgatcgacaagttcactaagtggcccgaggcttatccggttatcaagatcgataagcactctgctcttaaattcattaagggcatcacggcccgttttggagtgcctaaccgtattattacggataatggcacccaattcactagtgaactcttcggcgactactgcgaagacatgggcatcaagctctgcttcgcctcacctgcccaccccagaagcaatggccaagtggagcgtgccaatgcagaaatcctcaaaggccttaaaaccaagaccttcaatattctcaagaagcacggcgattcatggatcgaggagttgccagcggtgctctgggcaaaccgaaccacaccaagccgagcgaccggggaaacgcctttcttcctcgtctacggcgcagaagcggttctcccatccgagctcaccctgaggtctcctcgggccaccatgtactgcgaggctgatcaagatcagcttcgcagagatgacctcgactacttagaagagcgaaggcggcgcgcggccctccgagccgcgcgctaccagcagagcttgcggcgctaccatcagcgccacgtccgggcccgatcactctgcgtcgacgacctcgtcctacgccgcgtccaaacgcgtgctggattgagcaaactctcaccaatgtgggagggtccgtatcgagtgatcggtgtcccccggccgggctcggtacggctggccacgggcgacggcacggagctgcctaacccatggaacatcgaacaccttcgtcgcttctacccctga

SEQ ID NO: 99329 - DNA, 375 bp, Oryza sativa
  Clone ID: PAT_MRT4530_97151C.1
atgaccgtctgtctccagcacaagggcgggggcgacgtggagcttgggaattcaccagcgagctccaacatggtggcggcggatctggtgccactccgactggatctagttcccttgagccagagctggcatcctcacccggatttggctggggtcgagtacctggcgcggcggcagtgggaggagggagtcgacgtgtccatgctacgggatggccaacgagaggctgacagatgtggtagacgatggaaggaagtcgtggtcggcagaggccagtgtgatgcagagcttggtaagcctgacggcgatagaaggacggcggggagagcggtaaggcgccggtatggtggctgcgaatcgaaggaatgcagctga

SEQ ID NO: 99330 - DNA, 5496 bp, Oryza sativa
  Clone ID: PAT_MRT4530_97152C.1
atggccgagcaagcaaaggcgcacgacctctctccgagtgtgagcggcgacgacggggagccaaacccgcgccatcgagctcgtactcccccacttcctccgcgccaaagtcctaagcggggggaggcgctcgagagggtcgaaaaatccgcagcatcgccagtcgcgggtggtgcaggagaacggcgagatggggagcgtcgcctcctcgtctacggcgacggcagcacgcctcagggcgcgcttcaggctgttggcgcgctcctacgtcacccgcctgtcgtccctgacccggagtctccagcccagcgatggctggacgacgtggccaacttggtcatgacggcacagcagcgcctgggtgctggtggacggtccgccactaccaagacctccggcgtcgccaccaccggctctgtgtcatcaaggcggagggcgcggcgagcggcggctgctgcacgccattcggctaccactccctcgtcggcgcctccgactcgggaggatcagcatgaagagccggatgcccgcctcgacatcgagcgccgacgtagtgatcggcgtgcaccccgcgcaacggagggtgcctcttcgtccagggtgtcacctcgacatggacgtgaggatcagccctccgtgcccccggttggtggtgttggctgtagagcctttgtggcgagtcttcggaatgtccgttggcccccaaggttccggcccaccatcaccgagaagtatgatgggagcgtcaaccccaccgagtttctccaggtctatacgaccgggatcgaggccgctaggggagacgacagggtcatggcgaatttctttcccatggccctgaagggacaggcgcggggttggctaatgaacctgccacccgcgtcggtccactcctgggaggatctgtgccagcagttcaccatgaactttcaaggcacctatccacgcccaggtgaagaagcggacttgcacgcagtacagcgaggggatgatgaatcccttcgctcgtacattcagcgtttctgccaagtccgcaatactataccttgcatccctgcacacgcggtgatctacgcgttcagggggggtgtgcggcacaaccgcatgctcgaaaagattgcctccaaagagccccagactaccgcagagctttttcagctcgcggaccgagtggctcgtaaggaggaggcctggacctggaacccctccggttccggtgtggcagcttcggccgcccccggatccgccgctcagacagggcggcgtgacaggaggaggaagaaaaggtcggtccattccggcgacgagggtcacgtcctcgccgtcgagggcgctccgcgggccacccgaaaggggaggcccgcgagcgacaaaaagaaagaggctggtactcccagcagggagcgcccagccagcaagtggtgctccgtccacaacacctccctccacgatctcgcggactgtcgcgcagtcaaaaacttggctgagcgaacgaggaagtgggaggaggacaggaggcaggaacgccgtgagggcaagtccgcggcagttccctccggtaaacggcgaagtgaggccagacagaaggcccccgctgttgacatcgatgacggtgatgatgacctaggtttccaagaacctggggccaccattgccactgtcgacgggggagcgtgtgctcacgtttctcgccggagtttcaaggccatgaggcgagagcttctcgccgcggcccctactcatgaggcgacgcgtcgggcgcggtggtcggaggtggccctcacctttgaccagaccgaccacccaccgtgcgttgcccggggagggcagattgcgatggtggtttcccccaccatctgcaatgtgaagttggggcgtgtcctcatagatggaggagcggctctcaacatcctttcccccgcggcctttgatgctatcaaggccccggggatggtgctccagccgtctcaaccgatcattggtgtgacgccggggcacacatggccgttaggtcacatcgacctaccggtcacctttggtggatcagccaacttccgcacggagcgggtgaacttcgatgtggcggacctcagtctgccctacaacgcggtcctggggaggcccgcgttggtgaagtttatggcggcggtccactacgcctacctccagatgaagatgccgggccctggtggccccatctctgtccgtggcgaccttaaagtcgcgctcgcttgcatggagcagcgcgcggaccacctcgctgctgcgaccaagcccgagggtggtgacgagaggcttggcacctccgcccccaccgccccgaggcagcggattgccacatgcgacgaggtcccggaagacgcgctcgtctccttcctgcgggcaaacgctgacgtcttcgcatggagaccagcggacatgcccggggtccccagggaggtgattgagcaccgtctcgccgtgcggccgggcgcaaggccggtccggcagaaagtgcggcggcaggccccggaacgtcaagccttcatccgcgaagaggtggcgagacttctggaggccggattcatccgtgaagtcatccatccggagtggctggcgaacccggtggtcgttcccaaggcgaacggcaagcttcggatgtgcatcgactacaccgaccttaacaaggcatgtcctaaggatccttaccccctgcctcgcatagatcagatcgtcgactccactgcggggtgcgaccttttgtgctttctagatgcatactctggttaccatcagattcgcatggctagggaggatgaggagaaaactgcgttcattacccccgtaggaacttattgttatacatcaatgcccttcgggttaaagaatgcaggtcctacttttcaacgaactactcgaatttctttgggtagccaaataggacgtaatgttgaggcttatgtcgatgacttggttgtaaaaacgcgcaaccaagaaactttactttcagatctagcggaaacttttgagaacctccgctccgcccgcataaagctgaaccccgataacaaacttagggatgtgcaatgcgtcaccggttgcatggccgccctaagtcgtttcatatcaaggctgggagagaaggcgctacccttgtttaagctcctcaagcgctcggggccgtttacttggacggaggaagctgaacatgccctcactcagttaaaggcatatctcagctctcccccggttctagtcgccccggagccaaatgagcccctgctactttacttagcggcgaccccccaagtagttagtgcagcgttggttgtggagcgcgatgaagacaatcctcattttgtgcacccccattctgtgctaacttggcccgggagcgagcggggaggagaagcccccgagtcggacggtggcctacggcccctgacgaccggagtcggccctctgcccgcttgtcagacggtgctaggtgcccccgaccctcaggagggccccaaggccactgcgggaaggccgcacttaacgccctctgaccccgaggctaaccctgtgctgactcgacccgggaaagagcagggagaagaggcccccgagtcgaacggaggccagaggcccctgacgaccggagttggccctttgcccgcttgtccgacgatgccaggagcccccgacccccaggacggccccgaggccactgagggaaggccgcccctttcatcctccgaccccgaggtcatcggcacagaagacaagtgcgccccgaaaggccacttgaacgaagaacgccccggggatacggcccctagcagagaggatcggccccaccgaaaggtgcagtggcctgtctactttgttagtgaggccctccgggacgctaagacccgataccctcaggcccagaagatgctttacgctattctgatggcctcgaggaaactgcgccattattttcaggcacatagggtcactgtggttacgtcttaccccctcggtcaaatcttgcataatcgagagggtacaggacgggtggtaaaatgggcaatcgagctttctgaattcgatctgcactttgaaccacgccacgctatcaagagccaggccctcgccgattttgtggcagagtggaccccggctccagagaccgtctcaatccccgaggccagcacgaacccctcgcagctgcctcacaccacccactgggtgatgcagttcgatggttctctgtccctccagggtgccggtgcgggggtcacgttgacctccccgacaggagacgtccttagatatctggtccgccttgactttcgagcgaccaataatatggcagagtatgagggactccttgccggactcagggtggcagccggactggggatccgccgtctcctggtgttaggcgattcccagctggtcgttaaccaggaacaaggcgttgagcttcttgctgacatccatgcgggcgagtgcggagcccattccgcctcgcgcaccctggttggcaaggcctttcgtcaaggattttattggccgacagctctcaatgatgcagtcgatctggtccggcgatgcagagcgtgtcagttccacgccaagcaaatccatcagccggcccaggccctgcagatcataccactgtcatggccatttgctgtctgggggcttgatatcctgggaccgttcaaacgggccccgggcgggtttgagtatctgtatgttgcgatcgacaagttcactaagtggcccgaggcttatccggttgtcaagatcgataagcactctgctcttaaattcattaagggcatcacggcccgttttggagtgcctaaccgtattattacggataatggcacccaattcactagtgaactcttcggcgactactgcgaagacatgggcatcaagctctgcttcgcctcacctgcccaccccagaagcaatggccaagtggagcgcgccaatgcagaaatcctcaaaggccttaaaaccaagaccttcaatattctcaagaagcacggcgattcatggatcgaggagttgccagcggtgctctgggcaaaccgaaccacaccaagccgagcgaccggggaaacgcctttcttcctcgtctacggcgcagaagcggttctcccatccgagctcaccctgaggtctcctcgggccaccatgtactgcgaggctgatcaagatcagcttcgtagagatgacctcgactacttggaagagcgaaggcggcgcgcggcccttcgagccgcgcgctaccagcagagcctgcggcgctaccatcagcgccacgtccgggcccgatcactctgcgtcgacgacctcgtcctacgccgcgtccaaacgcgtgctggactgagcaagctctcaccaatgtgggagggtccgtatcgagtgatcggcgtcccccggccgggctccgtacggctggccacgggcgacagcactaagctgccaaacccgtggaacatcgaacaccttcgtcgcttctacccctga

SEQ ID NO: 99331 - DNA, 5844 bp, Oryza sativa
  Clone ID: PAT_MRT4530_97153C.1
atggccgaacaagcaaaggcgcacaacctctctccgagcgttagcggtgacgacggggagccgaacccacaccgtcgagctcgtactccaccgccccctccacgccaaagtcctaggcgggaggaggcgctcgagagggtcgaaggatccgagacttcgacatccacaggtgatggagaagggcgccgagatggggagcgtcgcctcctcgtctacggcgacggcagcacgccccagggcgcgctccaagctgcgggcgcgctcctacgtcacccgcccgttgtccttgacccggagtctccagcccaacgttggctggacgacgtggccaacttggtcatgacggcacggcagcgcctaggtgctggtgggcggtcctccgccaccaagacctctggcgctgctaccaccggctccgtgtcgtcaaggcggagggcgcggcgagcggcggctgttgctcgccattcggctgccactccctcgtcagcacctccaacccgggaagatcagcgtggggggccagatgcccgcatcgatatcgaacgccggcgtaatggtcgacgtactgcccacgcaacggagggcgcctcctcgtccggagtgtcacctcaactcggacgcggggatcagccctccgtgcccccggttggtggtgtcggctgtagagcctttgtggcgagccttcggaacgtccgttggcccccaaggttccggcccaccatcgccgaaaaatatgacgggagcgtcaaccccgccgagtttctccaggtctacgcgaccaggatcgaggccgccgggggcgatgacagggtcatggcgaatttctttcccatggccctgaaggggcaggcacggggttggctaatgaacttgccacccgcgtcggtccactcctgggaggatttgtgccaacagttcaccatgaactttcaaggcacatatccgcgcccagcggttttgtcaagttcgcaacaccataccatgcatccctgcacacgcggtgatctacgcgttcaggggggtgtgcggcacaaccgcatgctcgaaaagatcgcctccaaagagccccagactaccgcggagctttttcagctcgcggaccgagtggctcgtaaggaggaggcatggacctggaacccctccggttccggtgtggcagcttcggccgcccccggatccgctgctcggacagggcggcgtgacaggaggaggaagaaaaggtccgcccattctgacgacgagggtcatgtccttgccgtcgagggtgcttcgcgggtcacccgaaaggggaggtctgcgagcgacaaaaagaaggaggccggcgctcccagcagggagcgcccaaccggcaggtggtgcaccgtctacaacacctcccttcacgacctcgcggactgccgcgccgtcaaaagtttggctgagcggacgaggaagtgggaggaggagaggaggcaggagcgccgagggggcaagtccccggcggttccttccggcaatcggcgaagtgaggccaagcagaaggcccccgccgaggacatcgatgacggcgatgatgacctaggtttccaagaacctggggccaccattgccactgtcgatgggggagcgtgtgctcacgtttctcgccggagcctcaaggccatgaagcgagagcttctggccgcggcccctactcatgaggcgacgcgccgggcgcggtggtcggaggttgccctcaccttcgaccagaccgatcacccaccgtgcgttgcccggggaggacagatcgcaatggtggtttcccccactgtttgcaacgtgaagctggggcgtgtcctcattgatgggagagcagccctcaacatcctttcccccgtagcctttgacgccatcaaggccccggggatggtgctccggccgtcccagccgattatcggtgtgacgccggggcacacttggccgctaggtcatatcgacctcccggtcaccttcggtggatccgccaacttccgcacggagcgggtgaactttgatgtggcggacctcagtctgccctacaacgcggtcctagggaggcccgcgttggtgaagttcatggcggcggtccattacgcctacctccagatgaagatgccgggccccggtggccccatctctgtccatggcgacctcaaagtcgcgcttgcttgtatggagcagcacgcggaccacctcgccgccgcgtccaagcccaagggtggcgacgagaggcttggcacctccgtccccgccgccccgaggcagcggatgatcacatgcgacgaggtcccggaagacgcgctcgtctccttcctgcgggcaaacgctgacgtcttcgcatggagaccggcagatatgcccggggtccccagggaggtgattgagcaccgtctcgccgtgcggccgggcgcaaggccggtctggcagaaagtgcggcggcaggccccggaacgtcaagccttcatccgcgaggaggtggcgcgactgctggaggccggattcatccgcgaggtcatccatccggagtggctggcgaacccggtggtcgttcccaaggcgaacggcaagcttcggatgtgcatcgactacaccgaccttaacaaggcatgtcctaaggacccttaccccctgcctcgcatagatcagattgtcgactccaccgcggggtgcgaccttttgtgttttctagatgcatactctggttaccatcagattcgcatggctagggaggatgaggaaaaaactgcattcattacccccataggaacctattgttatacgacaatgcccttcgggttaaagaatgcaggtcctacttttcaacgtactactcgaatttctttgggtagccaaataggacgtaatgttgaggcttatgtcgatgacttggttgtaaagacgcgcaaccaagagaccttactttcggatctagcgaaaacttttgagagtctccgctccgcccgcataaaactgaaccccgataagtgcgtgttcggtgtacctgcgggcaagcttctcgggttcttggtctctgcccgaggcatcgaggccaaccccgagaagatacgagctatagagcggatgcgcccccccagcaagcttagggatgtgcaatgcgtcaccggttgcatggccgccctaagtcgctctcccccagttctggtcgacccggagccaaatgaacccttgctactctacttagcagcgaccccgcaagtggttagtgcggcgttggttgtggagcgcgatgaggacaatcctcattccgcgcatccccaccctgtgctggcttggcctgggagagagcagggaggagaggcccccgagccgaacggtggcccaaggcccccgacgactggagctggccctctgcccgcttgtcagacggtgccaggtgcccccgacccccaggatggcccgggggccactgcgggaaggccgcacctatcgccctctgaccccgaggttaaccctgtgccgactcgacccgggagagagcagggagaagaggcccccgagccgaacggtggcctaaggctcccgacgaccggagttggccctttgcccgcttgtccgacgacgccaggagcccccgacccccaggacggccccgaggccactgtgggaaggccgcacctgtcgtcctccgaccccgaggtcgtcggcacagaagacaagtgcgccccacgtgaccgcttggacgaagagcgccccaggcatgcggcccctggcgaagaggatcggccccaccgaaaggtgcagcggcccgtctactttgttagtgaggccctccgggacgccaagacccgataccctcaggcccagaagatgctttacgctattctgatggcctcgaggaaactgcgccattatttccaagcgcatcgggtcacggtggttacgtcttaccccctcggccaaatcttgcataatcgagagggtactggacgggtggtgaaatgggcaattgaactttctgagtttgatttgcactttgaaccacgccacgctatcaagagccaggccctcgccgactttgtggcagagtggaccccagctcccgagcccgtctccattcccgaggccagctcgggcccctcgcagctgcatcacaccgcctactgggtgatgcagttcgacgggtccctgtctcttcagggcgccggtgcgggggtcacgctgacctcgccgagcggagacatcctcagatacctgattcgcctcgattttcgggcgaccaataatatggcagagtacgagggactccttgcgggactcagggtggcagctggactggggatccgccgcctcctggtgttaggcgactcccagctggttgttaaccaggtacggcgtatggagcgccattttgacgggatagagcttcggcacgtgcccagacgggataacacgattgccgacgaactctcacggctcgcttcctcgcgagcccagaccccaccgggcgcctttgaagaaaggcttgcccagccgtcggcgcgacccgaccccttaggggagacggacgcgcctgaccggcccccgaggcccgtcggagtccaggcctcgggacccgaggggagcgctcccagctcccttagattgattgcttggatcgctgagatccaagcatacctcacagataagactctacccgaggaccgcgaagggagtgaacgcgtccagcgcatctccaaactctacgtgctgatagaagggaccctttatcggcgcgcggctaatggagtcctcctaaagtgcattcctcgggaacaaggcgtcgagcttctcgccgatatccatgaaggcgaatgcggagcccactccgcctcgcgcactttggttggcaaggcctttcgccagggtttctattggccgacggctctcaatgatgcggtcgacctggtccggcgatgcagggcgtgccagttccacgccaggcaaatccatcagccggcccaggccctgcagatcataccactttcatggccatttgctgtctgggggctcgatatcctgggaccgtttaggcgggccccgggcgggtttgagtatctgtatgtcgcgatcgacaagttcactaagtggcccgaggcttatccggtcgtcaagatcgataagcactccgcacttaaattcattaagggcatcacagcccggtttggagtgcctaaccgtattattacggataacggcacccaattcactagtgagcttttcggtgactactgcgaagacatgggcatcaagctctgcttcgcctcacccgcccaccccagaagcaatggccaagtggagcgcgccaatgcggaaatcctcagaggccttaaaaccaagaccttcaacatcctcaagaagcacggcgattcatggatcgaggagttgccagcggtgctctgggcaaaccgaaccacaccaagccgagcaaccggggaaacgcctttcttcctcgtctacagcgcggaagcggttctcccatctgagctcaccctgaggtcccctcggcccaccatgtactgcgaggctgatcaagatcagcttcgcagagatgacctcgactacttggaggagcgaaggcggcgcgcggccctccgagccgcgcgctaccagcagagcctgcggtgctaccatcagcgccacgtccgggcccgatcactctgcgtcgacgatctcgtcctacgccgcgtccaaacgcgtgctggattgagcaagttctcaccaatgtgggagggtccgtatcgagtgatcggcgtcccccggccgggctccgttcggctggccacgggcgacggcacagagctgcctaatccgtggaacatcgaacaccttcgtcgcttctatccctaa

SEQ ID NO: 99332 - DNA, 1752 bp, Oryza sativa
  Clone ID: PAT_MRT4530_97154C.1
atggcgcgcgccgccgcctccaggctcgccgccgcggcaacctccacctcgacgctcgagatgttctcccgccacctcgcggccgcctcgtcggcgtggggcatcgcttcgtcgcgggctccctatccagggagggagaggaggagcgcgagctggtggtgccctaccaggtcgttccatgccacaaggggaatgaatgcaagggattactatgatgttcttggagtgaacaaagatgcatctgcatcagacataaagaaggcatattatctgctcgcaaagaaattccatcctgatactaataaagaagatgctgatgcagaaaagaaatttcaagaagttcagcatgcctacgaggttttgaaggatgatgataagcgtgaaacatacgaccagcttggagcagaagcttatgagcgccaagcgtcaggtggtggccccgatgatttttctgggagtcatccatttggtgacatttttggtgatatgtttgataatccttttgccatgagaggaggtcgagatgtcaaggttccaatcaaactatcattcatggaagccgtccaaggctgcagaaaaactattgcatatgaggctgatgttttctgcgatacttgcaatggaagtggtgttcctcctggcactgtacctcaaacatgtaaagcctgtcgaggtgctggtgtgatattcatgcagcggggtataatgagtatagaaactacttgttctaggtgtggtggaagtgggaaaattgtgaagaatttttgcaagacatgcaagggtgaacagctagtgaaggggaaaaaatcagtcaagctcgacataatggctggcatcgatgacaatgacactatgaaggtttttggcaagggtggtgcagatgttgagcgcaataaacctggtgatctctatgttactatcaagatcagagaggatcctgtcttccgtagagaaggcaaccatgtgcatgttgacgctattataagcattgcccaggctgtactaggtggaactgtcacagtaccaacccttacgggcaacgtttcagtcaaggttcgccaaggtacccaaccaggagaaaaggttgtcctcaggggcaaaggaataaaagcacggaattccccagcctatgggaatcagtatattcacttcaacgtccgagttccaacgtatgttacacaacgacaacgcgagttaatggaggaatttgataaagaggagtgcaacgaaggggagagagttgcagctgcctccggatgaaattttgccgcacccattcgttggttattatacgtaataagccgatagccgaagccccaattataatgggctcggtatgacgtacatgatgtagtctttagagtgcagattttgcattgtataatatgcacgctaaggctaaataactgtactaaccttttgaccttttatttattgttatggcaaatgtaacagctaatataactaggaacatataataggaaggctatgtgatgtgtaatgccttagctgccgcataaactcacgaatccaccggcaacccgcggacccattttcatgtttcttgttgccccgtgccgagttcccaaaacaaaaatttttcacccatcacatcgaatatttggacacatgatggagtattaaatgtgaaaaaaaagtcaattacacagtttgcgtgtaaaaaaaaaaaaaaaaaaaaaaaaaaaaaaaaaaaaaaaaaaaggggggcctgcagcccgggggatccactag

SEQ ID NO: 99333 - DNA, 5820 bp, Oryza sativa
  Clone ID: PAT_MRT4530_97155C.1
atggccgagcaagcaaaggcgcacgacctctctccgagtgtgagtggcgacgacggggagccgaatccacgccgtcgagctcgtactcccccatctcctccgcgccgaagccctaagcagggggaggcgcttgagaaggtcgacaagtccatggcatcaccagtcgcaggtggtgcaggaggacggcaagatggggagcgccgcctcctcgtctacggcgacggcagcacgcctcagggtgcgcttcaggctgctggcgcgctcctacgacacccacctgtcgtccatgacccggagtctccagcccaacgatggctggaagatgtggccaacttggtcatgactgcacagcagcgcctgggtgctggtggacggatcgccaccaccaacacctccggcgccgctaccaccggctccgtgtcgtcaaggcggagggcgcggcgagcggcggcggctgcacgtcattcggctgccactccctcgtcgacaccgtcgactcgggaggatcagcgtggggagccggatgcccgcctcgacatcgagcgccggcgcaataaccggcgtactccccgtgcaacggagggcgcctcctcgtccagagtgtcacctcgacatggacgtgaggatcagccctccgtgcccccggccggtggtgttggctgtagagcctttgtggcgagtcttcggaatgtccgttggcccccaaggttccggcccaccatcaccgagaagtatgatgggagcgtcaaccccaccgagtttctccaggtctatacgaccgggatcgaggccgctgggggtgacgacagggtcatggcgaacttctttcccatggccctaaaaggacaggcgcggggttggctaatgaacctgccacccgcgtcggtccactcctgggaagatttgtgccaacagttcaccatgaacttccaaggcacatatcctcgcccaggcgaagaagcggacttgcatgcagtacagcggggcgatgatgagtcgcttcgctcgtacattcagcggttttgccaagtccgcaataccataccatgcatccctgcacacgcggtgatctacgcgttcagggggggcgtgcggcacaaccgcatgctcgaaaagatcgcttccaaagagccccagactaccgcggagctttttcagctcgcggaccgagtggctcgtaaagaggaagcgtggacatggaactcctccggttccggagtggcagcttcggccgcccccggatccgccgctcagacagggcggcgtgacaggaggaggaagaagaggtcggaccgttccggcgacgagggtcatgtcctcgccgtcgagggcgctccgcgggccacccgaaaggggaggcctgcgagcgacaaaaagaaagaggctggtactcccagcagggagcgccccgccggcaggtggtgctccgtccacaacacctccctccacgatctagcggactgtcgcgcagtcaaaaatttggctgagcgaacgaggaagtgggaggaggacaggaggcaggaacgccgtgagggcaagtccccggcggttccttccggcaaacggcgaagtgaggccaagcagaaggcccccgctgttgacatcgatgatggtgatgatgacctaggtttccaagaacctggggccaccattgccaccgttgatggaggggcgtgtgctcacgtctctcgccggagcttcaaggctatgaagcgagagcttctggccatggcccctactcatgaggcgacacgtcgggcgcggtggtcggaggtggtcctcacctttgatcagaccgaccacccaccgtgtgttgcccggggagggcagattgcgatggtggtttcccccaccatctgcaacgtgaagttgggacgtgtcctcatagatggaggagcggctctcaacatcctttcccccgcggcctttgatgctatcaaggccccggggatggtgctccagccgtctcaaccgatcatcggtgtgacgccggggcacacgtggccattaggtcacatcgacctaccggtcaccttcggtggacccgccaacttccgcacggagcgggtgagcttcgatgtggcggacctcagtctgccctacaacgcggtcctagggaggcccgcgttggtgaagttcatggcggcggtccactatgcctacctccagatgaagatgccgggccccggtggccctatctctgtccgtggcgaccttaaagtcgcgctcgcttgtatggagcagcgcgcggaccgcctcgctgctgcgtccaagcccgagggtggtgacgagaggcttggcccctctgcccccaccgccccgaggcagcggatggccacatgcgacgaggtcccggaagacgcgctcgtctccttcctgcgggcaaacgctgatgtcttcgcatggagaccagcggacatgcccggggtccccagggaggtgattgagcaccgtctcgccgtgcggccgggcgcaaggccggtccggcagaaagtgcggcggcaggccccggaacgtcaagccttcatccgcgaggaggtggcgaggcttctggaggccggattcatccgtgaagtcatccacccggagtggctggcgaacccggtggtcgttcccaaggcgaacggcaagcttcggatgtgcatcgactacaccgaccttaacaaggcatgtcctaaggatccttaccccctgcctcgcatagatcagatcgtcgactccactgcggggtgcgaccttttgtgttttctagatgcatactctggttatcatcagattcgcatggctagggaggatgaggaaaaaactgcgttcattacccccgtaggaacctattgttatacatcaatgcccttcgggttaaagaatgcaggtcctacttttcagcgtactactcgaatttctttgggtagccaaataggacgtaatgttgaggcgtatgtcgatgacttggttgtaaaaacgcgcaaccaagaaactttactttcagatctagcggaaacctttgagaacctccgctccgcccgcataaagctgaaccccgataacaaacttagggatgtgcaatgcgtcaccggttgcatggccgccctaagtcgtttcatatcaaggctgggagaaaaggcgctacccttgtttaagctcctcaagcgttcggggccgttcacttggacggaggaagctgaacatgcccttactcagttaaaggcgtatcttagctctcccccggttctagtcgccccggagccaaatgagtccctgttactttacttagcagcgaccccccaagtagttagtgcagcgttggttgtggagcgcgatgaggacaatcctcattctgcgcacccccactctgtgccgacttggcccgggagcaagcagggaggaaaggtccccgagtcaaacggtggcctaaggcccctgacgaccggagacggccctctgcccgcttgtcagacggtgctgggtgcccccgaccctcaggaaggccccgaggccactgcgggaaggccgcacttaacgccctttgaccccgaggctaaccctgtgctgactcgacccgggaaagagcagggagaagaggcccccgagccgaacggaggccagaggcccctgacgaccggagttggccctttgcccgcttgtccgacgatgccaggagcccccgacccccaggacggccccgaggccactgtgggaaggccgctcctgtcgtcctccgaccccgaggtcatcggcacagaagacgactgcgccccgaggggccacttggacgaagaacgccccgggggtacggcccctagcagagaggaacggccccaccgaagggtgcagcggcctgtctactttgttagtgaggccctccgggacgccaagacccgatacccacaggcccagaagatgctttacgctattctgatggcctcgaggaaactgcgccattatttccaggcgcatcgggtcactgtggttacgtcttaccccctcggtcaaatcttgcataatcgagagggtacaggacgagtggtaaaatgggcaatcgagctttctgagttcgatctgcactttgaaccacgccacgctatcaagagccaggccctcgccgattttgtggcagagtggaccccggctccagagaccgtctcaatgcccgaggccagcacgaacccctcacagctgcctcaaaccgcccactgggtgatgcagttcgacggttctctgtctctccagggcgccggtgcaggggtcacgttgacctctccaaacggagacgtcctcagatacttggtccgtctcgactttcgagcgactaacaatatggcagagtacgagggactccttgccggactcagagtggcagctggactggggatccgccgcctcttggtattaggcgactcccagctagtcgttaaccaggtctgtaaggagtaccggtgctctgacccacagatggacgcctacgtacgccaagtgcggcgtatggagcgccatttcgatgggatagaacttcggcatgtacctagaagggataacatgatagccgacgaactctcaaggctcgcgtcctcgcgagcccagaccccaccgggcgcctttgaagaaaggcttacccagccgtcggcgcgacccgaccccttaggggagacggatgcgcctgaccggcccccgaggcccgtcggagtccaggcctcgggacccgaagagagcgttccaagctcccttagattgattgcttggatctctgagatccaaacatacctcacagataagactctacctgaggaccacgaagggagtgaacgcgtacaacgcatttccaaacgctatgtgctggtagaagggaccctctatcggcgcgcggctaacggaatcctcctgaagtgcattcctcaggaacaaggcgttgagcttcttgctgacatccatgagggcgagtgcggagcccattccgcctcgcgtaccctggttggcaaggcctttcgtcaaggattttattggccgacggctctcaatgacgcagtcgatctggtccggcgatgcagagcgtgtcagttccacgccaagcaaatccatcagccggcccaggccctgcagatcataccgctgtcctggccatttgctgtctgggggcttgatatcctgggaccgttcaaacgggccccgggcgggtttgagtatcttgaactcttcggcgactactgcgaagacatgggcatcaagctctgcttcgcctcacctgcccaccccagaagcaatggccaagtggagcgcgccaatgcagaaatccttaaaggcctcaaaaccaagaccttcaacattctcaagaagcacggcgattcatggatcgaggagttgccagcggtgctctgggcgaaccgaaccacaccaagccgagcgaccggggaaacgcctttcttcctcgtctacggcgcagaagcggttctcccatctgagctcaccctgaggtctcctcgggccaccatgtactgcgaggctgatcaagatcagcttcgtagagatgacctcgactacttggaagagcgaaggcggcgcgcggccctccgagctgcgcgctaccagcagagcctgcggcgctaccatcagcgccacgtccgggcccgatcactctgcgtcgacgacctcgtcctacgccgcgtccaaacgcgcgctggattgagcaagctctcaccaatgtgggagggtccgtatcgactgatcggtgtcccccggccgggctcggtacagctggccacgggcgacggcacggagctgccaaacccgtggaacattgaacaccttcgtcgcttctacccctga

SEQ ID NO: 99334 - DNA, 514 bp, Oryza sativa
  Clone ID: PAT_MRT4530_97156C.1
gcacgagggagagagagaactagtctcgcgtttttttttttttttttttttgaagaacacaacataataagctataaatattcagggcacaatttattttgtatgagaaatagatcaacaataccaacataaatggtcttatttactagctataagatcagacaggcattcgaagcttcagaaagtccagtcaacgttctgtccattgttgctgcttattgttaagagcattttcaagagtgtcaggctaacactagacaaacaatctttttcaaggaagagaaacagattcaaaaccgacatttcttgatttcctgaatgacttgaacacacggggaatgtaaagcacagaagcctccaccgagttcatcgtattcgcaagtttgcaatttgaactgaaactgacccgtttgaagccttcctagaaagcgaactccatagccacttgccatgcccatgctgctcgattttcgtcctcatcatgtgcctgactcaactcccgaaccactggaac

SEQ ID NO: 99335 - DNA, 4077 bp, Oryza sativa
  Clone ID: PAT_MRT4530_97157C.1
atgacggcacagcagcgcctgggtgctggtggacggtccgccaccaccaggacctccggcgccgccaccaccggctctgtgtcatcaaggcggagggcgcggcgagcggcggctgctgcacgccatttggctaccactccctcgtcggcgcctccgactcgggaggatcagcatgaagagccggatgcccgcctcgacatcgagcgccgacgtagtgatcggcgtgctccccgcgcaacggagggtgcctcttcgtccagggtgtcacctcgacatggacgtaaggaccagccctccgtgcccccggttggtggtgttggctgtagagcctttgtggcgagtcttcggaatgttcgttggcccccaaggttccggcccaccatcaccgagaagtatgatgggagcgtcaaccccaccgagtttctccaggtctatacgaccgggatcgaggccgctgggggagacgacagggtcatggcgaatttctttcccatggccctgaagggacaggcgcggggttggctaatgaacctgccacccgcgtcggtccactcctgggaggatctgtgccagcagttcaccatgaactttcaaggcacctatccacgcccaggtgaagaagcggacttgcacgcagtacagcgaggggatgatgaatcccttcgctcgtacattcagcgtttctgccaagtccgcaatactataccttgcatccctgcacacgcggtgatctacgcgttcagggggggtgtgcggcacaaccgcatgctcgaaaagattgcctccaaagagccccagactaccgcagaactttttcagctcgcggaccgagtggctcgtaaggaggaggcctggacctggaacccctccggttccggtgtggcagcttcggccgcccccggatccgccgctcagacagggcggcgtgacaggaggaggaagaaaaggtcggtccattccggcgacgagggtcacgtcctcgccgtcgagggcgctccgcgggccacccgaaaggggaggcctgcgagcgacaaaaagaaagaggctggtactcccagcagggagcgcccagccagcaagtggtgctccgtccacaacacctccctccacgatctcgcggactgtcgcgcagtcaaaaacttggctgagcgaacgaggaagtgggaggaggacaggaggcaggaacgccgtgagggcaagtccgcggcagttccctccggtaaacggcgaagtgaggccaaacagaaggcccccgccgttgacatcgatgacggtgatgatgacctaggtttccaagaacctggggccaccattgccactgtcgacgggggagcgtgtgctcacgtttctcgccggagtttcaaggccatgaggcgagagcttctcgccgcggcccctactcatgaggcgacgcgtcgggcgcggtggtcggaggtggccctcacttttgaccagaccgaccacccaccgtgcgttgcccggggagggcagattgcgatggtggtttcccccaccatctgcaatgtgaagttgggacgtgtcctcatagatggaggagcggctctcaacattctttcccccgcggcctttgatgctatcaaggccccggggatggtgctccggccgtcccaaccgattatcggtgtgacaccggggcacacatggccattaggtcacatcgacctaccggtcacctttggtggatcagccaacttccgcacggagcgggtgaacttcgatgtggcggacctcagtctgccctacaacgcggtcctagggagacccgcgttggtgaagttcatggcggcggtccactacgcctacctccagatgaagatgccgggccccggtggccccatctctgtccgtggcgaccttaaagtcgcgctcgcttgcatggagcagcgcgcggaccacctcgctgctgcgaccaagcccgagggtggtgacgagaggcttggcacctccgcccccaccgccccgaggcagcggattgccacatgcgacgaggtcccggaagacgcgctcgtctccttcctgcgggcaaacgctgacgtcttcgcatggagaccagcggacatgcccggggtccccagggaggtgattgagcaccgtctcgccgtgcggccgggcgcaaggccggtccggcagaaagtgcggcggcaggccccggaacgtcaagccttcatccgcgaggaggtggcgagacttctggaggccggattcatccgtgaagtcatccatccggagtggctggcgaacccggtggtcgttcccaaggcgaacggcaagcttcggatgtgcatcgactacaccgaccttaacaaggcatgtcctaaggatccttaccccctgcctcgcatagatcagatcgtcgactccactgcggggtgcgaccttttgtgttttctagatgcatactcaggttaccatcagattcgcatggctagggaggatgaggagaaaactgcgttcattacccccataggaacctattgttatacatcaatgcccttcgggttaaagaatgcaggtcctacttttcaacgagcccccgacccccaggacggccccgaggccactgagggaaggccgcccctttcatcctccgaccccgaggtcatcggcacagaagacaagtgcgccccgaaaggccacttgaacgaagaacgccccggggatacggcccctagcagagaggatcggccccaccgaagggtgcagcggcctgtctactttgttagtgaggccctccgggacgctaagacccgataccctcaggcccagaagatgctttacgctattctgatggcctcgaggaaactgcgccattattttcaggcacatagggtcactgtggttacgtcttaccccctcggtcaaatcttgcataatcgagagggtacaggacgggtggtaaaatgggcaatcgagctttctgagttcgatctgcactttgaaccacgccacgctatcaagagccaggccctcgccgattttgtggcagagtggaccccggctccagagaccgtctcaatccccgaggccagcacgaacccctcgcagctgcctcacaccacccactgggtgatgcagttcgatggttctctgtccctccagggtgccgtcgatctggtccggcgatgcagagcgtgtcagttccacgccaagcaaatccatcagccggcccaggccctgcagatcataccactgtcatggccatttgctgtctgggggcttgatatcctgggaccgttcaaacgggccccgggcgggtttgagtatctgtatgttgcgatcgacaagttcactaagtggcccgaggcttatccggttgtcaagatcgataagcactctgctcttaaattcattaagggcatcacggcccgttttggagtgcctaaccgtattattacggataatggcacccaattcactagtgaactcttcggcgactactgcgaagacatgggcatcaagctctgcttcgcctcacctgcccaccccagaagcaatggccaagtggagcgcgccaatgcagaaatcctcaaaggccttaaaaccaagaccttcaatattctcaagaagcacggcgattcatggatcgaggagttgccagcggtgctctgggcaaaccgaaccacaccaagccgagagaccggggaaacgcctttcttcctcgtctacggcgcagaagcggttctcccatccgagctcaccctgaggtctcctcgggccaccatgtactgcgaggctgatcaagatcagcttcgtagagatgacctcgactacttggaagagcgaaggcggcgcgcggccctccgagccgcgcgctcccagcagagcctgcggcgctaccatcagcgccacgtccgggcccgatcactctgcgtcgacgacctcgtcctacgccgcgtccaaacgcgtgctggactgagcaagctctcaccaatgtgggagggtccgtatcgagtgatcggcgtcccccggccgggctccgtacggctggccacgggcgacggcactgagctgccaaacccgtggaacatcgaacaccttcgtcgcttctacccctga

SEQ ID NO: 99336 - DNA, 525 bp, Oryza sativa
  Clone ID: PAT_MRT4530_97158C.1
atggcattccacggtcagaagtcagaagaacacgaaagctgcagctgcagcaggtgcctcccctctcgcgctctgcctccttcgaccacccgatcgccgcgccgtgagcacgccgccaaggccgccgctgacccagctgctggcccggaggcctcgtcggagcagatcatggaggccgggacgaccgtgagcgtccgcacacgggtggggaagcttcccggcgggaggcagctggtgctgtggctctccgcggtggtggtctccgccgccgaggagggctacctcaccgtcgtctacaagggcgacttcccgcccggggaccccttccagaccgtgcgcgtcgcgaggaaggacaccaagaagatcactgccggcgccgccgccgccgccgccgcaaccatcaccgatccagccgcggcggcggcgcgcccctccagcaacaatgtggcagccccggcccctcgtcccagcacgggcggcaagaaggtgcgggtgctcaagagaatttacccggaggcgttctag

SEQ ID NO: 99337 - DNA, 222 bp, Oryza sativa
  Clone ID: PAT_MRT4530_97159C.1
gcacgcctaccacgccttggaaagtttagatcctttccgtttttttttttttttttttttttggtttaggccaaacaaataccaccatccaacatgccaaccatattttacactaggaataccttcctaccccgcaaaaaagggcaggtaacaaaagaacatttctctaaggtacccaaccacccactatgctcaagagcttagaaaagcttttacaaaagg

SEQ ID NO: 99338 - DNA, 4765 bp, Oryza sativa
  Clone ID: PAT_MRT4530_9715C.1
ggagaaggaactagccgcgttgaagggagaagcaccgccgcagaaggccaggattcgtctcaccgcaaggaagagagctttgtttgtccctcgttatcaattggcgccaaagattcgtgtggtggagaaagaagttgccccagctcaagcagatcctccagtcatcatcataagtagtgatgaagaagaagaacccaagcgcaacaattccaagtttgagtgggtagctatcaaagatgaggaagatgagccgaacgagccttcgatcgacctcctatgctcggaagaactagagtgactttttccccggtttcttttcttatcctgtccatgccagatggtgaacactcgcagcaacgggaatggtcccaacctcaacaaccccaataacaataacaatggagagaatccaacccttgctcaagttcttgctcaacagactcagctaatgcacatgatgatgcaacaacttcagaaccagcagaaccaaggaaataaccatgcacctccccagaacaagttagcagaatttcttcgggtgaggccgcctattttctctagtaccaccaatcctgttgaagccggtgattggctgcatgccatagagaagaagttggatttgcttcagtgcactgatcaggagaaggtctcatttgcatcacaccagttgcatggccctgcctctgaatggtgggatcacttccgcctgaataggactactgctgaacctatcacttggcttgaattcaccgctgcttttcggaagacgcatataccatcgggagtggtgtctctcaagaagaaggagttcaggtcgcttacgcagggatctcgctctgtcacggagtatttacatgagttcaatcgtcttgcccgttatgctccggaagatgtgcgcaatgatgaagagcgtcaggagaagttcttggaaggacttaatgatgagctttcttacccactcatgactggagattattatgatttccagaagttagtggataaggctattcgccaggaggacaagtacaatcgcatggagcaaaagaaacgccggattgctcaattcaagacacaacaggggaataatcagaagccacgtcttactttaggaccccagtctatgccacagggaggttcttcgtctgttgttcgtccgcagcgtcagttcttcaacaacaatgctggcaacaacatccgcaatcaagctctacgtcctgttgcagtttcgacacagcaacaacctgccaagaaggagcaaggcagcaagcccgtggtgtgtttcaattgtggagacccaggacattacgctgacaagtgtccgaagccccgacgcgtgaaggttgtccctgcccagagcaactctaccgcaccagcatcaaaggcccgtgtcaatcatgttgctgctgcagaagctcaagatgctccagatgtgattttgggtacgttccttgttaactcagttcctgcaacagtgcttttcgattctggtgctacacattcattattatctatgagttttgcgggaaatcatgggatggaagtagaagatcttagacgtcctttgatggttagtaccccaagtaatcaagcactctctttgcaacgtagcccctctgtcagaatagaaattcaaggagtatcatttctggccaatcttatcctgttagaatccaaagaccttgatgtcatcctagggatggactggttagctagacataaaggtgtgatagactgtgccaatagaaaagtaactctcaccagcaatgatggtcgagttgtgactgttcatgcattgtcttctgagtctttaaggtcaagactgaaccagataactttggaagagattcctatagtccgggagtatcctgatgtgttcccagatgatttacctggtatgccgcctaaaagggatatagagttcagaatagatttggtaccaggaacaactctgatccataagagaccttatcgaatggcagccaatgagttggcagaagtcaaaaggcaagtagacgatttgcttcagaaaggatacatcagaccgagttcatctccatggggagctccggttatttttgtggaaaagaaagaccatacccagagaatgtgtgtggactatcgtgcactaaatgatgtgactatcaagaataagtatccactacccagaattgatgatttgtttgatcagcttaaaggtgccaccattttttccaagatagatcttcgatcagggtatcaccagttgagaatcaaagaggaagatatacctaagacaacttttaccactaggtatgggttgttcgaatgtactgtgatgtcttttggacttaccaatgcccctgctttctttatgaacttgatgaataaggtgtttatggaatacctagacaagtttgtggtggtctttattgatgacattcttatctactcccgaaccaaagaagagcatgaagaacatcttcgccttgcactagagaagttacgagaacatcaactgtatgctaagtttagcaagtgtgaattttggttgtccgaagtgaagttccttggtcacgtcatctcagcgggaggagttgccgttgatcctagtaatgtggaatccgtaaccaactggaaacaaccgaagacagtttcagagattcgcagtttcctaggcctcgcaggatattaccggaggtttatagagaatttttccaagattgctaagcccatgacacgactgcttcagaaagatgtgaagtacaagtggtcagaagaatgtgagcaaagttttcaagagttgaagaatcgcttgatatcagctcctattttgattttaccttatccaaagaagggtttccaagtgtattgcgatgcatccaaacttgggttaggttgtgttctgatgcaagatgggaaggtggttgcctatgcatctcgtcagttgcgtccgcatgagaagaactaccctactcatgatcttgagttagctgcagtagttcatgcgttgaagatttggcgtcattatcttttcggtactcgtacagaggtatataccgatcacaagagtttaaagtatatctttactcagtcggatctaaacatgagacaacggagatggttggaattaattaaggattatgacatgggaattcattatcacccgggaaaggctaatgttgtagcagacgctcttagcaggaaaggctattgcaatgctacggaaggacggcagttgccattggaattatgcaaggaatttgaaagattaaatttgggaattgtcagtagaggtttcattgcagccttagaagcgaagcccactctaattgatcaagttagagaagcccaaattaatgatcctgatattcaagagatcaagaagaatatgagaagaggaaaagctatcagtttcttggaagatgagcaaggaactgtatggttgggtgaaagaatctgcgtccccgacaacaaagatttaaaagatgcaattctgaaagaagctcatgataccttatactccattcaccctggtagtaccaagatgtaccaggatctcaaggaaagattttggtgggcaagtatgaagcgtgaaatcgcagaatacgtagcagtatgtgatgtttgtcagcgagtcaaggcagaacatcagaaacccgccgggttgttgcagcctttgaagattcctgaatggaaatgggaagaaatcggtatggattttatcactggtttacccagaacgtcatcaggccatgactctatttggataatagtcgacagacttaccaaagtggctcatttcatcccggtaaagacaacctattccggaagccggttagcggaattgtatatggccaggattgtgtgtttgcatggcgttcctaagaaaatagtgtctgatcgaggcagccagtttacttcaaatttttggaagaaacttcaggaagagatgggttctaagctgaactttagtactgcttatcatccgcaaacagacggacaaaccgaaagggtgaatcagattttggaagacatgttgcgagcttgtgctttagacttcggtggaagttgggataagaatctaccttatgcagaatttttgtataacaacagttatcaagctagtcttcagatggctccttacgaagcactgtatggtcggaagtgccgcactccgcttttgtgggatcaaacgggagaacgtcaggttttcgggacggatatcctaagggaagcagaagaaaaggtgaaaatcattcaagaaagattgcgtgtggctcagtctcgtcataagagttatgccgacaatcgccgcagagatttgagttttgaagaaggagattatgtgtatcttcgtgtcacgcctcttcgaggagttcatcgttttcacaccaaaggaaaattggcaccgcgttttgtgggaccttataagattatcagtagaagaggagaggttgcttatcagttggagttacctcaatctttggcaggagtccataatgtgttccatgtgtcgcaattgaaaaagtgtttaagggtacctaccgaagaagctaatcttgaacagatagaagtccaagagcatctgacctatgttgagaaaccaatccgtattttggaaatagatgagagaagaaccaggaatcgagttatccatttttgcaaagtccagtggagtaatcactcggaagaagaatcaacttgggaacgagaagatgaattgaagtcagctcatccgcatctattcgccagttcttccgaatctcgaggacgagattctgtttaa

SEQ ID NO: 99339 - DNA, 136 bp, Oryza sativa
  Clone ID: PAT_MRT4530_97160C.1
ttcacgacggaggacggtgtacaaatggaccctacccgtgcaggatgattgcagagactacgctgctgttgaagcagatctcaagattgcggttgaactctacagtgcatagcttctcatgagtgacacaaagaag

SEQ ID NO: 99340 - DNA, 311 bp, Oryza sativa
  Clone ID: PAT_MRT4530_97161C.1
gatctaagccggcggccggtgggcggagcggctgcgggcccacggcagacgagcgcaccggggcggcgaggagaacggcggagaaggcgggtgaggcgggcggcgaccttgctccccggtgcgtccagggcgcgcccggcgccgtggagttcctcctgtccgtcgtcaaggagcagcacgccaccaccgtggacaagacgacgtccacaccgctggttcgttctttccagaaagagacgacgtgtggcgtgcaggatttggcaaaggtgagctcgccggaggaggcggctctgagcatcctgcatgcttaa

SEQ ID NO: 99341 - DNA, 497 bp, Oryza sativa
  Clone ID: PAT_MRT4530_97162C.1
gtacttatgaaagataacgcgctcttgttcatgtaaactagaaagagatatatgttcactacttgttacaactgatggtaattacatggttaaatgttactacagtttatttagtcttttttgctgttaattcagactagttcagtagtcaccacactagctacaactgagaatgcaggctgtctgtcgctgtcgactcacaactgaaattctctcatgctggaaatgaagcggttagtgtgaagctgaagcaattttcatgctgcacaattattcagctcagctgctttttttcagttgtttagtcttggatgagttaggggtcacttggctgccagcagacagctttcttcgcgaagaattggaggatttccctttgtcaggcttatcgtcatcgaggcggttagacgcataagcttttcccatcatcttcttgcattctttgcttgcaatcgcatgatcaaccactggttttgggttgtctttgccaattatgc

SEQ ID NO: 99342 - DNA, 431 bp, Oryza sativa
  Clone ID: PAT_MRT4530_97163C.1
ccccggcgcgagaatccggggggatcgcacgcgtccgttttctcacccaccctgtggatagggcgcgagtggcggaggagagtggcctgcggtctgtatatctgtgatgtctctcgacttggtgaggcagaggaggagagtggggacctctgcctggaagccaaatactagtagcgcgcgcttgccacgtctggtagggggtgtgagcgaacatttgccgcaggctacgaggggaagttcccagataggatcaaacagcttccttgggacaggcagtttcgatattaacaatggcaaaaggacagggctgggaggcgcgggcagagacccctccacgagacatgcggaagctggatggacagccgtaataaacggcagacgggacatgcgcaaggacccatcacggctgcgtgtcgaagaggaacaccacg

SEQ ID NO: 99343 - DNA, 1527 bp, Oryza sativa
  Clone ID: PAT_MRT4530_97164C.1
atggcggtgaggtcagaggcggttggattcggcaagccctggcctcaagaagaacaaatccggtggtcccggcctccaggtgactggatccggcgcagctacggagaaaaagcccgaaggcgacgaggaaatggcgaggaggagagtgcaccgccagggagagagctcggaggtagcaaggaggagcgggcaccgttatggacaaagcgtggaggagcagcgatgtctccgggggagaccttggaggagagatctgaggaacacctcaagaacctgacttccatagacctctcttacaacaatctcaccggtgatttccccactgtgctatacgcttgctcagctttagagttacttgacctatccaacaatcaattatccggcagactccctgacgacatcgacaagctgtcctcagatatgcagcatctcaacctgtccaacagcatcgtgcccatctccgtaatcgctggtggcgtggtcatctttgccgtaggatgtgttgtcgcatcctgcagatgcagggctcgcaatgacgacatgactcctatagttttaagtgataaaatggaggatcatctagtccacaacgctgtggacgtaaacaggatcagtagcacaggcacaacgacaggagacccactgtaccgtttgggggttattaacgacagcagcgacacctacaggagattaactgtgaagaagatgcagaacgagaccaggagtgtggacgccgaactcgagaaccggcgccaaacggaggagaccacgctcggcatgatcgtccaccccaacatcattatcctgttaggctacattcggaggaacgaaatgatcttgattctgtacgaggacatggagaacggcagcctggacaagtggatacaccacaacacgcaggccggcgagaggcgcctgcgcccgccgctgggctggcgaaagcggctggccatcgtcattgacgtcgccggagcaatcctctacatgcatcacggttgtcgaaggccgatcattcacggcgacatcaagccggccaacatcctacttgacggcaacttcaaggccaagatctctggcttcagttatgcccggatcaatcttgccggccgcaacacgctgttgggaaacgtccgtcttcatgcaggggccttcgggtattttgctccagagtatgcggacaccgaagtgagcgagaaggtcgacgtgtacagctttggcgtcgtcctgctggagatcgtcacgggaaaagtagtcaacgatcagcacggccatctgacgacatgggcaaaagcctacttgaatacatgggcacggcaaggctacgacgataagttattcaccgacgatgtccttgacaacgatatcgcctctgacgcggcacggtacttgaaggagatgaaggccgtgttcaagctcggcgtggagtgcaccatgatggacccgcagcgcaggccgtccatgcagactgttcttcgacgcctccgccagtgtgcccgctggtggagacgattcccctgtttcgtctga

SEQ ID NO: 99344 - DNA, 1680 bp, Oryza sativa
  Clone ID: PAT_MRT4530_97165C.1
atgatggatagtatggggcttcccttctccagcatcaacttccgagcttcagctctcaacgtcaacaaccaatcgaagatggactgtttcccgcttgctagccgcgaggtgatttgcacggatcagtctggccgcgcattcctcgtcaacgcagatacgtgcgagttcgttcccatgatggctatggcagcagcctctttgtcatggagaggattcccaaaccggagttgggcttcaacagcgatcagtttgaggccttcgtataccgcaagtctacattatcttcctacagaaaggcctggcactgccattaacttccacctccgccttttgtctgtgaacccaagcactgtcacagctgctgcagcagcccagacccagagatcagctcctacgctgtgcttggcggtggctcacacatttgcttatctgtcaatggcatcggcacctactgcctggagacagcaagccactcatggagccaagttggcaaagtggacactgccattccatggcaggattgattatgtgcctgagttcaacctctggtttggcctctctgctgaggcccggcgcttggctgcggctgacctctctgccatggactcccagccacagctagtgggcccttggaaggaactcaacctgccagaggaatggagggagtgcaaggatccacaacttgtcaaccttggctcaggcaggttctgcatcgctaggttcttccgcagtaacagtgactttgggaatgaaccaattgccgtgtttacaggtgtggagttggcattggaagagaaacgtagaaagaggccatcgaaacgctttgtgaacgacgacgctcttggcgatcacatggtgtcttccgatgaaatcaaccagttagaagatggtctcgccgacgattctgatctcgacactggtgctagctccaacctcggcgacgatggtgccatcaacattgactctgacgccaacctcgacaacgatggtgccgtcgacctcgaccatgacaccgatctcgatgacgataccggcatcgaccttgacgtcgtcggcgccgaactcaacatcgatgatgctgccatcgaccttgacgacgatgccgccatcaacctcgacaactttgatcctatggatatatataacatggatgattttcttgctgagttggtgtttttagatgaatatagtgagcagattattatcaggatgaaggacaagataacagctgagccatctcattgtcaacgtcaaagtggtacaagaccgtatataccaagaaaccaagaagatggcaatgaggatcttgtggccaactacttctccgagtcccctatctacaccgatgagatgttccataggaggtttcggatgaggaggcccttagtgaatggtctccttattttactaatagagtggatgccactgtttactgtaaatgggaaccaatataacacggggtactaccttgctgatggaatttatcctgagtggaaaacattcgtgaagacaatacaactttctcagacagatgaagatatattatatgcagcccgtcaagaggaagagaggaaggatgttgagcgagcctttgttgaagatgaaaaggaaatgactgaaattcctttggatttgaatgagaacccaggagcatcaatcgttctgccaccggaaatatga

SEQ ID NO: 99345 - DNA, 198 bp, Oryza sativa
  Clone ID: PAT_MRT4530_97166C.1
tcgtgtagactcaatggggctgaagagaacggacttttcgttgtcgatataggaatgctaggcgccgcagaaccacgcatgacagtttatgctgatctgcctatgacggtcgataatggtgtgaacgcaccaaaggttatgctgaggcacataggttcatagaagaacgaggccactagatgctacatggcaacacac

SEQ ID NO: 99346 - DNA, 210 bp, Oryza sativa
  Clone ID: PAT_MRT4530_97167C.1
atgaggtgcggggtggtgatggtgatcaagcgatggaggaggttggcagggcggccgggccgcctgggcgggtggccgcacagcttggctccggcggcgctgccgggcggtggcgccgagaaggcgagaagccgcggcttgtcgtgggccgattcgagtagtgggctgtatgccccggttttgtcctgcgtgacggctgagtcagcatag

SEQ ID NO: 99347 - DNA, 1053 bp, Oryza sativa
  Clone ID: PAT_MRT4530_97168C.1
atgtcatgcgagcagcagcagaagcagcatccaccatgggaagagagatgcgttggaggaggcgagaggaagaagaagaggctgaagatcgattacatcgcaggacaggacgcgcaatcgactttgcaggtactcttccttccttcctcacaattgtctcctggatcttgctttgaagatattttaagtatgtctccgtcgacgattgatttctcgcggcggtttcttaatctgatcgtgggcaaccgcacccctggtgtcaaatcgctatggtgcttcgacctgatgcgccagcagctgttctatccggcaacacctccaccgccacacaaggttgaggaattctggcaaaagtttagaccgccgggcacaatgatggacagcatggggcttcccttctcctgcttcaccttccgagcttcagctctcaacgtcaacggccaatcgaggatggactgtttcccgcttgctggcggcgaggtgatttgcatggatcagtctggccgcgcgttcctcgtcgacgctgatgcgtgccaggtaggaaccatgcccagtcttcacaagcccaagtcgatgcccttggccgtcttcgtccccaatgccaaggctgacaatgactatgaccatgatggctatggcagcagcctctttgtcatggagaggattcccaaaccggagttgggcttcaacagcgatcagtttgaggccttcatataccgcaagcctacaatatccaactacacaaaggcctggcactgccatcaactcccacccccgccttttgtccgtgaacccaagcactggcacagctgcagcaacccagagatcagctcctacgctgtgcttggcggtggctcacacatttgcttatctgtcaatggcatcggcacctactgcctggagacagcaagccacacatggagccaagttggcaagtggacactgccgttccatggcaggattgattatgtgcctgagttcaacctctggtttggcctctctgctgaggcccgtcgcttggctgcggctgacctctctgccatggactcctag

SEQ ID NO: 99348 - DNA, 3235 bp, Oryza sativa
  Clone ID: PAT_MRT4530_97169C.1
gggcttacgggtaggtcggtatggaggggtcgctagtccagtccgcgattgctccgaccatatacaggaggagcggcaccgcgcggttccgcgtgcgcgcgagggccacgatgatgcgtaccatgccaacacggaccctcaccctggggggtttccagggcctgcggcagacgaatttcctggactcgaggtcggtgattaagcgtgacttcggctctattgtcgcgagccagatttcacgcccccgagggttggggtcaagaggggtggtccgcgccatgtttgagcgcttcacggagaaggcaatcaaggtgatcatgcttgcacaggaagaagcgaggcgcctgggccacaactttgttgggacggagcaaattctactgggccttatcggtgagggcacaggaatcgcggcaaaggttctcaagtctatgggtatcaaccttaaggatgcccgtgtggaagttgagaagatcattggacgtggtagcgggtttgtggctgttgagatcccattcacgcctcgtgcaaagcgtgtcttggaactgtcacttgaagaagctcgccagctagggcataactatataggatctgagcacttacttctggggctacttcgtgagggtgaaggtgtagcagcacgggtactggaaagtcttggtgctgatccaaacaacattcgtacccaggtcataagaatggttggtgaaagcacagaagctgttggtgctggagttggtggcggaagcagtggccagaagatgcctacactcgaagagtatggcactaatttgactaagctggcagaagagggtaaactagacccagttgttggcaggcaggatcaaattgagcgtgtaactcaaattttgggaaggcggacaaagaacaacccttgcctaattggagaacctggtgttggaaagactgctattgctgaggggcttgcacaacgtatttccaatggtgacgttccagaaacaattgaaggaaagaaggttattactcttgacatggggctccttgttgctggtaccaagtaccgtggagagttcgaagaaagactgaagaaacttatggaggaaatcaaacaaaatgatgacattattctctttattgatgaagtgcacacgctaattggagcaggtgctgctgaaggtgcaattgatgctgccaacatcttgaaaccagctcttgctagaggtgaactgcagtgcattggtgccacaacacttgatgagtacaggaaacatattgagaaagatccagctttagagcgacggtttcaaccagttaaggttccagagccaactgttgatgaaacaatacaaatcttaagaggacttcgtgagcgatatgaactgcatcataagctgcgatacacagatgattctttaattgctgcagcacaattgtcataccagtatatcagtgatcgcttcctgcctgataaggctattgacttgattgatgaagcaggatctcgtgttaggctcaggcatgcacagctccctgatgaagccaaggagctggacaaagagcttcgacaggtaaccaaagacaagaacgaggctgtacgtggccaagattttgaaaaggctggggaattaagagatcgggaaatggaattgaaggcccaaattacagccattattgacaagagcaaggaaatggttaaagcagagactgaatccggtgaagtcggtccccttgttactgaggcagatattcagcatatcgtgtcctcttggactggaatacctgtggagaaagtctcatctgatgagtctgaccgtctccttaagatggaggagacactccatacgcgtatcattggtcaggatgaggctgtcaaagctattagccgtgccatccgccgtgctcgtgttggcctcaagaacccaaatcggcctattgctagcttcatcttctctggaccaactggtgtcggtaaatcagagttagcaaaggctcttgcagcctactactttggctcagaagaggccatgatcagactagacatgagtgagttcatggagaggcatacagtctccaagctcattggatcacctccaggttatgttggttacactgagggtggtcaactgacagaagcagttcgccgccgaccatacactgttgttctcttcgatgagattgaaaaggcacatcctgatgtcttcaacatgatgcttcagatcttagaagatggaagactaactgacagcaagggtcggactgttgatttcaagaacacactgttgatcatgacatcaaatgttggaagcagtgtcattgagaagggaggacggaagattggatttgaccttgactatgatgagaaagacaccagctacaataggattaagagcttggtgactgaagagctgaagcagtacttccgacctgagttcttaaacagattggacgagatgattgtgttccggcagcttaccaagctggaggttaaggagattgctgatattatgctcaaagaagtgtttgacaggctcaaggcaaaggacatcgacctccaggtgacagagaagttccgggatagagttgtcgacgaaggttacaacccaagctatggtgccaggcctctgcggcgtgctattatgaggcttctggaggacagcttggcggagaagatgttggctggcgaggtcaaggaaggtgactctgctattgttgatgtggattcagagggcaaggtgatagttcttaacggtggtagtggtgttccggaaccactggcacctgctctgagtgtctaattgaaggataatatcgtcgttctggaattatggccttttctcttctctcagctggggcgctcatgatggtaaaactagatggcataaattctcccttcatttaggtgctttcacttttcctctttttttccaacagaggcagtaggaatgttatggaaatgaatcaacagagatgcatttagcaaacaaactgtatgctagatcttgagttgcttttatttttaaaaggatgtcagaagctttactccttcaagtacgtgtatttattcttttggtagcagtaagataaacgctgcactgttgtacctgtacattacttcgcaccagatggcttccaatactttttacacatggctgtaacttactttgaagtgtaggtaaatgctacggcatcctggccacccagcagcattaatatataatgatctgaaataagagtgatttttgttaggttaaaa

SEQ ID NO: 99349 - DNA, 487 bp, Oryza sativa
  Clone ID: PAT_MRT4530_9716C.1
aggctagtacttaactaatctcgctctaatcgcttacattgttttccgtgtcaggaggtaaaccttgcctcctgaagacagccttaagcagtacagcacgaaaatcaagttcaaacatttacaacccaagtcaaatttctcaaagtttatcttcatattacatccagaacttccatttatgctcaaaattgagttccgaattctgaaactgaccataatcagctacttgtcaactgaaaacccttgcaggtgtagtactgtagtacacttataaggttgtcaccaataatagctttccatattgttaatacggatcaaatttcacagttggtgtccaaattcaatgttaatttgtcatgtgaatacattcatagttaattattttccagtaccatccaagagaggaggaaaaagtcttactaatccagtataatatatcctcctagagcactagcaggcgaccactaaatatgatatatgccaatgg

SEQ ID NO: 99350 - DNA, 189 bp, Oryza sativa
  Clone ID: PAT_MRT4530_97170C.1
atggcgggcagctacgacgagcatgtcggcacggtggtggtggggcaggctgaggtgggagattgcgtgggaagtatggatgtgttcgacgcggtgggtgaggaggaaaggcaaggcgacgacgcggccatcacctttataggaggcttcggcgcgcggtcaaggcatgtagcggggctggcgatgtag

SEQ ID NO: 99351 - DNA, 2031 bp, Oryza sativa
  Clone ID: PAT_MRT4530_97171C.1
atggcctccaccgccggcgccgggaggccgccgtgggacccgaccgtatcgctccggctgggccacccggcgctcgtcctcctcgagcggtgcggcggcggggcgcggccgttcaaggccatcctcgcccacatgctccgcctccgcctcgccttcgagaccttccccatgagcaggctcctccacttcgccaccgtctccttcccgcaccacgcgcgcgccgccgagaccctcttcgagcacttcacccctcgccccaacctctacatctacaacctcatgctctcttcggccgcggcggcggcggcggcggcctcctcctcgcctagtcgtcggccggctgctctctacatgtcgatgctggcgtcatccattcaccccgatgagcaaaccttcctgtcgctgctcaagtcggtggatgcggagcgccgctccgtcgggaagcaggtgcacgcgcacgtggtggtgactggcctgcattcgcgcgtgtacctccggaactcgctgatcaagatgtacctcgacgccggcgatgtggaggcggcggaggcgatgttccggtgtgcgccgacggcggacgcggtgtcctgcaacatcatgctgtccgggtacgtcaagggaggatgcagcgggaaggcgctgcggtttttccgcggcatggcgtcgagggggatcggtgttgatcagtacacggctgttgctctcctcgcttgctgcgggcggctgaagaaggcagttcttggtaggtccgtccatggcgtcgtcgtgcggaggatcggtgtcgcggataggggattgatcttgagcaatgctctcttggatatgtatgccaaatgcggggaaatgaacacggccatgagagtctttgatgaagctggtgagagggatggcatttcgtggaacactatggttgccggattcgctaatgctggcttgttggaccttgctagcaaatatttcggtgaggcgcctgccagggatataatatcctggaatgcgcttctggctggatatgctcgatatgaagaattctctgcaacaatgatactatttcatgatatgcttgctagtagtgtaatacctgataaggtgactgctgttactttgatctctgcggttgccggcaaggggactttaaattcagcaaggagtgtccatggttgggtggttaaggagcatggtactcaagattctttcttagcatccgctcttgttgatatgtattgcaaatgtggaagtatcaagctagcgtatgccgtatttgagaaggccgtggacaaagatgttaccttatggacagctatgatatctggccttgcattccatggccatggagatgtagcattggatcttttttggaagatgcaagctgagggtacagaacctaatggggtaactttggttgctgttctcagtgcttgtagtcatgctggcctgtttgatgaagggtgcaagatttttgataccttgaagcaaaggttcaacattgaaccaggagtagaacactttggctgtatggttgatctccttgcacgatcaggtaggctgtctgatgcagtagatttggccaggaggatgccaatgaagccaagtcggtctatatggggttccattttaagtgcgagttcagcttgtcagaatactgaagtagcagagattgcttcaaaggaactcctctgtcttgaacccgcagaggagggtggatatgttttgctttccaacatgtatgctgctgaaggtcagtggaactacagcaatgaagtaagggagaatatggaaaggaaaggagtgagaaaatcagcagacactgagactgcaaagtacaaagaattgtcaatggtcaccaatttcccctatttttcatcaccacctgagcatattaaatgcatttctgctctcaccatctgtatcatcatgctggcatcgcctcttgggaaatgcatccgtgcagttgaaaaaacggatgtcctgctgaattttcattctttgcataccactccctccatcctcgacaaatacaagcactcctga

SEQ ID NO: 99352 - DNA, 545 bp, Oryza sativa
  unsure (1)..(545): unsure at all n locations
  Clone ID: PAT_MRT4530_97172C.1
ttatttcttcttcttcttcccttctccgtcgccgaccacctcgcctccgcctcgccgccgccgccgcctccgcccccaaccctagaccaatccacccccacgccgggtggaggccctcgtagaagcggcggcatccacgcacacaccacgccggcgagccccggctctcgacgcggcggttcccggtgacggagattccgagccgcgttcgtgggactggagagcggggggggggggngggaagtgnntnatgnncnanntnnnntgngtngtnnnnngngtntgtttggttggnggggtgtngggngaggaaggtagttttnngtggtttnntgnganggtnnnngttgtntttttggtttgtttgggntttggttgatggttgggaaagggaggatttgggnaagtatatgttggtgggngtatttntttttttggtgttanngantgganagttggagnaattgttttgtaggtggttataatatttgaanatggaattagaaagggtgtaattatggagttgttatgagtggnaagtttaa

SEQ ID NO: 99353 - DNA, 414 bp, Oryza sativa
  Clone ID: PAT_MRT4530_97173C.1
ggctcaataaatggaaaacggtggctttaaggaaaacaggaaaaattaatggggaattggtttaaaaaaaggaaagggccccagtttaaataaaggggacgaaaactccgttaagataaaaacaaagttatggaaaaaaaacaaagtgtgaaacaaaccgtccacattaatattttacaaggccccaaaaaaattttccgtgttgggaattttgatggaaaccaggggcgaaaaaaatggtcaaaaatttttctcggggggaaggccattaaagtttgggttttttttaaaacccccggggttggggttaaaggaccctttggaacaaggggtaaaaaatctatccggcttttttttttttggaaaatatgggggggtttcgctactttgaaaaaattgtgggttgtgttaaaa

SEQ ID NO: 99354 - DNA, 285 bp, Oryza sativa
  Clone ID: PAT_MRT4530_97174C.1
atgggatttgggagcccaagtggggtgggtgaccagctgacaaccaatgcggtcacaatggggatgtccatgtcccactcccaggaggtttgcatcggcgggctcttgtcgtccgccagggggagcaacgtgtcatgtccaagactggaagctaggctcaagaattttactttgggagaggacactgctgaatcattgactaacccgtccaccacagataatttattatttgaaagatcaaggtgtgataagtatggtagtctccagaatgagacattcttctga

SEQ ID NO: 99355 - DNA, 248 bp, Oryza sativa
  unsure (1)..(248): unsure at all n locations
  Clone ID: PAT_MRT4530_97175C.1
cctccctnntagtntnnntnannttttnntnttttntttacaagagaatgcatccatgcatctgccnctcagattaacaggtacattaacaacacgnctgcaattatgctgatcactgacattgtccgtggcgnttccgctgcactaggactactacaagcagcagctgctgctcccctcgncgtcgncgncgccgtccccggcgngcacagggctgaaggccggccgncgccgncgagcccggcctg

SEQ ID NO: 99356 - DNA, 255 bp, Oryza sativa
  Clone ID: PAT_MRT4530_97176C.1
acttcttccaacacaaatgcggttcaccagatcgtgcgttcaatggagcaacgggggcgaccacccgatctccaagaggacgaactcacagatctttcaacgtccaaaagacccttcctggcttcccaagtatggtggtctcctcgatcatgaaagtgaccatttaaagctccatgttagacgccgcccgcatatactcgaagtagcccttgccattatgttactattcccggccgacgcgctcctaggcgccgt

SEQ ID NO: 99357 - DNA, 384 bp, Oryza sativa
  Clone ID: PAT_MRT4530_97177C.1
atgggcatcctcttgcatattgtccccaaagacttccacatggtgtgccagctgcgggacaggatcagggataggaatatgattcacaggaggaagatcttcatccccaggcatgatatcaggcatctccccatgacacagaaagaccgaaacagtccaagatcttccaacacccccaaaagcagcagcccttttaatcacaattcttttagggacctcaagggcagaagagggttgggggaggctcaatgcaagccacagccataccttcattgcgccttggaggatcctcttgaagacagagatcaacgcactcaagctgatgatcccagggttcatgcagttgtatggttggagggaggaaaagagcagggtcagggttga

SEQ ID NO: 99358 - DNA, 305 bp, Oryza sativa
  Clone ID: PAT_MRT4530_97178C.1
attgggagcctatttggaatcacaacggctgattcatccaccgggatcataatttatttgaagaaaacatttttcatctacagggcatgcataaagcattccattatccacagtttggattttgccgaaattaacgtggataatacaaaaaaattgggtgatcaccaaaaactggatgaccaaacgaaccgaaacacctggttgatctaatgaaacacctttggaaccactaggcacggagatgtacttggccggccggttggattgaattctctttaacgggttccacttggacggaagcgggg

SEQ ID NO: 99359 - DNA, 2799 bp, Oryza sativa
  Clone ID: PAT_MRT4530_97179C.1
atggcgatccatgcaccgatgcgccgatgtggagaaatatcgggagtgatccatgcagcaatgcgccgatggggagaaacatcgggaaacctgacgccatctatggtgaaatcaaccgccccctccctcatcctcaaccgcagcacccccattcaattccctgctaatcccttcaaaacattcagaggactgctgagaattgcgcaggcaattgaattgataagacttgaagatcctcagaattctgaatggacacttgtttctagaaaatctaaaaagcaaactgctgtgcgttccaagcctgttaagtctgtttcctctcctaagatggttaatcctcccagggtctctagttctctaaagcctaacataacaaagtctttagatctctctttggttcgctctccaaaggttgcagattctaaatttcagactaagaatgttattcctgtcaagtctgtttttgcccgtcttcgttttccggagatcaccgccggtaagactccggtccgtgttcaggggaattgtgatccgccattatcggctgataagaagaagaattcaattttagatcggcctaaaacccctcctttttgtgatcgttgtttgtcgcatggtcaccgggaatttgaatgtgttaatagggttaaatgtgcttcctatcgcaaattagaccatcgggccgcggtcttttggaataaaaagaaggcccaagtctggcggcccaggactgtgtctaagcctgatgttggtggggctggtttcgggaaggagattgtttgttttatgaatcaaggaaacccttcctcttcctcgcatcagcggcagagtgttccccttttgttcctagcttcttcgcctagtgcttcgcctagtgcttccatggcggttgtcaaccctgaccctgctctcttcctccctccaaccttacaactgtatggaccctgggatcatcagcttgagcacgttgatctctgtcttcaagaggatcctccaaggcgtaatgaaggtatggctgtggcttgcattgagcctcccccaacccctgaccagtttgagggttttcgacagttggtgatgcctgatatcatgcctggggatgaagatcttcctcctgtgaatcatattcctatccctgatcctgtcctacagccggcatctcatgtggaagtctttggggataatatgcaagaggatgcccctgctaatcagcaaatttctcaaaatagtgctctgtcagtggtggctggttctcataacatgtttgctcttctagcagcagtcctgctggtggttggggttgaagacacagaattggtcctcttgtcggccttccttgaagaaaagcaaaaagaaaaaaggaggagctctagaataaacaagctcacagaggggtacatgtcacctgaccccaatctggggattggaaaacctagggggaaaagtgctaaaaggctcaagcttctggctgaacaaagtgttttggatggtcttttgattcctgtgtggtacttactagttatttaccactttttaatccttctcgtccctgttataaatgaatggggagcttctggtggtttgtttgtgggatggaatagtgctcatttcaatggtcaagttgtggatcaaacagatcatgctattatcatgcagttttctgccagagttagccctgatacctttaatctggttaatgtttatgggccatcttctggcccccaaagagatgattttgttcactggatgaatgggctagacatatatttgaatgaaaactggatctttacggattttgaaaaggcttttgacatgatagagcaccctgcagtccttcagattatgacttcaatgggattcccacccaaatggattgagttggttcagctcttattcagttcagcttcaacttcagttcttcttaatggggtcccaggaaagtttttcccttgcaaaaggggtgttaggcagggagatcctctgtctcctctgctttttgctattggtgcagatattttgcaagccattgttaacaaaggacatcaaagaggggtgttcaagcttcctattcctgtcattggggatcaaaattttccaattgtgcaatatgcagacgatacactgctattcatgcaagcctctgggaaacgacttctagctctaaaagctttattgaatacagtgactctttccacaggattgaaagtgaattatgcaaagtcatgtctgatacccctaaatttggatgaagagaaggctgattgtctggcaaagacttttggttgtgtcctgggttctctgcctttcacctatctagggctccctctcagttgttctaagcacaagcttccggtggcagtgatagagaatattgatagagtaagaaggcattttcggtggaggggaaaggatttaacttccaccaaaaaatcattggctgcctgggggaaggtttgtaggcccaagaagaaaggtggtttgggtgtaatagatttgatattgcctcaaaatgccagtgtttgtggctcattttggtggaaggacattgttcagtttgaagttctattcagaggttttgcaaggccaacaattaacagtggatcttcagtgagcttctggtatgacttgtgtaatggaaaggtctttgctcaggtgtatcctactctcttctcttttgtcaggcacaagaatgactttgtccaacaacatttacagagggcagtggatgatcaattctatttacctctttcagttcaagcctatgatgaatacaaactatatctggaggacattgcttag

SEQ ID NO: 99360 - DNA, 4581 bp, Oryza sativa
  Clone ID: PAT_MRT4530_9717C.1
atgtcatccagcttcgtcgacaacaacttcaacaccaacctcaaccagggattccctgcttcaacaatgctggtgtggactcaagtcggagaaatcgtcttcccagtttacaccacaatgctgatctcagccggtccatcaatgaccggaaacgagaatgcagtggctacaaaccaaaacgactccatgtcgaaagatcctcccgctgaggcggagaacggaacatcaatgacatccgagctcgagaaggattccaaggcggccaaaccttgtcactccgacaagaaccacgagccgacaaggataacttctgaagcgacaagggataaagacaaggaacgaggagcgacaccaacttcagatcgatttgttggggtaatcgacatcggtccccatgaaccatcagtattgcacctcctcgaagactatggatcatcgacagcgagcgcgccgcgggaagtattggctatcaacgatgtcggcacgtcagcgcgcaccaatgcagaagcggagaatcaagtggccaccccagcccagcacatcagagccgtcgacgctatactgagggaaaccccctacgatcccgttctgaacgacgatctcgcgcgttggacagaacgactacgggaatcagtgaccaacctcagcaatgcgttcgaagaggccgctgccgcagcgcacccagagcagccaccaactggcgatgccaatgacagacatccacgaaggacacacgatcgccgacaacccaccgcccctagtgctgggtgtagagctttcagtcgttccctgcgtgatgtccgatggcctgagagattccgacccggagcaatagagaagtacgatgggagcaccgacccaaaagagttccttcaagtctactccacagtactctacgccgccggagcagacgacaacgcattagctaattatttgccaactgcgttaaaaggctctgcacgttcatggctgatgcatctcccgccctactcaatctcttcgtgggcagacctgcggcaacagttcgtcgccaacttccaaggaacctacaagcgccacgcgatcgaagacgacctacacgcgttgacacagaactcgggtgaatccttgagggaatatgtttggcgcttcaacgagtgcagaaatacaatctccgaaatcaccgacgcttctgtaattcacgccttcaagtccggtgtcagagattgctatactacccaggagttggcaacaagacgcatcacaactactcagagattgttcaagattgttgagcgatgcgcccacgcagatgatgcgctaagacgcaagaacgataagccgaagaccgggggagagaagaaaccagccacggacacacctgagtcaagcaagaagaaaaatcgcaagaatgggaaaaggaaagctcaagcggaagtcctcgcagcagaatacacgaaccctcccaagcgcccagacccacaaagtagcgacgcaaagaaaacatggtgccccatacacaagacggacaaacattctttggaagattgcctttctttcaaaaagtcgctcgagaagcacattgcatttgaaaaaggcaaactgccgtcatcccaggacgatatccgatcgtggtcgaacccactattcggaacggagcagatcacctttgatgtcgctaaattcgatacagcttataatgccatcatcgggagaactgcacttgcgaagtttatggctgcatctcactacgcatatcaagtgctcaagatgccgggaccgaagggaacaatcactattcaagggaacgcaaagctggcggtgcaatgcgacaaacggagcctcgacatggtcgagcaaacccccagcccacccgccacgactgagccacccaagaaaccgtccgacatgccgggggtccccagggaggtgattgagcacaaactcatggtgagacccgatgccaagccagtaaagcaaagactgcggagatttgcatcagaccgaaaacaagccatacgagaagagctcgacaaacttctcaaagctggcttcatcagagaagtacttcatccagagtggctagccaatccagtcatggtgcggaaggccaacgggaaatggagaatgtgcgtcgacttcactgacctcaacaaggcgtgtcccaaggatcacttctctcttcctcgaatagatcaactgctggactcaacagccggctgtgagctgttgagctttctcgacgcttactctggctaccaccaaatcaacatggcaaaagagaacaaagagaagacagcattcatcacgccattcggggtattttgctatgttaagatgccgttcggactcataaccgtagggaatactttccagggcacggtccagggcgcacttagcgaccagctcggcaacaatgtcgaggcatacgtcgacgacatcgttgtcaagaccaagacaagcgactcattgattgacgatctgcgggaaacgttcgacaacctccgacgatatcgcctcatgctcaatccagagaagtgcacgttcggagtaccgtcgggcaagctgctcggattccttgtctccggcagaggaatagaagcaaatcccgagaagatcaaggcaatcgagaacatgaagtcgcccacaagactcaaggaagtacaaaagctaaccggatacatggcagcactgagcaggttcgtcgctaggatgggaaaacgagggcaacctttcttcgctctactaaagaaacaagacaaatttgtatggacacaggaagccgaagaggcattcgttgtactcaagcgctacctatcaaacccccctgtacttgttactccccaacctaatgaagaattattcctctatattgccgccatgccatattccgtgagcactgtcattgttgtcgagagagagaaagtacaacgaccagtctattacgtcagcgaagctctccacgacgcaaagacaagatatccacatatccaaaagctgctttacgcggtcatcatgacatcaaggaagctacgccactactttcaagcccatagagtcacagttgtctcctccttcccgctcgccatcaagtcccaggtactcgccgacttcgtagccgattggactatgcctgataacaaatcagacaaccaagtcgacaccgaaacgtggacaatggcgttcgatggtgcactcaacagccaaggagcaggggcaggatttatcttaacgtctcctttcggagatcaattcaagcacgcaatccacctcaacttcagggtgaccaataacacagccgaatacgagggactacttgccgggataagagctgcagccgcccttggggtaaagcgactaatcgtgaaaggggactccgagctagtcgcgaaccaggtgcacaaagattataaatgctctaaccccgagttatccaagtatctcgcagaagtcaggaagctagagaaaaggttcgatgggatcgaggtccaacacgtctaccgcaaggacaacatcgagccagatgacctagcacgacgtgcgtccagacgagaaccgctcgagcccggaatttttctggacatcctgacaaagccatcagtaaaagtggttagcggcgaagttagcccggccgcccccgacattagctcggaggccacaaaggcagaacgtgccgttgccgatatcgagaccacagatgactggcgcatcccactaatcaaattcatcgacagcgaggagttgcccgaggacgataccgaagccgagaaaataacccttaaagcaaaaatctactgtatggtcggcaacgatctatacaagaaagcgccaaacggggtacttctcaaatgcgtctcatctgacgacggcagacacctcctccttgatatacatgaaggcatctgtgggtcacacgccgccggtcggacattggtcgggaaagcttttcgacaatggtttttctggccaaccgcccttaaagatgcatgcgacatggtccaacaatgtgaagcctgtcaattgcacagtaaacacacaaagctacccgagcaagcgctccagactatccctcttacttggccattctcgtgctgggggctagatatacttgggccattcccacgtggacagggcggctacaggttcctattcgtggcgatcgacaaattcactaagtggatcgaagcagtacccacgggggaaatcaaggccgacaacgccatcaaattcatcaaggggatattttgcagatacggacttccgcaccgcatcataaccgacaacggctcccagttcatcagcaccgatttccaggattactgcatcgggcttggagtcaagatatgcttcgcctcggtctctcatcctcaaagcaacggacaagtcgagagggcaaacggcatagtactacaagggatcaaaacccgagtctacgacaggctcatgtcacacgacaaaaaatgggtcgaagaactctcatcagtactatgggctgtacgcaccacaccgacaatgtctaacaaggaaacacccttcttcctcgtgtacggctccgaggccatgctccccagcgagctacgacatcagagtacacgagtatag

SEQ ID NO: 99361 - DNA, 445 bp, Oryza sativa
  Clone ID: PAT_MRT4530_97180C.1
gtttttcaggggcaaggaggacgcggccaacatctgtgcccgtggacactacaccattggcaaggagatggttgatctgcgccttgaccgcatcaggaagcttgccgacaactgcactggcctccagggcttccttgggttcaacgctgttgcaggaggaacggtctatcggttcgtgtcccttatccttgagcgtgtttctgcggactatggcaggaagtccacgcttgggtttaccgtgtacccgatcgctcatgtcttcacctatgagggtgagccatacaacagtgtcctttacacccactctcttgttgagcacaccgatgacactgtgctggtcgacaatgaagccatacatgacatgtagacgccgtacctggacattgagcagacaacctacaccaacctaaacagggttgtgtcccaggtcatctgctgactgact

SEQ ID NO: 99362 - DNA, 843 bp, Oryza sativa
  Clone ID: PAT_MRT4530_97181C.1
atggcggttgtcaaccctgaccctgctcttttcctccctccaaccatacaactgcatgaaccctgggatcatcagcttgagtgcgttgatctctgtcttcaagaggatcctccaaggcgcaatgaaggtatggctgtggcttgcattgagcctcccccaacccctgaccagtttgagggttttcaacagttggcggtaaactatgttcagaatgtgttggggtatcatgtgttagaggtcaaccatcatcctatggagtttctttatgttcgggttgcgtctgctctgctaagagatacgctaatcgcggggggtccctatgaggtggataatcagtttatgctatgttttgttccccatgatctcacttctagttgccgaaactctccttttactgtggaagggtgggttatgtttttggacttcccgttggatttcaaaaccccgaccgttattgacaaagcagtctctctttttggaaaagtagtcaaagtccagttagatgataatataagaggaagtttgttggttaaagctttgtactcttctgcccttgaggtccctaaaagaattgtgattaaaagggctgctgcttttgggggtgttggaagatcttggactgtttcggtctttctgtgtcatggggagatgcctgatatcatgcctggggatgaagatcttcctcctgtgaatcatattcctatccctgatcctgtcccgcagctggcacaccatgtggaagtctttggggacaatatgcaagaggatgcccatgctaatcagcatatttctcagaatagtgctctgtcagtggtggctggttctcataacatggtgctgtag

SEQ ID NO: 99363 - DNA, 305 bp, Oryza sativa
  Clone ID: PAT_MRT4530_97182C.1
gcgctgcggaattgctgatggatggtgcactttgtaccgtgtccttcccaaaatgcccttcatccactgaccccttcatctccatggggaaattgtggagtgtggacgcccctgttcctcaatcatctctctacccctctccagttctcaaatgcccttctgctcccgatcccccacggtcggacgaagccggtgaggaagtagaaggaacagccgaggtcaacgtcgacgggagcctcgtcgccggatcaggcagccactttcatggccgctgcaccagttgtcgctctgcaatggcttcatag

SEQ ID NO: 99364 - DNA, 1780 bp, Oryza sativa
  Clone ID: PAT_MRT4530_97183C.1
gggagcctctggtggtctgtttgtgggatggaatagtgctcatttcaatggtcaagttgtggatcaaacagatcatgctattatcgtgcagttttctaccagagttagccctgatacctttaatctggttaatgtttatgggccatcttctggcccccaaagagatggttttgttcactggacgaatgggctagacatagatttgaatgaaagctggatctttatgggtgatttcaatttttacagatctatcaacaacagaaataggccttgtgctgacatgagtgacatttacctgtttaatgaactaattagtaatctgggtttgattgaagtcccattgaaaggcaggtctttcacctggagtaacatgcaggataatccattattggagcagcttgattgggttttcattaccccaaattggtctatctcctatccgaacactatggttctagctctttcgaagcacatttcagatcatgtgctccttatgatccaggtgaagacgtccatccctaaagctaatttgttcagatttgagaatttttgggttcagcatgatggtttcctacaacaggttgaaaatgcttggctttccattcaaaacgcgagttcaaatgcccttgctatttcagccaagttcaaacagctcagaagaaacttaaaatgttggagaaagttcttcccttgcaaaaggggtgttaggcagggagatcctctatctcctctgctttttgctattggtgtagatatcttgcaaaccattgttaacaaaggacatcaaagaggggtgttcaagcttcctatacctgtcattggggatcaaaattttccaattgtgcaatatgcagacgatacattgctattcatgcaagcctctgggaaacaacttctagctctaaaagctttgttcaatacagtgactctttccacaggattgaaagtgaattatgcaaagtcatgtctgatacccctaaatttggatgaagagaaggctgattgtctggcaaagacttttggttgtgctcagggttctctgcctttcacctatctagggctccctctcagttgttctaagcccaaggtagtggatttttctcctctcactaatcggattgaaagaagacttgtggccacttcttccttcctctcctatggagataggctaactcttgtaaattcagttctgtcagcaatgcccacttactatatgtgctcccttcagcttccggtggcagtgatagagaatatagatagagcaagaaggcattttctgtggaggggaaaggatttaacttccaccaaagaatcattggctgcctgggggaaggtttgtaggcccaagaagaaaggtggtttgggtgtaatagatctgagagtgcaaaatagggcccttctcctcaagcagttaggaaagttctttaaccagcatatgcagataccttgggttaaactgatttggaattcctattactctaggacattgcctcaaaatgccagcgtttgtggttccttttggtggaaggacattgttcagtttgaagttctattcagaggttttgcaaggccaacaattaacagtggatcttcagttagcttctggcatgacctgtgtaatggaaaggtctttgctcaggtgtatcctactctcttctcttttgtcaggcacaagaatgattctgtccaacaacatttacagagggcagtggatgatcaattctatttacctctttcagttcaagcctatgatgaatacaaactagattatttatcatga

SEQ ID NO: 99365 - DNA, 543 bp, Oryza sativa
  Clone ID: PAT_MRT4530_97184C.1
gttttatttcttgtcttgtagggaagttggtagaggatgtgctctcagggtaaggattgattgtcagtttgcttagttctttcttttgattcaccagttgggatttagttagtatggatagataatctgctaggttggggttaaatgttgcctctgatatggtgagtgaaactacttttgtggattttgtatggattgtggttagtgggtgaaatttgtgttcttgattgaaacatctacctagttcttgaatcttcaatggcagcattattgtactgattgttgtatggtccaataatgtatttagggggattctacttactgctagtctgctcccagatatgaagatttgattctgttttttttcctcttcaaatgtttcttttttataattagttgaaatatgctattatccagagtacttttgggggtttatggattgtttcctcctactcaagagaggtaaacaaagtaacttcttcagtacagattttccagagatgccatttcttcttcatcattccttctttgattacttcatga

SEQ ID NO: 99366 - DNA, 533 bp, Oryza sativa
  Clone ID: PAT_MRT4530_97185C.1
tcacccatctcattctcatcatcgtcgcgtgagagagagctagagctgagctaagaatcatggcgtcggtgggattcgggagcagagtggcggcggcgggcgtggcgccgtcggcgtcgtcgtcgtcggctgggcggaggcggccgtcgcgggtggcgatggcggtcggcgccacgagggggaagccggcgccggcggaggaggagcgccgccgacgaggaaggcggcggcggcggcttcaacctcggcgccctcttcgccaagaaaggctgaagaatcctttcgaattctacgtacgtatatactccaacgcagagcgtcagcttgcctacacgatcgatgtattaccctcctcctcatcaaacagtttgattcaaactccaagcttaatttggaggatgatttgcgtatacgtagcaacatgtgaggtgtgactcaaaagtgattaattttttatgtgataatgtggtttatatacttcatacaacacacatcatttgttatttcttttcaactcaacatggatgaatgga

SEQ ID NO: 99367 - DNA, 720 bp, Oryza sativa
  Clone ID: PAT_MRT4530_97186C.1
catcacccatctcattctcatcatcgtcgcgtgagagagagctagagctgagctaagaatcatggcttcggtgggattcgggagcagagtggcggcggcgggcgtggcgccgtcggcgtcgtcgtcgtcggctgggcggaggcggccgtcgcgggtggcgatggcggtcggcgccacgagggggaagccggcgccggcggaggaggagaagagcctcgccgacttcatcttcggcttcatcttcaagaaggaccagctcgtcgagaccgacccgctgctcaacaaggtcgacggcgcgccgccctccggctccactgtctcccggaaggcccccgccaagaagcccgcggcgagcgccgccgacgaggaaggcggcggcggcggcttcaacctcggcgccctcttcgccaagaaaggctgaagaatcctttcgaattctacgtacgtatatactccaacgcagagcgtcagcttgcctacacgatcgatgtattaccctcctcctcatcaaacagtttgattcaaactccaagcttaatttggaggatgatttgcgtatacgtagcaacatgtgaggtgtgactcaaaagtgattaattttttatgtgaaaatgtggtttatatacttcatacaacacacatcatttgttatttcttttcaactcaacatggatgaatggattaaaagggttaagcctgctgatcaaaaaaaaaaaaaaa

SEQ ID NO: 99368 - DNA, 715 bp, Oryza sativa
  Clone ID: PAT_MRT4530_97187C.1
cacgaggccccccccctttttttttttttttttttttttttttttttttttttttttttgcagccggcaaaaataactatttatacgagtgaattttttttaacaaactggtgggcctgtccatgaagctgcatgaacaatcaacacaatctagctaagcacaatcttgacctcaaacttaaaagatttgaaatgtttaaccaaatacactatcaaatatttcatcaatagactcccccaaaggaacccattcaggggtcatcagagtcatcatctctcaagtatatgaaggggcaaccggggttgaagtagccaacctcaaattcaacttcatcattatcagggtgcttcagagcaaccatcccttgattcacgcaaccatgacaatagccatggtcacgcggcttcaatgggcggcataagtaagatttcttcccatatattggcttcacttcagcaaaataacatgtcaataaccagtcttctaaggggggtttcttcatcttcacagtgaagttataatggtgaaaaactttctgatatgcatccacactgaaacattgatgctgaagctcatctagacggtataccacatctctgaattcatctcttccttcaatatatttctcaaaagccaacataacttcctcgctcatccatcgttttccgttctgaacgatttcttctgtagacatgttatgccgtgctacgtctt

SEQ ID NO: 99369 - DNA, 2405 bp, Oryza sativa
  Clone ID: PAT_MRT4530_97188C.1
ccggccgggctcttctacctcttctcccacccgcgccgcgccccacccaagacgagagcgagcgaggcagtgccgccgccgccgccactgacgccgcccgagcaccaccggagcaggagcagcgtcagccatggccgtcggcaagaacaagcggatctcgaaggggaagaagggatccaagaagaagaccgtcgatccttttgcgaagaaggattggtatgatatcaaggccccgtcggtgttcaacgtgagaaacgtcgggaagacgctcgtgtccaggacacagggcacaaagattgcttcagatggcctcaagcaccgtgtgtttgaggtctccttggctgatcttcagaacgatgaggatcaggcgtaccgtaagatcagactacgtgccgaggatgtgcaggggaaaaatgttcttacaaacttctggggcatgagtttcacgaccgacaagctcagatcattggtcaagaaatggcagacgctaatagaggctcatgtggatgtaaagaccactgataactacatgctgcgtctcttctgcattggcttcaccaagaggaggccaaatcaagtcaaacggacatgctatgctcaagcaagccagattcgacagatccgtcgcaagatggtggagatcatggtgaaccaggcatcatcctgtgatctcaaagagctggtttcaaaattcatccctgaagtcattggaaaggagatcgagaagtcaacttcaagtatattccctctccaaaatgtgttcatccgcaaggtgaagatcttgaaggcaccgaagtttgatcttgggaagttgatggaggtacacggtgactacaaggaagatgtcggtatgaagctggacaggcctgctgagactgacgaggcggtggcaggggagttgccatttacttcggcaaaacggcgagaggtggctttagatctgaaatcctctcagggttcatccaagtctctgcaatccgacgccagctacactgccacagctgaagacgacatccaggccgtagcgcgagcactcatcatcatcgctgcaaagttccatgaagctatcttgcagctggcggagctgaaagcattcctggatagctgcatggaagaaattgagggctgcatcatcacctccagctgccccaaagctcaaggatacatgaatctgcagaacaagatgtacgagaagggtcatgaacaagcagtagctgaagaacttatgggaccactgtcgccaccgtttccaaacatggacctagctggaatgaatggccaccgatctggggcaagatccctacactggctccatccaagcgcggtaaaggaaaaaaggatcgtaacccctgtcagtgtctctagtggcagcggcaagcatatttgcggtgactccactggagatgctctgaataggttggctgacctaagggtgcagtccaatgagagcaaagaaagaagggaggaacagaggcaagccaaaagtgctagagcttgcatggagctactgaaggctgatggcatcaccaagaaggttcctctgtaccacatggcactgaagctgtttcgtgatgggtatttgcatgagttcttcattgatgattgcatcacaccaaaggaaggtggtgctaatggatttggaggctggtttgatggtggaggtggatttgggcctagaggttatgatgctcagtgccaagctatatttcgaatgagggctgatcagattcatgctttgtttgggctactcactaatcggtataaccttcacggaacaattgagatataccctatggaagcacttggaatattcctatacaacatggcaggtggctattctaatcggtcgacaaataataggatggtccattcacgatctactgtgtcaaagtatttccatagagtgcttaatgttgtctatgcaattacaattgacataaataagcatgtagatcctaactttgctagagtggataaccgtgtcatgcaagatgaggccttccagccatttgctagtgcggcaggttcagtggatgggacacattcctgttattgtggcatttgaaggtgtccgtcaaggggatgctccccccacagcggcccatcgtcgtccagtgccaagctcatctccaaggtcgccgagaagaagatcaaggccgccggcggcgccgtcctcctcaccgcctaggtactcgggagctagggttcttggcttcttgctatctatctaaagtgttagcttctttttttatctcctgttgtgttggaagacaaagcaaagaaagactacttttgtgctgttgctgctgttttttgtgttatggaacaaattgatggtatggctactaagatctgtggtggctattcatgagttttgattgaaaaaaaaaaaaaaaaaagcggcc

SEQ ID NO: 99370 - DNA, 385 bp, Oryza sativa
  Clone ID: PAT_MRT4530_97189C.1
ggaagttaggatcatcgggagaaccggcgagaggggggggggaaagggtaaccggggaaaccatccgaccaaccgcacgtgcactaagcacggcccggaggcaggagtgaacgggcgaggcggccattgcggggacagagtcacgcccgccaggacacgggacagtaaagggcggggcaggcgggtaagtatcgaggggatcgcggccaagatacgccaattcccaataaagagcgccgggctggaatcatgggaaagctttggtggcagcgcggcagcgccagcgggggccgggctggggcctagcgcccgccaggcgcgtcagggacgacccggcgccaaccgggcgttcagaccacgcgcgagcgcgcgcgcccggacgtga

SEQ ID NO: 99371 - DNA, 2582 bp, Oryza sativa
  Clone ID: PAT_MRT4530_9718C.1
tttttttttttttttttttttttttttttttttttttttttcccacggaaaacaaaaaaaaaaactagaacaaacctttatttcataacttttttttcagatctttttcctaacttctaaggatgaaaactaccagtaatcctctttttgtttcttttttactactattacatagggttgtgacaacaacagatatcagtaataatcataggatctaaataaataagaacaagcaatggagttgggaatcactcatcttcgtcgggcctgctcgcgaggcacagctcatggagctcattgagaatccactcctccccagtgtggccacccaggacaagaaccctggtgccgccaaccacgcatgtgctatgaccccaggcgaacttgggtggctggccagggacgttcaaaatcctccatgtcggcttctcctccgctgggtcgaggaggaacagctgtgagggcgagtgcagcccagcgatggagccaccgaatatgattatccgtccacaggggaggctgaccgcgacatgatcgagcctcggaggtggaccgatgctcgggaacccggttgtcgccagttgcctccattgtgggctgtcttcaccagcgtccatagtgtaggcatcacaggagcgtagccggagagagccgctctttgccaacccaccaaacatgaagagtttggtcttaccaaagacggacaaggtgtggccgaggcgggatggtggtgaccaggatgttgggatctccttccatgctggtttttccttggtgaggtcaagcaggaatgtgtcactgaggagcacaccggattcagtgcacccccctgagacaacaagctttgatccatccagggtacatgaactgtgccatgacctcggcaatggtgggccctcgcttgcaacctccctccaggtgggctgcttggcatcaaggtcaaggacaaagacatcattgagcaaaccttgctgtccacagcctccaaagaccactagccatgagccattcagccatgagagagtgtgcccccaccggccgggtggagaagctgaaactttgacacggcgccattcaggctttgcagattccaggttgagcacaaaggtatcatccattggctgcatgttgactccttcacctccaaacaggacaaggcgattaccaacagcacaggcactgaagttgcaacgggaaggctcaacacgacctccaactgtaaacttcctccatgaagctgcctcaagggttgtaagctctcttgcaagacgaccccatcctaacatcttggtgctcatctcaagcctcacagtgacgtctcttccccacgcgttttgacataccatctttctcaggtgatcattcttggtcaactcatgcattctagtgcagactgatccgatggatgcaacatctcttggcgataagcgagacaatatgttgtgcgccagaacttcatctgagagctggaggatgcagcagtactcggaactttgaatcttaggaatatgttcatgagaagcagggttgatctcttgaatgttgggtctgtggttggactgttgtttatacactggatatgatacattgctaagatcaatgttagcttcagagaacaactggattccaatgacgtgagtcacaaaaccatcatccccatgcattggaatgagccttagcctgttgtacagtggagcaccgtccttccgaaaattcaatagctcaccttggaactcaattccctcattcaagcatcgccggatctctgaaacaaccatgggatcaacaagcggatgtcgtctttgggcacgtggatcccggaattgtaagaatcggattgttttccgtgtcaggaggtaaaccttgcctcctgaagacagccttaagcagtacagcacgaaaatcaagttcaaacatttacaacccaagtcaaatttctcaaagtttatcagttgcggccgaggacctcgtcggcgcggtaccccgtggcggcctcgaaggcggcgttgacgtagatgaccgggaaatccacctccaccgcgtccgacaccacgatcgccgccggccttcccctcccacgccgccgcctcatcctcccccgctagcccccccgggggtttccacacccaccccacctcctcctcctcctcatacacctctatcccctcctcgtcctcctcctcctcctcgaacagcttcatcctcttcaccgacaccaccccgccgcctccgccgtgatcccccgcatcaaacatatcttcatatcacatccagaacttgcatttatgctcaaaattgagttccgaattctgaaactgaccataatcagctacttgtcaactgaaaacccttgcaggtgtagtactgtagtacactcataaggttgtcaccaataatagctttccatattgctaatacggatcagatttcacagtctggagtccaaattcaatgttaatttggcatgtgagtacattcatagctaattattcaccactaccctccaagaaaggaggaaaaagtcttactcatccagtatatattatcctcctatagcactagcgggcgaccactacacttga

SEQ ID NO: 99372 - DNA, 119 bp, Oryza sativa
  Clone ID: PAT_MRT4530_97190C.1
gaacccctaatcaattcactatggtgcctgtcatcaacctcaaagctgacagtcctgatcaatcttcctggactacctatcccgctgtgcctataaggacctattgacaacctaagata

SEQ ID NO: 99373 - DNA, 213 bp, Oryza sativa
  Clone ID: PAT_MRT4530_97191C.1
atggcgtcgtcgtgctggggccggctcgggctcgcggcgctgtggcacaggctgcgtcagctcagcgtggcgcggcggaggcggcggcacggcggaggcggcggcggccgctccatcctcggcgccggggggctcaactacgacccgctcagctacgcgcagaacttcgacgacggctgcctcgagccggacttcacggtcaccgccagatga

SEQ ID NO: 99374 - DNA, 147 bp, Oryza sativa
  unsure (1)..(147): unsure at all n locations
  Clone ID: PAT_MRT4530_97192C.1
aaaatcaatggaactatganagcaccaataatggctgggttttcattcggtagggagcatatatattactaacatatatagacatactttttcacaaccagcagtaacacatataccataaccactaataattcacttacacgcttc

SEQ ID NO: 99375 - DNA, 345 bp, Oryza sativa
  Clone ID: PAT_MRT4530_97193C.1
atggggggaagagagtggaataagggagcagcgccggtggggaaagggaggctggggcgctggctgctcgggctgggcggcgtggcaagaggcggcacgacggcgctcggcgcttggcgcggcggcacggccggcgtccgggagccagggacgacggcgacggcggaaaagaggaggtggcggcacgaggaggagactgcctcggcgctgtcggcggggctgtgcccggctgagctccggccggccagcgtggtggagggagggcggtggagatcagggagacggcaagaggaggccgtgtccgtggtcggcgacctggtgacggcgttcgtcccggcacggtga

SEQ ID NO: 99376 - DNA, 177 bp, Oryza sativa
  Clone ID: PAT_MRT4530_97194C.1
tttttagagagaaccggaccatgattaagtgttacaagggacagttcacatggtacatgtagttatactggagtaacagcccaattggactcgaagaaggattatatcataaactcctgggagtagacatgtgaaaagttcaagtacaggagaagaatcatcagtcataataatgag

SEQ ID NO: 99377 - DNA, 4203 bp, Oryza sativa
  Clone ID: PAT_MRT4530_97195C.1
atggcgacggcgacaggcggcgatggcgacgtcggcgcggcggcaggcgacggcgcgacgggacgactgagtctaaccttgagctctatgatgtacccgaacgtggaggaatgcaaaggatggacaaggttgtcaccacctgccgcctacctcactttccttggagcacacaacaaacgaagagcaaggtttagggcttggacacgtgatcgtgcactagaagaagcacttatgccaaggcgtcgcacgagctccccgcgctgttggtcggtgtcgccgagcgagcgcactcctggaggttccggcggccgcgcttcgggcagcggcgggaaggacagcgggctggttatacaccgcgtggtcaaggagtcaggatcgtctgcgaactatccggttctcacgaagacgaattacaatgactgggcattgctcatgaagatcaagttgcaggcacgttgcctgtgggacgctgtcgaacgtggccgcgctgccgttgagctgcacgaggatcagatggcgcttgatgcgatctatagtgcggttccacccgagatgatctcgatcttggcgacgaaggcatcggcgaaggaggcatgggactgcatcaagacaatgcgcgtcggtgacaaccgcatccgcaaggccagcgcacaacgggtgcgtacggagtacgagaggatcgcattccgggacggcgagtcggtggaggagttcgccatgtggcttactagtgtcgtcaaccaactcgccacccacggtgatcccgagcccgatgacaaggttgtcgagaagtatctgcacgtcgcccgaccgaggtttagccaactggcggccgaggattaccagaccccgccatcctcccaaaacaccgatggcaagctctacctaaccgaagaagaatggctggagcaccacaaaaaggagcaggaggcgaaacgctctggcgccggttccagcggacgtaacaagcgccgcggcggaaaggggtgcatcggcggtggctcggatgggtccacctcctcgccggcacgcagggatgacaaatgtcgtaactgcggcaagctcagccattgggctaaggagtgccggagcaagcctaagcacgaagaccaggcccatgtggcccaagacgacaagcccacgctcatgctcctgactgggggctacgtcgaaaccgcaggctccatgttgccgccaccaccgccacgcgcgacgccggcgcctcagcgcgtctgcgttgagctcgtcgagaagaaggtgttcgctgggttagatcatgaagcagaccgcgaccagcgcagctggatcatggactccggtgtgtcaaaccatatggcgggttgccgagcggccttctccgacctcgacactggcatcaccggcaacgtttggcttggggatggctcgatcatccctatcgaggggtgcggcatggtgttgttcgcctgcaagaatggagaacaccgcaccctcgccaacacgtactttctgccgcggctcgccgccaacattgtcagcatcggccaactcgacgaaaccagcttccaagtattggttgaggatggcatcatgcgcgtccgcgacaagcagcggcgcctactcgcccgaatccctcggagcccagggcgcttgtacgtgctcgacatcatccttgcgcggccagtttgcctgacagcgcgcgccggcgaagacgcgtggcattggcacgctcggttcgggcacatcaactttactgtgctgaagaaaatgagtagggagaccctggtacgtggattgccattgttgacgcaggtcgatcaggtttgcgaggcgtgtctcgccgggaagcatcgacgggcgccgttcccacgacgggcgctgtctcgctctagcaagcccctgcaactcctccacggcgatctctgcggcccgatctcaccagtgacgccgagtgggaaccgctacttccttctcctcatcgatgactacagccgcttcatgtggatcaagctccttccctcgaaggacgccgaaccggccaccatcaagcagatacaagcggctgccgagaggaagtcggggaagcggcttcgtgcactacgcatgcaccgaggaggcgagtacaccgccggacacttcaacgagtattgggccgagctcggactgcgtcgagaactcacagcgctgtattcgccacagcagaacggcgtcgtcgagcgccggaaccaatcggtggtgggcacggcgaggagcatgttaaaggcgaaagggctcccaggtcatcatcgaagagaatcggcgaaaaactccatacgagctatggaacggcggttcgccggcggttcatcatcttcgtacatttgggtgtgtgggccatgtgaagaactcgatgacaggagtaaacccatgattttcgtgggctacgagccaggatcaaaggcgtactgcgcctacaaccccgtgacgcgacaggtgcacatctcccgcaatatcgtgttcgacgaggaggctcagtggaggtgggacggccaggctgaaacgggcgtcgacaccgacttcgtcatcgagtacaccaccgtgcagcagtcagatgcggcgccaccttccccagctgcggcaccaccatcgccaggctcgccgttccgcaccatcgacaacgtgcttggcccagcaacaccacaaggacaggcggtacgggagttcgatgaggatctcctgatggtctctgcggaagagccggcgtcattcgatgaagcagagcaacatcagtgctggcgacatgcaatgatcgaggagatcaagtccattgaagccaacaacacttggcgtctcgccgacgggccgtcgcgtcagtgcccgattggactcaaatgggtcttcaagacgaagaaagacgttgctggcaacatcaccaggtacaaggcgtatctcgtggcgaaaggctacgtgcagcggcaggggattgacttcgacgaggtgttcgcgctggtggcgcggctcgagtctgttcgactgctgttggcacacgcggccccgcgcgcgtggtatgctaagctcgacgcgtccctgctggctctaggcttccatcaaagctcgtcagagcacgccgtgtacttccgagccacgggcgcacgccggctggtcgtcggcgtgtacgtcgatgatctcgtcatcaccggtggtgactccgccgagctcgagcagttcaaggacgagatgaagggcacgttccagatgagcgatctcgggttgttgaaatattacctcggattggaggtgaatcagactgaagatggcatcactgtgtgccaacgggcatacgctgagaagatattggagatggctgggatgagcagcaccaatcccagcctcacccccatggaatcacgcctcaagctcagtaagtcgagtgccgcaccagctgttgatgcaactgattataggcggatcgtgggatcactgcgatacttggtaaattcgcggtcagatttggcgttcttggtgggatatgtcagccggtttatggagaagcccaccaccgagcacatggcagctgtgaagcgtgtgttgaggtacattgctggcactaccaactatggctgtcaataccgaaggaagaaggatgccgtgtgcctcgttggctacagcgacagtgatcttgcaggcgatgttgatagccgtaagagcacaacaggagttctcttctttctcggggataatttgatcacctggcagtctcagaagcaaaaggtcgtcgctctatcgtcctatgaagcggagtacattgcggcgacgactgttgcgtgccaaggtgtgtggctggcgcttctccttgctgagctcaggggagaagaagggagcgccatcacactgaaggttgacaaccagtctgcaattttgcttagcaagaacttgtgtttcacaatcgtagcaaacatattgacactaggtatcatttcattcgggagtgtgtcgaggaagcgcatgagccccaacgtgtggaagccaattggaatcgaaaacccggatacggaaatgaaatcgaatattatcgaatacagatacagaaggaatacgaaactgaacgaatatggcaatgaagatttgctggagagagaaagcgctatctctgatctcgccgggcacaaactcgaggaggaagactaccctgttgtcgactatgagtcagaccttcagaccgccatatcgaaaacagttagatag

SEQ ID NO: 99378 - DNA, 323 bp, Oryza sativa
  Clone ID: PAT_MRT4530_97196C.1
gtgacttgagattagccttggtcaatactgaggaccgaaactatgctcagggaggagcagaggtctagtgcgatcgggataccatgtgagaaggtgagtagagtcagaattcttgaaggacaaatttggtcaacggtggggatcgggattagactcagggaggagttgaggtctagacggttaaggataccgagtgacgaacttggatacaagatggcacatggtcgggtttcacgtggtacgtgtgcaagcgtcggtgctcgcgacgggagttgaaagaaaatggagaggagtatctgatactacagtacggcgaggtactg

SEQ ID NO: 99379 - DNA, 2002 bp, Oryza sativa
  Clone ID: PAT_MRT4530_97197C.1
atggactcgtcccttgtctgctggaaactggaaattcgtccacgaagggcgttggttttgcccatcgggaagcacttcaagaggaatgtcgtagagcgtttatcccaggtgttgatagcagcacgccacttcaacgagtactgcgccgagctcggactgcgtcgagaactcacggcgccgtattcgccacagcagaacggcgtcgtcgagcaccggaatcaatcggtggtgggcacgacgaggagcatgttaaaggcaaaagggctcccaggtatgttctggggagaggcagtaaatacggcagtctatttgctgaataggtcgtcgtcgaagagcatcggcggaaaaactccatacgagctatggaacggcggtgcgccggcggttcatcatcttcgtacatttgggtgtgtgggacatgtgaagaacaccatgccaaatgtgaagaaactcgatgacaggagtaaacacatgattttcgtgggctacaagctaggatcaaaggcgtaccgcgcctacgaccccgtgacgcgacgggctgaaacaggcgtcgacaccgacttcgtcgtcgagtacgccaccgtgcagcatccagatgcggtgccatcgacacggcgcttcgtggaacgtgagacggcgccaccttccccagctgcggcgccaccaccgccaggctcgccgttcgtgtcgtcaccgagccaggcgtcgccaagcactcctccgcacgctggaacaccgacggtggagttcgtgtcaccaccatcaggtctggaggacaacctcgacgtcgaccatgatgacgcgccactcaagttccgcaccgtcgacaacgtgctcgccccagcaacaccacctggacaggcggtacgggagttcgacgaggatctcctgatggtctctgcggaagagccggcgtcgttcgatgaagcagagcaacatcagtgctggcgccaggcaatgatcgaggagatcaagtccattgaagccaacaacacttggcgtctcgtcaacgggccgccgtgtcagcgcccgattggactcaaatgggtcttcaagacaaagaaagacgccgctggcaatgtcaccaggtacaaggcgcgtcttgtggcaaaaggctacgtgcagcgacaggggatagacttcgacgaggtgttcgcgccggtggcgcggctcgagtccgttcgggtgctgctggcgcacgcggcgagtgagggctgggccgttcatcatatggacgtcaagtccgccttcctcaacggtgagctccaggaggaagtctacgtcacgcagccagccgggttcgtggacgccggcaaggagcacatggtgttgcgactcgacaaagcgctatacggtcttcgccaggccccgcgcgtggtatgccaagctcgacgcatccctgctggctctcgaagctcgtcagagcacgccgtgtacttccgaggcacgggcacgcgccggttggtcgtcggcatctacgtcgatgatctcatcatcaccggtggcgagtccaccgagctcgagcagttcaaggaggagatgaagggcacgttccagatgagcgatctcggattgttgaagtattacgtcggattggaggtgaatcagactaaagacggcatcaccgtgtgccagcgggcatacgctgagaagatattggagatggccgggatgagcagcagcaatcccagcctcaccctcatggaatcacgcctcaagctcagcaagtcgagtgccgcaccggctgttgatgcaacggattataggcggatcatgggatcactgcgatacttggtaaattcgcggccagatttggcgttctcggtgggatatgtcagccggtttacgaagaagcccaccaccgagcacatggcagctgtgaagcgggtgttgagatacattgccagcaccaccaactatggctgtcaataccgaaggaagaaggatgctgtgtgcctcattggctacaatgacagtgatcttgcgggcgatgttgatagcc

SEQ ID NO: 99380 - DNA, 1875 bp, Oryza sativa
  Clone ID: PAT_MRT4530_97198C.1
atggcgtcggcggcggaggcggtggaggagctcacgaggctgtaccgggagctcccgccgcgccccgccgtcgaggaggtggaggcggcggaggccgtgctggcctcggccgacgcggaggaggcggcgcgcctcgatgaggtggcgcgggaggaggcctcggcctcagcgtcctcgtcggcggcggcgccggggcgggccgacggggagctcctcgccgtgctgcgggaggccaggcgcaacgccgtgcggctccgcgcgctgcagcagcggaaggaggccgcgtacgtcgtcgagctcgagaggcgcttcaaggtgttcgacgatttgatccagagggcgtcgcgggtggtctcctcctcctccgacgccgccgaagcgggagggggaaccaccggcgatggatacgttggtgttggtgcggacagcgtggacctggagatggagctgaggaagaaggaggcggcggttgcggccgcggccgccgtcgcggagatggagcgcggaagcaagggtctcgctgccctgggcttggagtccaagcccatctcctcgctacgccgtgatgtctctgcaggtactgacatggaaaaattgagccttatccaagtggcaagcctgatagagtcatcagcaaagaaagggatcacagaactcagcctccgggggaaactggtcgaccagatcgagtggctccctgtttcactcggcaaattgcaagatgttaccgagcttgatctttccgagaataggatcatggcactcccatcaacaattggcagccttagatatttgacaaagcttgacctacactcaaatcagctgatcaatctgcccgacgcgtttggggaactctccaacctaattgatcttgacctgcatgccaaccagcttaagtctcttccttcatcatttggaaatctcacgagcctagcaaaccttgacctgagctcaaatatgttgaaggctcttccagattgtttaggaaaattggcaaacttgagaagattaattgttgagacaaatgagcttgaggagctaccctatactattggatcttgcacatctcttgtggagcttaggttggatttcaatcagttaaaagcccttccagaggccattgggaagttggagaagctggaaatactgacattgcactataacagaatcaaaggattgcctacaacagtgggttcactttccagattgagagagctggatgtcagttttaatgaggttgaagtaatccctgagaacatttgctttgcgacaagtcttgtgaagttgaatctcagcaggaattttgcagacttaagagcactgccgaaatcaataggaaatcttgagatgctagaggagctggacataagcagtaaccagatacgggtactgccagattcgttcaggtgtctttcgaggctacgtgtatttcatgctgatgagactccacttgaatttccaccaagagaagttgtaaagttaggggctcaggctgtggtcaagtatatgaatgatttgaatgctgcaagaggaacaaaccagaagaaaacagatcggggaagcttctggacctggctcttctcgctgtttggttgttgcaaaaagaaccaagaagtgggattgccagtataactgaagcatttcatcatctgtatgtatgttgtgaattactcaggtctgcaaagaaaggaaacgtggataatttggttcctcttgttttttttgtcccttttttttggtgtgtatatatgtaattttgtcatgtaaggtccatttctagttatgcaagacctattaagattcatttctgtgtgtaacttcatttgtatgatagcatgttactgcttccatattaaaaactgtcttacagcaagt

SEQ ID NO: 99381 - DNA, 370 bp, Oryza sativa
  Clone ID: PAT_MRT4530_97199C.1
gcaggtgctgttgagcctgtcctggtaattgggtggtcaccgccaccactaatccctgattcatacacgaatctgttgcattgcattgtgatgggtgcctggatatttccccgattcgtcatgctgttaattgttagcttcatatgctgttgagcctgtcatggttgtatatctgtgattttttcactttgatgcgaaacggtttttctgatgggtgcacatttctttccctaggaggatgatatgcttcctactcaaatcgctattcagttgactaatgagtatgaatttttcccgcttctcatttcaattgaccgtcttcttgatttaataaccatattttacactttctcctttcaatagctggaat

SEQ ID NO: 99382 - DNA, 1217 bp, Oryza sativa
  Clone ID: PAT_MRT4530_9719C.1
ggctcgcgtccgctgccgctcacatcaaaatccttctctctctcgcggcgctcaggtgaagcccagtcatgtccgtccccggcgtcgcctcccgcgccgccgaccgcttctactgcccgccgccgcgccgccacctgctccaccaccaccacaaccaggcgtctaaggcggcggcggcggctgtagagaggcagccgaggagcgccgcggcggcggcgaaggaggaggaggaggagaccaatctcgagtgcttcatcgcgtccacggccgtccgcgttcccgcgcatcggctcccccggacgagctcgagctcgcgggagaggggagcggccggggcgccgccgtactacgagctcgcggatctgtgggaggcgttcgcggagtggagcgcctatggcgccggcgtgccgctcctgctcaatggcacggacggcgtcgtgcagtactacgtccccttcctgtcggctatccagctgttcgctgcccggccgccgtcgtcaacctcaggggcctcaggctcagggtcctctgtgatttgcaaatcagagatgagtagacttggtgaagatagtgatggtgagagtgctcaggatatgagcagtgagagcgaccatgagcatttaagatgccgatgtttagttaacagtatttctgcagatcaagatggtttctccagtgatgatagtgagtctggcaaccaggaattgtaccctgttttccaatatatggagcatgatgcaccatatggaagacaacctttagcagacatgatatcattacttgctaatagatttcctgatttaagaacatataagagctgtgatcttctaccatccagttggatttctgtagcatggttgtcttacccattggacgttggatgcaggtatcccatatacaggataccgacaggaccaacattgaaagatttggatgcttgctttttaacattccattcactatctacaccagcggaaggtacactaagtgggcatcctgagacaaatgttttccatgatagcaaaatttatgatgttcctggaaaggtcacactgcctctcattggtctagcatcacacaagtttaatggttccatgtggacatcaaatcaagagcatgagcaacagttaactaagtcgctcctgaaagctgcagatgactggctttgccagcggcgagtcaatcatcccgattaccgcttcttcctttcacactaa

SEQ ID NO: 99383 - DNA, 420 bp, Oryza sativa
  Clone ID: PAT_MRT4530_971C.1
atggcgacgtcggtcggcgtaccggcgatgaacagcagccggccgaagacggaacagtggcggcaacgccactgttgccggcggggatgcacttccggaggcctccgcgggcaacagagggcaggccggcgcagaggaggcggctgcgacgctggaggaggcgccggcacggccgaccggcgctcgggcaaggcggacgtgacagcccaccagccattgggctggacgcccccgattagggcgcggtcaaggcctgcatttatttttggaagcataaacgaaaggatcacatatttattattatcaaagctatcgaaggtattttacattgttacatctccttcaccctttataggtttctatattacagatgctcctgttattgttttaattctttttcgaccagtacaacctgattag

SEQ ID NO: 99384 - DNA, 288 bp, Oryza sativa
  Clone ID: PAT_MRT4530_97200C.1
atggcgcggcggcgcgacaagggtgacggcgacggcagaggacgctggatctggccggtgacggctccttgtggtgcggaggcgtcacggcgtgagaaggcggcggtgctggcggtggaggccgccgcggcgcggcaaggtgcgcgacgccggcgcagtgaggtggccgaggtccgggaactgccaatggcggtggggagcccctggtgcccgacagcgatggacaggaggcgcgctgcctggcagcggggtgcatcggtggatggctcagccttggccggtgactaa

SEQ ID NO: 99385 - DNA, 978 bp, Oryza sativa
  Clone ID: PAT_MRT4530_97201C.1
ttagaacggatgcgggtggctgcggctgatgccgttcacgttggcgaagaggccgacgagctcttcccggtaaggcaagaacgtccgccgcggcgtgcccccgccggcgctggtgccggtggcgccaccgcccttagcgccgtaagctatcctgtggatggcggcgaccgtgtcgatctctgcggcggcggcctgtgccgtcttgcggccgcttgccggcgtcggcttgggtggtttgggtttgggcttgaagtgttcgacgtcgttctccttgctactgggcggcgggatggggaggaacaggaacttctccttgccgtcgctgtggctgcggccgacgacgagctcgctgatgcggcgccaccgcgccatggaccccgttgagccgctcttcctgggcgggcgcggggaggccgatgccgaggcggagccggcgccggcgccgggcgtccagagacagtagctctccggcggcgcgccgtccaggccgccctcgtcggacgccggcgcggaagacgacgacgacgacgacgtggacgtggaccacctgtcgaacgaaccacgggactcctcgaggaagagccgcccgagcgggcccctcgtccgcggcggcaccgtcgccgcagcgtcgtccttggccagatgctgctggcgatcgcctcctcctccggcgccggcgcggccgaaaaccgggtagaacggcttgatgcggccgtcggcgaacaggtcgtcggccacggcggcggtgcccgcgggggagtccctgctgacgaaggggaactcgaactcgaactccccatcggaatcagattcctcctccactcccgtcgtcgtcacgtcgctggaagaagcctccgccggcagcacgtcagcggcgacgtcggcggtgggatcttgcggctctggaatcctctcctccatggtggcaggagagggggaaggaatgagaattgagagataggaggaggagtagacgag

SEQ ID NO: 99386 - DNA, 245 bp, Oryza sativa
  Clone ID: PAT_MRT4530_97202C.1
ttggtttttttttttttttgggttttttttttttttttttttttttttttttttttatctttaaaaaaatggaaggataaattaaaaaaaacaaaagacagcaaaaggcctatattcaaaggaaactaacccaaaccccctttttaaaaacaaaccggcaaacatgcgggccccaaatgaacagttaactgggggccttggctacaaaatttattcagcaaaggggccgaggtttaggttccaaa

SEQ ID NO: 99387 - DNA, 256 bp, Oryza sativa
  unsure (1)..(256): unsure at all n locations
  Clone ID: PAT_MRT4530_97203C.1
cttgtnttcttncntcgtcttgggactcttgtggtggtcaagaacgaggacgagagaggtcggagagcnaggcggcggctgtcccgttccgcgtncggtgcgggtaaggtagctagcnagcaaaaggggagatggaggcggtggcggttgcgggcggtggcgcggggctgacaaggtggcaggcggcggcgctgtcggcggtggcggggtgggtgtgggcggcctcctccttcnacctcacgcggcggtcgcgcgc

SEQ ID NO: 99388 - DNA, 1299 bp, Oryza sativa
  Clone ID: PAT_MRT4530_97204C.1
ttggcacgcccggtgggacacgagtgtgacaatctttcatcatggtggacgtcaagcctactgatgatgatggcaagaggactgaagttgattccacaaacaagattccgataaccatcgacatgctgacaccagagcaaaggggttaatatgatgcatggttgagcaagctacagaacacatactttgattcttttgctctgactcgacaaggaacagtgatccagaagcataaggtagaaatcccacccccttcaaacagtgaagcttctggttctggtacttctggacgcaacaaggaagaaggcaaagaaggacttaaacaagaagatgccaacctcgagttcaagaatttccaagacagtgttgactatgcggttaatcatgctctcatcaatcagtcaggaatcttagctaatgtgatgagcaatgtgatggagaagatgatggattgcaagtttgaagaaaggggagccagaggtccagcgttcttccctggtgacaagtttcctaattacaggaccttggttacagataatcaacctcagattaacttgacggggacaaattcggctcaacctaacccgatggtgccagcatcggctcagccgaattcaactgtgatttcatcagctcacaaacaaccagagttcagacctcgtatcctgcagttccagggtgcacctgagcagcaacagcagaagccctgggccgatatgatagcctatattatgagggagtagtttggtttcaagcctaaagattctggtaatttgtatcggaaaccatatcttgagtagtttgataggattccattaccacactgatacaaggtgctagatttttccaaattttctacttatgaacatatcagccgatttctagctcagctgggagaggcatcggctaatgatgcttttagatttaggatgttccctttgtctttgtctagatcggcctttacttggttctctaatcttccatacaattctatcagtaattgagccgatttggaaaagcaattccatagctacttttacagtggcgttcatgagatgaagctgacagatctgattccagtcaagtagaagcatgatgaatctattcaagactatattcagagattcagagatatgaggaacagatgctatagtttgtccttttcagattctcaattagccgatctggctttccagggtttattgcatccgatcagagaaaatttttcggctcaggacttcgaaagcttggctcatctggcccagaaagttggagtgcatgaacaacggttttaggaag

SEQ ID NO: 99389 - DNA, 378 bp, Oryza sativa
  Clone ID: PAT_MRT4530_97205C.1
gattaaggcgccccgccgccgggcgcgcctcccgcgccgcctcccggcgctcaggttctccgtcgccgacgtgctctcgccgcgctacttccactccaccgaccgcctccgccgagccagggcgcgcggcgccgccgacgccgaggacgtcgagggcaggctgctgccgtacatcaaacgcctggaccggcgcgccacgcgcgcgttcctcgacggcctcgccggggtcctggacgcgcccggcgctcgccgccggcgcgccaggtcgctctacctcgagttcttccgcacctacgacggcgccggcaccatcgaccggatgatcgacaccgccgtcggggagtggggcgtcgagcacctcgacgtcgtcgtcctcag

SEQ ID NO: 99390 - DNA, 723 bp, Oryza sativa
  Clone ID: PAT_MRT4530_97206C.1
atgaggattaggaggaggccacagtgtgtttcgttgcagagctcagatccatccacatccaccgctgcaacccagaatgcggcagcaagaagccgggagggtggtggtggcgatggtgttgggaggaggctgcaccagctgcaccaccatgggaatgtggatcttggcaagaaatcgtccggggtggcaaggcggcgcctggcattgttgcagcaggaaaatggagtggattgcagcgacagcaagggacctggtgaagaacatggaggagctggagatgctcacaggagcgtgccattgccatgcaccggcggcgaggtgggcagcaagtcggagccggcggcggcggttgcaccggcggtgatcgtggatgtgaaggaggaggagaagagcgtcggcaatggcggcggcggcggtggagccaagaagcggcgaggtggtggcgcgccggcggtgctgatggaggggtcacggtgcagccgcgtgaacgggcgagggtggcggtgcatccagccgacgctcgtcggctacgcgctctgcgagcaccacctcggcaagggaaggatgcggagcgtcaccggcggcggcgggggacgcggcggcgccagccagctcggccgcaccgagcaccggccgccggcgacggcgaggaaccccgccgccgcggcggcgccgccgcccaaggccgacgagccaggcccgaatcatatcgcgcaccattaa

SEQ ID NO: 99391 - DNA, 1741 bp, Oryza sativa
  Clone ID: PAT_MRT4530_97207C.1
ttattaagaaagtacttccaatgctcaaataatttctgggaaaaatccagaaaatacttgggcatacaaaggtgtgacactgatccaattcaacaaccccacatggtgcatcagactccaccaccttatgatggggatggtaagatcaagtttgataactccaagaggctgatgaaaattgagcgtaatccttttcaagtaaacatggttcatacaactgggaagacagccgataagaaggattatcggtccaagcaactcaattctgcaaggattatcaacaaatatcagaagagacatgatcggcatgaagagaaattttatgaagatgatgatagctttgacccccactggagttgtgaattcttcaggttttgctggaatgaggggatgaggctaccatctatcgaagattgccctagttgtagtaatcataaaagggggcatgttgcaagctcaagccgatcacgtcccagggagaatcggctacctcagaagaaacttcctgttcaccagatattgggccctattcatgaagactactttcaggatgaatcggctcaggaacgggagcaagttgagaacaagcaatggtgtccttcaggccctttcaccaagaaccagaagaggagagttcagagtgaggaatagggagcagtttgaggagttcggtgttgatcatgccgatatggaggaagaagatgtggtagaggaatcctcggctaagttggttctgtcacctgagcaagctatctttgagaagccagatggagcagaaaatcggcacctcaggccattgtacgtcaaaggatttgtcaatggtaagccgatttccaagatgttggttgatggtggagctgcggttaatttgatgccatatgctactttcaagaagttggggaagactgcagaagatctgatcacgaccaacatggttcttaaagattttggtggtaatccttcggaaaccaagggtgttcttaacgtggaattgacaatcggcagcaagactgtacctacaactttctttgtcatcgatgggaagggttcttacaacttgttgcttggtagggattggattcatgccaattgttgcatcccttcgaccatgcaccaaagcttgatccaatggcaaggcgataaggttgaagttgtgccagccgacaagtcagtcaatgttgctaatgccgatttgactatttgggagatggatggaattgattgcttgtctggcaaagtttgggaaggagattttctaaagatggagagccccaattgctcctttgagggcgttgtggagggttcaagcttctacaccaaggatattgtagatgatctcgatggcaaactaggacaaggtttcatgtcggccgatgacttagaagaagttgacattggtccgggagacaagccgaggccgacatttatcagtaagaatttgtcatctgaatttagaaccaagttaatagagctattgaaagaatatagagattgctttgcttgggaatatttcgagatgccaggacttagccgattgattgttcaacatcggctaccaatcaaaccaggatatcggctgtataaacaacctcctagaagatgtaaggccgatatgtttgaggctattaaggccgaaattaaacgtttgtatgatgctggttttattcagccatgccgatatgctgagtgggtttctaatatagtgtcacgtcccaaaacgactctaaaatacatcctctaa

SEQ ID NO: 99392 - DNA, 2781 bp, Oryza sativa
  Clone ID: PAT_MRT4530_97208C.1
atatggcatcaaattaaccgcagctccaccatcaaccaacatcttggaaatcggcttaccattgacaaatcctttgacgtacaatggcctgaggtgccgattttctgctccatctggcttctcaaagatagcttgctcaggtgacagaaccaacttagccgaggattcctctaccacatcttcttcctccatatcggcatgatcaacaccgaacttggcaggcaacacaaaagccatgttaaccgacgaagaaacaacagattttcctttagctaacctctttgcttcatcggctaacacgtctcctcttattcagctgatggttgatttcttgctcacctcctcaaactgctccctattcctcactctgaactctcctcttctggttcttggtgaaagggcctgaaggacaccattgcttgttctcaacttgctcccgttcctgagccgattcatcctgaaagtagtcttcatgaatagggcccaatatctggtgaacaggaagtttcttctgaggtagccgattctccctgggacgtgatcggcttgagcttgcaacatgcccccttttatgattactacaactagggcaatcttcgatagatggtagcctcatcccgctatcatcatcttcataaaatttctcttcatgccgatcatgtctcttctgatatttgttgataatccttgcagaattgagttgcttggaccgataatccttcttatcggctgtcttcccagttgtatgaaccatgtttacttgaaaaggattacgctcaattttcatcagcctcttggagttatcaaacttgatcttaccatcttgtatagccaactagatctgttgtcagaacagcttgcactcattagtagtatgagatccagtattatgccatttgcagtatttccttttgcctagttcctcagccgatggaataacatgatttgcaggcaattgaatttgtttctcccgaagtagcatatcaaagattttatctgccttggtgatatcaaaatcatatttctcctccttggaagatggcttcacccacagacatgtagtaacctttttgtttctgatccattcggctgctgctacttcggactcatcttcataatcggaatcagaagcataattgtaagaataaacactattcatctttttgacaatcttcttagcttcctaaaaccgttgttcatgcactccaactttctgggccagatgagccaagctttcgaagtcctgagccgaaaaattttctctgatcggatgcaataaaccctggaaagccagatcggctaattgagaatctgaaaaggacaaactatagcatctgttcctcatatctctgaatctctgaatatagtcttgaatagattcatcatgcttctacttgactggaatcagatctgtcagcttcatctcatgaacgccactgtaaaagtagctatggaattgcttttccaaatcggctcaattactgatagaattgtatggaagattagagaaccaagtaaaggccgatctagacaaagacaaagggaacatcctaaatctaaaagcatcattagccgatgcctctcccagctgagctagaaatcggctgatatgttcataagtagaaaatttggaaaaatctagcaccttgtatcagtgtggtaatggaatcctatcaaactactcaagatatggtttccgatacaaattaccagaatctttaggcttgaaaccaaactactccctcataatataggctatcatatcggcccagggcttctgctgttgctgctcaggtgcaccctggaactgctgctgtgtggcagagataagcccacgggggtcgctggggagtccatgccttgtttataagggggtgattatgatccaggaacggtgcactgtggtggattgtgttgtgcgaggggtagaacatagacgatatttgctcttgattaacttgaggaatgttgtgaccaacgtgctgaggttgtggtctcatcaggatacgaggtctgaactctggttgtttgtgagctgatgaaatcacagttgaattcggctgagccgatgctggcaccatcgggttaggttgagccgaatttgtccccgtcaagttaatctgaggttgattatctgtaaccaaggtcctgtaattaggaaacttgtcaccagggaagaacgctggacctctggctcccctttcttcaaacttgcaatccatcatcttctccatcacattgctcatcacattagctaagattcctgactgattgatgagagcatgattaaccgcatagtcaacactgtcttggaaattcttgaactcgaggttggcatcttcttgtttaagtccttctttgccttcttccttgttgcgtccagaagtaccagaaccagaagcttcactgtttgaagggggtgggatttctaccttatgcttctggatcactgttccttgtcgagtcagagcaaaagaatcaaagtatgtgttctgtagcttgctcaaccatgcatcatattaacccctttgctctggtgtcagcatgtcgatggttatcggaatcttgtttgtggaatcaacttcagtcctcttgccatcatcatcagtaggcttgacgtccaccatgatgaaagattgtcacactcgtgtcccaccgggcgtgccaaaagcgtgttgatgcgaaaaacacacactggcctggaagatctgcttaacttcagtgcaggacctaaaatctctctttcgggttcagggcgtgccagttggtttgatcctgcaa

SEQ ID NO: 99393 - DNA, 459 bp, Oryza sativa
  Clone ID: PAT_MRT4530_97209C.1
atggtggacgtcaagcctactgatgatgatggcaagaggactgaagttgattccacaaacaagattccgataaccatcgacatgctgacaccagagcaaaggggaacagtgatccagaagcataaggtagaaatcccacccccttcaaacagtgaagcttctggttctggtacttctggacgcaacaaggaagaaggcaaagaaggacttaaacaagaagatgccaacctcgagttcaagaatttccaagacagtgttgactatgcggttaatcatgctctcatcaatcagtcaggaatcttagctaatgtgatgagcaatgtgatggagaagatgatggattgcaagtttgaagaaaggggagccagaggtccagcgttcttccctggtgacaagtttcctaattacaggaccttggttacagatggactgcctgtttctgggattacttcaggatag

SEQ ID NO: 99394 - DNA, 645 bp, Oryza sativa
  Clone ID: PAT_MRT4530_9720C.1
ttagccccctcccgcgctctcccgtggccgcaccacctctccccaccgtcctcctctctctcccgtgccgctggccatctccagtcgccccttccgcctcgcccgcgcgccggtcgcccgtgccgtcgcctccctcggtgtcgcagtcgcctcccctttcccggcctgccctccgtttcccgcggagacccccgaaggcgtgcccccgccggcaaccagtggtgttggcgccactgtgctgtctccggccggctcctgttcgtcgctggtatgccgatcgacgccgccgtctccttcgataccgtggcatcgtctccttccccagccactcctcggtttcgccggaacaccgtcgtgccgcgccggcctctccatccacctcgccggaatttccccggtcggcccttcctccacccgtgcgccgtcggccgcgccaccaccacctccggcatcgcagcggcgagccgccccgtcatcgtctttgtcctcggctccgcgtcgtcaagcctcgtgccggccgcgtcgcaacttcgtccaaggatcgccgccgaagtcgtcccctcgccgttcgtctccgacgttcccggccgtctccgccgcgcccgttcgtcgttgtcgttcccacgcctcgtcgcgtggtggtaa

SEQ ID NO: 99395 - DNA, 495 bp, Oryza sativa
  Clone ID: PAT_MRT4530_97210C.1
atgggtgacgcccagcggcggcagcttctcctcgtcgccctcatgctcgccgccgccgcagaccactcgctggccggcttcttcggcggcgcgccgccggcgtctggtcccgccgccgccgccgccgacaacgacgagaagtgcagccggacgtgcgagtcggagcactgcctgggcacgtatgcacaggcgccgttgatgcggtacggcaagtactgcggcgtgtcgtacaccgggtgccccggcgaggccccctgcgacgccctcgacgcctgctgcatgctccacgacgcatgtgtccaggccaccgacaatgactacctcaacatgctgtgcaaccagagcctgctggactgcgtggcggcggtgaggtcgccggcggcgaggatcaggacgttcgaggggaaccagtgcaacgtgacggacgtcgccgacgagatcacgtcgctcgtcgaggccgccgtcttcgccaagaggatcctgcataggccgtag

SEQ ID NO: 99396 - DNA, 411 bp, Oryza sativa
  Clone ID: PAT_MRT4530_97211C.1
ttttctcttgcgggttataattgtggccccatgggatttccgggaagtgggagaggattcgtgggtgcgccccaggactgggaaagaatgccgctaatagattggagggtgcgctgttaaagatgggtggctgctggaatatctgctggcgtggcctcagcacacactatcacctccctaagcaccagatgctcatcaaggacgccatcacccggaggcgctgtgtgcaacagcctgtcagagtgtgcaatgcaaactgacctgcacttgagtgcccgtgaactggcattgtttggcacagtgggcttttggttgggacaacgcacagaataaagagcttgcttcacctgaagccaatggttcaagtttgaataaaaatgttaccttgttcaaaaaaaaaaaaaaaaaaaa

SEQ ID NO: 99397 - DNA, 319 bp, Oryza sativa
  Clone ID: PAT_MRT4530_97212C.1
tgaaagaatatagagattgctttgcttgggaatatttcgagatgccaggacttagccgattgattgttcaacatcggctaccaatcaaaccaggatatcggctgtataaacaacctcctagaagatgtaaggccgatatgtttgaggctattaaggccgaaattaaacgtttgtatgatgctggttttattcagccatgccgatatgctgagtgggtttctaatatagtgtcacgtcccaaaacgactctaaaatacatcctctaaattatgcctagaataattaaaatccgtgtgaaagcctccaaaaaaattaaaat

SEQ ID NO: 99398 - DNA, 463 bp, Oryza sativa
  Clone ID: PAT_MRT4530_97213C.1
aatgactaatgacatacgtgtcatgatcttcccaaagagaaaatgaaaagcatttacatacagcagctgtatgaataggcccaggacgtgccaccaacgtagctttaggcccggcccaattattcggacggttctatattcggcctggtaagaagtttagagatcggcaccatcatctgcatgggaaactgtttctttctgctacgggccatggtccacaagcccaaatgtcacattcaattgcctctaactttcaccctagtggggagcccatccgccattcgcagcgtcagtgacgtcacctgccgcggccggtacgcgccgtcgacggcgagctcgagctcctggagcacgcaggcgatgatggacttcatctgtatgtacgccatctccttcccgaggcacaccctcggcccgccgtggaacgacacgtaccggaacgggctctccggccggaacgtcg

SEQ ID NO: 99399 - DNA, 330 bp, Oryza sativa
  Clone ID: PAT_MRT4530_97214C.1
atgtctacgacgtcgacggagacggccgcatcacagctccaccgcgtgtgccgcgctgtacgagcgccgagggtatcggcgccggcaacgacgacgcagagcgcgaggtggccgcgcgctggccgccgccatctcctcgtctcctctctccccgacgccacagccgcagcaaggagaggcgccgccgcctgcgccgctcttctccgcgttggcgccgccctgaagaagagtggagatctcagaggagtgagacgaagtcggaggaagaagactaaagacatgcccctgacatgctttgcattgcagcatcactccatctctgaagtctga

SEQ ID NO: 99400 - DNA, 108 bp, Oryza sativa
  Clone ID: PAT_MRT4530_97215C.1
gcaaacgttaaatcactagtgctggaatctgaggatacatttttggagaagtcaagggacatgtttgctacacgcgctgagtcaccgaccaatgggacccacccctag

SEQ ID NO: 99401 - DNA, 207 bp, Oryza sativa
  Clone ID: PAT_MRT4530_97216C.1
atggtctctgcggtcttgaaggctaccgccgctgtcggcgtcgccggtgtgttcggcatgccgttcagtgacggcacatccatcgggctgctgctcaacaccaaggggatcatcgagctcgtcatcctcaacattgcaaggaacaatgggagcatgagttaccagtcgttcacagtgctggtgttcgtgtcgacactgaatcgctga

SEQ ID NO: 99402 - DNA, 521 bp, Oryza sativa
  Clone ID: PAT_MRT4530_97217C.1
aaaccagcagaggccccggaatacaaaccggcctacacatccggccacaccgagccacaagccccgagccgacctactaccctcacccgcataacaccgactatcttccaccgtcaaagatgccggcgccgctcccaagacaactcacacttcacccaagccccctgccaccatcaaacatcaccatgggagcagctcctcggtcccccgccgctacgacaggtccaccctcgcgcccaaccactaacacctccccccgctcctggcccgacgcctgcccaacgccctgcagccaccccccgcgcaactccgcccccaaccattacgcctccccgcccccagcctccccacccccgctccccgaccccacaccacccaccaaaccctccccgcgtccgcgcacgcctccccccacccaagcctcccgccctcccccaaccccaccccccaactccttccgccccgcccccaagccctcgaccccccccgaccccaccgagccccgcccggccacccgctga

SEQ ID NO: 99403 - DNA, 591 bp, Oryza sativa
  Clone ID: PAT_MRT4530_97218C.1
ggcgctgcccatgttcggcacgaggctaaacctagctagctaataagctccaaggctccaagcaaagtaattaagatgaccatgaaagtgaagagcaccatgatggctgcttccatgctgctcttcctcctcgtcctcgccggcatcgtcaccgccaccaccaccaccaccgacagcaacattcgcctccccagcaacggcgccgccggcgaaaccgatggaaacaaacaggcgaaatccagaccgtgggagtgctgcgacaacatcgagatgtccgtgctcaagatctacccgccgcggtggcgttgcaacgacgaggtgaagcagtgcgccgccgcctgcgagaactgcctgcagctggtgcccggggccggcggcgaagatgtcgtcttcgtctgcgacgactggtacccgaccaccaaccctggccccgtctgcacgccgcggccgtggggcgattgctgcgacaaggccttctgcaccaggtctctcccaccgatctgccactgcgccgacgaggtggcgtcgtgcgccgccgcctgcaaggagtgcgacatggtgaattcgtcgtcggagccgcctcgctatatc

SEQ ID NO: 99404 - DNA, 3552 bp, Oryza sativa
  unsure (1)..(3552): unsure at all n locations
  Clone ID: PAT_MRT4530_97219C.1
atgacccggtcgccaccctccgccgcctctatgatcgccgtgcagatctggagggactcggaggggtcggcgccatcatcgtacttctcggtgaggcagggctggagctttgggggtcctcggacattccgaagactcgccacaaagacatggacaaatcacaatgagttgaaattagttgttagagttgggtcgtttttcagcttgctagatgaagggtcaaagacctatatggagggtaaaacatcgccaacccaacttgttgacatgcataactatggcttgctagaattagtaaatttcatagctgaacacttcatatggggttctaagcaatacatgactttgtggtgttctatggatggtgactctgttgagattacattagatgaccaatcgctagattggtttcagctgaacctagagaagggggttgtatgcattgatgcccaaataattgattttgatggtccattgcaattttcacccacaaaacgtaggtatcatccttcagtgaggaatagggcagccataagtgagatagctactaatgagagagccactattgagatagccacaaatgagatagccacaaatgagagagccacaaatgtgatagccactaatgagagagccacaaatgtgacagccactaatgagagagccaagaaatccaaaaaaaggggtccatgtgatgaggaggcagtcggagttgttgatgagggcatatactctgacaccgaatcacttgtggcacagagtgatagcagctatgactctgacttggcggaatcatttgattctgaatttgactgctctgaccctgagtttgatcctgatcaagaaatagttgatgaggatgacgacgatgatgtccctgtctttgcatatgatgttcatgatccatgtattgatgttggtgtggtgttcccagatgtgaatcaatgcaagtcagcagttacacatcattgtatcttgaatgatcatgcttttgacattatcaagaaagacaagaaaagatttagagccaaatgcaagagtgcggatcaaggttgcaagtggctgtttttgcatctactagtcccaagtacattggatgttaagataagtggaccaaagcacacttgtggttcttttaataattgcggtgaaacaatggcttcaaataaatgggtagctgaccgagtagttgagttgctgcgggatgacccctcattaggacctaagaaactgaaggaagagctgaagaagaaatactcagtgaatataccttatttaagggttttcggaggcaaggagagagcacttgacatgataaatgtgaggtgggatgacagctataacttgttgcctacttatcaagatgagcttctgagatcagtgccaggcagtgtagttaagttggacactgaagagaataatggtgatgtgtgctttaggaggttcttagtagctctcaaactatgcattgatgggttcttgcaaggatgcaggccatacattgccatggactccactcacttgacaggaaggtctagagggcagttggcatccgctgttgcaatagatggtaataacaggctatttcctgtcgcttacggagtgattgagacagagtctaaggaaagttggacttggtttgtccaaaatttgaaggaagctattggtacccctacaggtttggttattagtacagatgcaggcaaaggaatagagggggctgtagatgatgtatatccaggagtggaacatagggaatgtatgagacacttgtggaagaacatgaagaagaagtaccatggtcctctgtttgcccaaaatatgtgggcagctgctaagagcttcacaaatgtgaagttcacctaccacatggacaagataaaggagaggtgccctgaagccctaacctggttagatgacaatcatccatacatttggagcagaagcaagttttatgaggagtgcaaggtagattacatcaataacaacctctctgaatgtttcaatagttgggtctcaaaaatcaaggatcgtcagattgttgacttgcatgacaccataagaaagatgatcattagcaagtttgtgtcaagagccaagcttgcttgtaaaatggatgaaaggataatcccatctattactaacactctgaatgcaaaaagcaagaccctcaaaaaccatgaggtattgatatgtgggtctggaactgttgaagtaactgtgggcaccattacacatgcagtaaatttgaaggaaaggacatgtacttgtagggcttggcaagtgagtggaaagccttgtgatcatgctttggctttcattgcaaagcttaatagggaggtacaaatggatgattttgtggataagtgcttctctatagagatgttgaaaatggcttatgcaggacagttcaatccaatggcatctaaggatgagtgggcacatgttgatctangctataaaatcaagaagcctagtgctagtgcaagtggaactacaaggggaaggggaaggggaaggggaggtgcaggtgtaggtgctgctgctgcccctaatggaggtggaggtggaggtgctggaccagccagggtacacaaacgacaattgttgacatacagatccacgtcttacaaaaatataaaagattacaaatgcagcggaaaaagagaaaagcgagctaagcctgaagacttgactcctgcagcgggcgactccattccacaggcaatccttgacggcagcgacgaaaccaacctcttcgagacatcttcaactgagaaggacttcaactctggtgtgggggaaaagagagcaagactgagtactacccacggtactcagcaagtcacaccggaagaggagcacaaggaggggtggcgccgacacgcgggacccgcgggtcagcggcacaaggggagagggagggggcggctggcaggtgggcccactgggcagcggctcaagagagagagggaggggcgccggcacatgggccccactgacagtggcacaaggcgggagggggcgcggctggtggctcggctcggcttcaagccggccggccggttatggcgagggcggcggcgcgcgcgcacggttgccagcgacggcaaccggcgacgggaggcggcggcggacggcgcaaagacggcggcggcggccgaagcggcggcgcgagcgaccctagcggcggcgctacgcggcgggcggcgcggcaaagggagagagaggaagagagggagaccgatcctcaccgaggggctcggccggcgcgagggaggagcgacggcgaacggcaacgacgagagacgggaggatgacggcgacgggttccgggaggacctagagaaaaggttgggaggggttagagagagggagatgaaccacggcgatcggaaaccatggccgaaggcggcggtggaggtggtgctcacccgtgcgcgaggggatgagggctccggcgatgaacttcgacggaggaggggtggacggggtggatctcggccacgcgaatcgaacggcggcgacggcgcaagacggcggcgagcctag

SEQ ID NO: 99405 - DNA, 183 bp, Oryza sativa
  Clone ID: PAT_MRT4530_9721C.1
atggactggtgggagaacggggaaaaccctctctcggtctcggccaagagacacagacggacggacggagatctgactgagtcggagacgcggatcgcgccgttgctggggctggacgagcataacaatggtgttgtttgtggtgatgttagcttgggtagtccaaaggacggcactggttga

SEQ ID NO: 99406 - DNA, 372 bp, Oryza sativa
  Clone ID: PAT_MRT4530_97220C.1
atgccgctctggatctgcaccgccgccgtcgccctccgagccctcgtagtcggccgggagtggaggggccccggtgagctctcgcgctgctctgggtccacgccaccgccgtcgtcctccgagccctcattgctggccgggagtagaggggtgagctctcgtgccgctccgttccatgccaccaccgtcgccatccgagctctcgtcaccgacagggagaggaggggccccggcgagctctcgcaccgccgccgtcgccctccgagccgccggttaggaggaggtcggggagctgccggcctccattggctggagttcgttgtgccgccagccaccatcgagctatggtggattggggaactgagagattga

SEQ ID NO: 99407 - DNA, 1061 bp, Oryza sativa
  Clone ID: PAT_MRT4530_97221C.1
gcattaaacccctgtccaggaccagccagggtacacaaacgacaattgttgacatacagatccacgtcttacaaaaatataaaagattacaaatgcagcggaaaaagagaaaagcgagctaagcctgaagacttgactcctgcagcgggcgactccattccacaggcaatccttgacggcagcgacgaaaccaacctcttcgagacatcttcaactgagaaggacttcaactctggtgtgggggaaaagagagcaagactgagtactacccacggtactcagcaagtcacaccggaagaggaggcaacgggcagcccccctttcgtgccgcggtgaatccggcagccgatcaaccggacaccccggccgacccaactccatcacgcccaccctcgcctggggctgacgtcagcacaaggaggggtggcgccgacacgcgggacccgcgggtcagcggcacaaggggagagggagggggcggctggcaggtgggcccactgggcagcgtggcacaaggcgggagggggcgcggctggtggctcggctcggcttcaagccggccggccggttatggcgagggcggcggcgcgcgcgcacggttgccagcgacggcaaccggcgacgggaggcggcggcggacggcgcaaagacggcggcggcggccgaagcggcggcgcgagcgaccctagcggcggcgctacgcggcgggcggcgcggcaaagggagagagaggaagagagggagaccgatcctcaccgaggggctcggccggcgcgagggaggagcgacggcgaacggcaacgacgagagacgggaggatgacggcgacgggttccgggaggacctagagaaaaggttgggaggggttagagagagggagatgaaccacggcgatcggaaaccatggccgaaggcggcggtggaggtggtgctcacccgtgcgcgaggggatgagggctccggcgatgaacttcgacggaggaggggtggacggggtggatctcggccacgcgaatcgaacggcggcgacggcgcaagacggcggcgagcctagcgacggc

SEQ ID NO: 99408 - DNA, 1094 bp, Oryza sativa
  Clone ID: PAT_MRT4530_97222C.1
atcaacgcatgctcaaatccaaatttaaacaaaatgacaaatcactcaaataaataactgagcatggtgatttttatgcatagaacatttttcatgaacccagagaaagatactaatgcaactgactaaacgataaatcgaggcgactccattccacaggcaatccttgacggcagcgatgaaaccaacctcttcgagacatctccaactgagaagaacttcaactctggtgtgggggaaaagagagcaagactgagtactacccactgtactcagcaagtcatcccggaagagaaggcaacgggcagcccccctttcgtgccgcggtgaatccgaaagccgatcaccggacaccccggccgacccaactccattacgcccaccctcgcctggggctgacgtcatcaaggtggggagcggcgccgacatgcgggacccacgggtcagtgacactaagagagggagaggggcggctggcaggcgggacccaccgggcagtggcacaaggcgggaggggcgcggctggcaagcggggcccaccgggcggcggttcacggggaaaggaggaaggcggcctggctcggctcggcttcaagccggccggccggttatggcgagggcggcggcgcgcgcgcacggttgccagcgacggcaaccggcgacgggaggcggcggcagacggcgcaaagacggcggcggcggccgaagcggcggcgcgagcgaccctagcggcgacgctacgcggcgggcggcgcggcaaagggagagagaggaagagagggagaccgatcctcaccgaggggctcggccggcgcgagggaggagcgacggcgaacagcaacgatgagagacgggaggacgacggcgacgggctccgggaggacctagagaaaaggttgggaggggttagagagagggagatggaccacggcgatcggaaaccatggccgacggcggcggtggaggtggtgctcacccgtgcgcgaggggatgagggctccggcgacgaacttcgacggaggaggggtggacggggtggatctcggccacgcgaatcgaacggcggcgacggcgcaagacggcggcgagcctag

SEQ ID NO: 99409 - DNA, 391 bp, Oryza sativa
  unsure (1)..(391): unsure at all n locations
  Clone ID: PAT_MRT4530_97223C.1
gaaaaatacacgcgcgaaatttccggataagagcagcgccggcggngaatgtaggcagcgtttgctgttgctgtttttttccctttttttccgtctcgttttgctcccacttcgctgctcccggatccgcgtagggttcttgtgtcgtgtggtggggttatgacccgcggcgctgctctgctttgctcgatttgctgtgcttgccttggaggtcgcctgcttggctgcttttgagagtgagtgtgtgtgtgtgtgtgttttttttttatacctcttttccttttctgggagaatttcccggtcctgggtttggccttttttgcgaacctttgaaccctttcttgttggatcctggggggaagtttatttatgcttaatttggcggttcttg

SEQ ID NO: 99410 - DNA, 203 bp, Oryza sativa
  Clone ID: PAT_MRT4530_97224C.1
tggacgcttggagtggatcagtggtcggctgaggaaagacgatagttcatctgacagaccaggtgaatctgcagctgaatgtcaaggtatgatgcgctacacgactgtttcgttttgatttcttgcgagacgcattgctgattgcatttaggccttgtgtgtggtgcaaagcttattcatagcctactggttttgtatcggta

SEQ ID NO: 99411 - DNA, 466 bp, Oryza sativa
  Clone ID: PAT_MRT4530_97225C.1
gatatcccatggcgctgacgctttcgaaattacaggcctgacctgtcatgaaggctatcctgtgccagacgcacaaaacaatagggtgtctgcacaatgcctaatcaatgggggtatcttacttgccttgctataaactgaagcttacgtgcattgaccaccaactaagttgccacttacactcccttattattctcaatattaatactatctcccttcaactaaaaagcatctgaaacagagagtccacttttaaatacgaatttgaacaaacgtgatcatcaacctatcctgcttataatgaaactgcctctcccacgcattatgcagggatcgatccatagacatatttttactcaccaaatggcttcgctgattcatcgattgagagataaatcggattcaggctacaactcgccgctgctgattcatcagatggcattgcttcaagtagttccctgccgcc

SEQ ID NO: 99412 - DNA, 485 bp, Oryza sativa
  Clone ID: PAT_MRT4530_97226C.1
tttctttctggatctgtgaaggtggagaaattaatgaacattgaacgctactcccatgtcatgcacatcagttccacggttaggctcttcttctatactgcgaaacaacgggtctgcactcattatgtacctcggcaatgttgcgtcattattatttccttcagcattccagtctgcattggtagttcagacaaatgtctttttatgctaagaaaatctaggatcttaactcattatgcataacactatcagatgtattacctattgcgacaaaatggatatgtggtttctaagcaatttattggcttgttttataaacagccaacaatttctgcaattttgacgcttctatgtttcaaatgtgtcttgtctaatagacatgaaagtgcaaagcttttagtagcaccacaagtgactgatcttactgctatcttttctagggttggtacgatacattgtgtaatgagcaatggttacaataatga

SEQ ID NO: 99413 - DNA, 1872 bp, Oryza sativa
  Clone ID: PAT_MRT4530_97227C.1
atggtatcagagcagtcaattcgtgggattccaagcaaggaggcgtgttgggcgacacacagttgcaatggtgacctttggaggcggaatttgagccgtggaggggttagtgctggtggtgcccgccaggtgttcggtgaaatgccgagctggctaggagatggcgcaggcgctgctcttcgtgtccaagtgagccaagtcctttacccggtgaccagcgaggtgctgcatcaagtttacaacacctatggagctgtggcggtgcaagtcctcaccacgagtcctttgggtgttgaggccttcgtgtggttccggtcaagctgtgatgcagagagggctcgatctgtcaccaatggacgcaacatctatgatgggtgttacctgcttgatgtccagcacgtgcatcctttcaacgggaacggtgtcgacatgacgcccaccaagtgtttgacgttgggaccaagcagcatcaccactaggccagcagttgagagttctcttgctgcaccagaacatgtgtttccagccactatgaactcatccacaccctcaactaccgcagctgctattgcaacaccgtcaccatccatcaaaaccaacaaagccgagggcgacatggctcaagttgagatgaaaccaaaggatacattccaggagttgtgtgccaagattattgccacgctcaacaacatgcttgtgacatgccgcaacatcaagcttgagtcaatcacgagcgttggtatcaccagagtggtgacagctaaaagcaccaacactaaatctgtccccaacacattggaggtcagtgatgaggccaattcaatcagcttggttgatactaatgagttctacatggtgacaactaccaagtgtttgacgaaaggcaatgaacaaatgatcaatgatgatgacgatgacatggccaccgaggatttagttgagctcactaaagtgaattccaagttcacactactgcaaacaggtgaggcttcaaaaacactgatttcagagaggacgtgttctattgagttgaggccttggccaccaccttattttctgttaaatgaggtgatcaaggaagtattggagatatgtcatcaagtaaatatgaattggatttccagctatgtatgggagaatattcaaggactattagtgctggatgatcaagtctttcaaagctcgacacagtggcaatctgctatatacaaggaaatgaactgcttggaattgttgattggattggagctattgcgtggaaaaatacattcttgttggagggagatggctcagctgaaaataccatggacacctcctcttaatgcatgtgctgttacattacttgcgcatgctagagagagtttttcatgcaaatgcaagattaaaggaagtcatactatcgtggggttatggaagcatgagtactggcagcctactatgaagactagtgactggtatacaaagagttgcacatattcatgggtatcactgaactccaagttaattaatctgaatgaagtgattccagttgacatgttacagctaccaacttcagatgaggagtttgtaatatggcccagacccattggatggtttgcaacaagtgatcagtttgtcgatctcgggttgggctattcttcttatcatctagtcagggtaataactacggttgtttcactgaagaaatcctggttgcgggaaattattgaggagctttccgaaccaggacctcaaggacaaacattgcaaaggcaggataacaagctttgggagtcactattgcttaatgatcatgatacactatgctccttgcaactaatatggaatcctggaggcatcaaaggcatcggcttggggacaagccgaaactaa

SEQ ID NO: 99414 - DNA, 246 bp, Oryza sativa
  Clone ID: PAT_MRT4530_97228C.1
atgtgcccgtgggcatgtcgtttacccgtcacagttcaacggccgaagggggagctcagcgcagtggaggtaggaggcggcggtgaccggaggtgggaggcggccaagcaagcggatgaaggaggcaaccgacagctagaggacgtcgacaatcggaggtgggagctcggcgcagcctgggatgcggcgacggtcacagcttgcttggttaaccctcccgtggcggctgtgaaagttgccagctag

SEQ ID NO: 99415 - DNA, 180 bp, Oryza sativa
  Clone ID: PAT_MRT4530_97229C.1
atggcccacggccagagagctcatccacgggaggcggcaatggcggtgggagttggcgggcttgacgagctcggggaggatgccattgaagttgcattgggaatcgccactgagagcgcatgtgcggtcaccggagaacgtgggaatcgccggagagatggggaaagtgattttgcttag

SEQ ID NO: 99416 - DNA, 1196 bp, Oryza sativa
  Clone ID: PAT_MRT4530_9722C.1
ttgtagaagagggaggagtagacgcaagcccacgcgaaccgaatcgaatcgaatcgaatcgagaggagaggggaggagagagcgcaaggaataatccgtaatccgttcgcggcgaggaggaggaggtgggcccagcgatgcaggcgcacagatcgccggcgatggtggggggcggcggcgcgggggccgtcgggccgccgtcgccggcgacggtgccggtgaggcggcgctgcgagggcacggccatgggggccatcacgctcgacctccgccccggcaacggcgtcgggcccttcaccctcgggatgccgatttccgatgcgttcgcgcagatagagggccagccaacactctacgacgttgtccacgtgaagtacttcgatgaggagcctctaaagttggattttgtcataagctttcctgaccatgggttccacctgcgcttcgatccttggtcacagaggcttcgtctcattgagatctatgacgtgaaaagactgcaactgcgatatgcaaagtccttaattggtggcccatcaacattagccacttttgtggctgtttatggattattcggacctactttcccgggtatatatgacaaagagaggggcatttacaccctcttctatccagggttatcctttgcattccctatccccagtcaatatacaaatttgtttaccaatggggaagtggcagatttgcctctggaatttcctgacggaacaactcctgttacttgccgggtttctatatatgacagttcaacggatagcaaggttggggttggatcactgatggataaagcagttgttcctgcattacctgcaggcagcctgtacatggaggaagtgcatgcaaagcttggtgaagagcttttgttcacgataggcgggcaacatattcctttcggtgcatcaccgcaggacgtgtggactgagttgggtcgtccatgtggcatccaccagaagcaggttgaccagatggtaatacattcagcatcagacccccgccctcggacaactctttgtgggggattatttttacaactacttctctcgtggtattgatatcttatttgatgggcagacacacaggataaaggaagtttgttttacacacaaacttccctggtcattcagatttcaatcctatatgaaagtgtaactttgttatctatgatgccgaagctg

SEQ ID NO: 99417 - DNA, 567 bp, Oryza sativa
  Clone ID: PAT_MRT4530_97230C.1
ggaaacaactcaacaataggagatttttatattccaggtaaaaaaagatgagattttcatggcacaatgttgcacaagagcttcgcagaaatggttccttatattaacataacagtatttgtgtaaaagacaaattgtaactatcttatacagattttcccatcaaataggctattgaacaaccaacaagcgctccagcaaaaacctgaaatggactgtgtccaagaggttcctgtaccggtctgaaggatgagataattggatgttctggtgggaaatcagagactatttgatttagcaaagcagcttggcgacctgtgtggaatcgaattcctgatgcatcatacattacaacggcagcaaaaaccaatgccagcgcgaatgaagaactatctccgccttcttgttgaccgactgccacggccaaactccccaccgttgcagaaagggatgaaataattccagctgaagtgagaaactttcttgcatcccatcttttctttctttaacctgcgtatcagatggcgaggaggttgaggaagtaggcgaaggcgaaggcgatgagcg

SEQ ID NO: 99418 - DNA, 411 bp, Oryza sativa
  unsure (1)..(411): unsure at all n locations
  Clone ID: PAT_MRT4530_97231C.1
cgggctgcaggctggccaccaaccaaagtcgtcgtcttcctcctctcgcactttactcccctccccctcctctccctcttcccccaactgcaaagcagctgtccacctccacgctcctcctcctcccccaaccccaacctctccgccttccctctcgccggcggcggggatcctcatccgccccgcgacgcccggccctaaccgcggcggagatccgtggagggtggggggacattcttggtaattaagccgcgcggcgcgcgcctccccccttcttcttcttgggattcgacggggtggcgcggggatgaacacggaggccggtgggtgctcgtcttccttcctgctggtgctcgtcaatcacgtcgcagttcgagtngaagcagcagatcgggggacgtcgaccgtcga

SEQ ID NO: 99419 - DNA, 378 bp, Oryza sativa
  Clone ID: PAT_MRT4530_97232C.1
atgaaggagaaggagcagagacgtggcgacgcggtggggaagttgcatgggaagactgatgaggcatggtggccgtggacggtgatgcggcagtgggggagggggttcgcgagtgatggcgactggcgagggatagtcagtgatctgtcgatgaaaaccgtccggcggcggcacggtggagaggcgaggggcggcggcgcggtggaaaggcggggggcgacggagcttgcagaggcgagaggcggcggcgcagtggaggggcgacggtgctcgcagaggcgagggcagcacggtggaggggcgacggcgctcgcaaaggcgaggggcggcggcgcggtggaggggcgacgacgacgatacgcagggagagcgaggtag

SEQ ID NO: 99420 - DNA, 1740 bp, Oryza sativa
  Clone ID: PAT_MRT4530_97233C.1
atgtatgatgctctgcagattacggagaccaactacaggaggctctgccacgagaagagcgtcctcaccgtgaacgggcagttccccgggccgaccatctacgcgcgcaagggcgatctcgtcatcgtcaacgtctacaaccacggcaacaaaaacatcaccatccactggcacggcgtggaccagccgcggaacccatggtcggacgggccggagttcatcacgcaatgcccgatccggccggacggcaagttcacctaccaggtgatcatgtccgaggaggagggcacgctgtggtggcacgcgcacagcgacttcgaccgcgccaccgtcctcggcgccatcgtcgtccaccccaagcacggcgacaccttccccttcaagaggccagacaaagagatacccatcatcctcggtgagtggtggaaaaacgatgtgaaccacctgctcgaggagatgaagcgcattggggaagacgtcaagccgtctgacgcgaacacaatcaacggccagcccggggacatgttcccctgctccagggacgacaccttcaaggttgccgtggagcacggcaacacgtacctgctccaggtcatcaacgcggggctcaccaacgacatgttcttcgccgtctccgggcaccgcctcaccgttgtcggcatcgacgcccgctacaccaagccgctcaccgtcgaatacatcatgatcgcgccgggccagaccatggaccttctcctggaggccaaccgcagcttggggtccaagtccaacagcaggtactacatggccgcgaggacgtttatcacgttacccgtccccatccccttcaacaacagcaccgccacggccgtcgtggagtactacaccggcgacagcggtgccgggccaccggacttccccgccgtcctgccgtctctcgacgacgtggacgcggcgatggcattcctcaggcagctcaggtcccttggcagcaaggaccacccggtccacgtaccgacgcacgtcgacgagcacatgctcatcgacctcgccatcaactttctcccctgcaacgccaccaacgcaaccgacacggcgtgcaagggacccaagggcaacactacgcgtttcgcggcgagcctcaacaacgtcagcttcgtcagcccggccatcgacgtccttcacgcgtactactacggcagcggccgcggcgtgtacgaggacgacttccctaacaacccggcgcccgtcttcgtcaacctcaccggcgacaacgacaggcccggggtgacgaagcacggcgccaaggtgaaggtgctggagtacggcaccgtggtggaggtggtgttccaggacacgtccttcgagagccacccaatgcacctccacggcttcgccttctacgtcgtgggactagggtccggtaagttcgacgaccgcagggacccggccacctacaacctgctcgacccgccgtaccagagcacagtctccgtgcccaaggccggctgggccgcaatccgcttccgcgcagacaatccaggtgtgtggttcatgcattgccattttgatcgacacatggtgtggggaatgaatactgtgttcatcgtgaaggatggcaagacgccacaggctcagatgctgcctcgtcctccaaacatgcccaactcgcagcggcaagggcagccgggcgacggcaggtggaagcagcagggcggcatgcggcagcagcagggcagggaagcccgtctgcggcgatag

SEQ ID NO: 99421 - DNA, 429 bp, Oryza sativa
  Clone ID: PAT_MRT4530_97234C.1
caggggggcgagtgcgacacaaggatgtaatgagatgggcggtgcggggctgggtctttgaggtgccgagaaccaaagggaggggggctggtggggaaaaaaaggcgccaagccaaagtggggccaggacaggtaagctggctggatggaatgcgggcggggacatcggtggcaaccataatggcgtagactttgggacagtaggaggcagtcaagcgggcgttgaggggggccgtggcggaatcgagccttctggatggcatgcggggctgggacatcagccccatccataatggcgctgactgtgggaaactcagcgccagcccacctggcgctgaggttggacttggccgtttcagccgtggcccagcccagcaagccttctggatggctgggctaggacctcagcgccaggtgcactggcgctga

SEQ ID NO: 99422 - DNA, 957 bp, Oryza sativa
  Clone ID: PAT_MRT4530_97235C.1
gcacgaggggacgggctcctgcgccgtcgccggcggccggatgtacatcgtggcggagtacggcgagtggaggctgaagcggtacgacgagccgcgggacgagtggaggatggtcgccgggagcggggtgccccccgaggtgaggcgcccccacgtcgtctccggcgaggtcgaggaggtcggcagcggcggcaggcggcggatatacgtggtgggcgccggcctcgacgtcgccataggcacggtctccccttctccggccatccacggcggcgacgacgagagggtggactgggaggtcgtcaagggccccgccgagttcgccggcctcgccccgtgcaacgctcaggtcctctacgcctgaactccccgccgccgccgctgccgctcgccggtggcgcgtcgcatcgccggggaccccgctttttccgggcccacctgtcagtgagacccctccacccacgcgggcccacctggcagaagcacgtgacgatgcttcccgctgctcactgctgacgcccatccacgggcgaaatcacacaggcactgccttggcacgggacccacctgtcagtgactccgaatcgggggctaaatggtcttttcacccccgctgtccatctctgcatctcaattctatcttgtcagaggagcagaggacggaggaatggagcgtgcgtctctgtaaaacttaaataccacccatatttaattaattactcctactagcagtagtattagattcttcatgtaccactagtatatttgcaaatatttgcacgaggttttgaacaaacgagaaaaaagtggtgaagatcgatgacgtcgacagcactactgaatgaatgaacaaagtggggaaaaagaaaagaaaaataattcaaaccccatttcatttcgttcactaaggcaaagtacttaccaataagatggtgaaaaaaaaatgttttgttcccc

SEQ ID NO: 99423 - DNA, 351 bp, Oryza sativa
  Clone ID: PAT_MRT4530_97236C.1
atgggccacccgcgccttcgggccggcccggcacggcccgacggctggtgggccgtgcctgggcgggagctcggcggcgaggcgtcgctcggccggagattctcctacagcctcgtcccgcactccgtcaactcatcgtcggcgttcaacttcggcaccctcgccaacgtcaccgagctcggcgcagcgagcacgccgctcgtcgccggggacgtggacacgtactacaccgtggtcctcgacttcgtcagggtcggcaacaagacggtggcatcggcggcgagctcccgcatcattgtggactcgggcaatgcaaaaataagctttgttactcctgcaaattgcaagtga

SEQ ID NO: 99424 - DNA, 355 bp, Oryza sativa
  Clone ID: PAT_MRT4530_97237C.1
atattttgcactgaacatttacccagcctcacctacgacgcccgtggccaggagaagaacacgggagaggaggcacggcggcagaggagatcgtgaaagagcgagccgacgacgtcgaggagaggcgattacgatccgatggaggcgagatgggaagggagaacgcggcggcgggaatggggaagcggagttgcggccggaggaaaggcgagccgtccagctcgttgactccggcggaaaggcgagccgatacgagcgagctgagctgacccttatcgtgctgcggctccaggcgtgtgggcgcgccatcggatgcacgcctctttcacgcgtcgcgcatctgactcgggtatgc

SEQ ID NO: 99425 - DNA, 153 bp, Oryza sativa
  Clone ID: PAT_MRT4530_97238C.1
atgggcgatgaggtggagacgccgatttctgatttctccgcggggctcgggctggcgcagaagcagacacgcggatgttcggatctcagcaacgtgggtgcatcggacggtccacgcgcaggcagggactgttgcactgtagcagaatcgtga

SEQ ID NO: 99426 - DNA, 313 bp, Oryza sativa
  unsure (1)..(313): unsure at all n locations
  Clone ID: PAT_MRT4530_97239C.1
nanactttgggnccctgtggctggtatgtagagtgtgcctgggtgccaaggtgtgtgcgtgcctgtgtgcgtgtgtgtgacttgctacctgtgnatgggctactcgatggctactgacccctgtgttggggaactgaaactgcgaggggataaaacccactggtggactgatgtgtgccgcggggatgngtgtaaagttaaacccacccccacgacccacaaatggtntgaagtgtgtgtgtcgccgtgaagtgtgtgtctgaccccatgatgnccacatgtctgcactgagattaggccaagaaattgtgtg

SEQ ID NO: 99427 - DNA, 1120 bp, Oryza sativa
  Clone ID: PAT_MRT4530_9723C.1
aggcacatggcatggcatatggcgtacaaatgtcgcgcccagaaattcccgaatagaattccaagcagaatgtgtattaaaacccccgtccaggaccagccggggtacacaaacgacaatgttgacatacagatccacgtcggaaagaggccgtgacaggacccttcgcataaccccctctagccaagcacaccacacctcaggtttcacccccgtccccagcgggcgacgggcagtcccctctcgtgcctaggtgaatccggaagcgacagaggccgtcgcagggcccgccccgctccatcacgcccacccttgccaggaccacgcgggtggtccaccgccggtccacgggaccgacggcccagatcgccctcgggccgatcggacgggcggcggtggaggcagccgccgggctcggctcggcatcaaagccgaccggccgacccggggctgacggcggtggcacgcgcgcgtcgcgttgccggcgacggcatccggcggcggagacggcgacgcaaaggcggcgccgaagggcggtgatgcgagggtggccggcgcggaggaagacgatggcgaacagcgacggcaagccacgggaggacgacgtcggcgggcggacgagcttcggggtgccctcgacggaggaggggtggacggggtggatctcggccacgcgaacccgacggcggcgacggcgcggcctgtcggtgaccccggagaggagggcggcgggacggcctggctgggcctcggccgtggatttctttacttcttcctccccttgcacacaccgcactggcatccgattttgctgcgcgccgtgtcgccgcgcgtcggccttggggccgtttgcacgtgcccgactgccttggcgcgccgtcgcccgtccgacgccctcagcccaccgtcgccgcaccaatcttgacgacgacaaagccaggacgacgatcgccgcaagaaattgccgctcgacgccgtgcgcacccgtccaagccgccgccgagtgcgattttgcttctacccggggtgaatcgcgccaattcttgccgcatggttggattggagatagatggtggtatcccctctcacaattcaaaccattcacccccgagccggccat

SEQ ID NO: 99428 - DNA, 585 bp, Oryza sativa
  Clone ID: PAT_MRT4530_97240C.1
atggcggcggcgatgggggacgtggacggcggcggcgggggacgggcgcgcgttgatgccttcagccgcgtcgcatggatgagaatcgcatctgtggaggaggagtatcctgctaggggacgggataaccctagcattcccgtttataaattgagggatgccatatatctggtattgcgctttcactctagaatcacgcgtttatctcagcaatttcttccgttggactgcataaaatctggatgtgatgctcggcagtatcgcgctgttcagtacagatttggttgcatcatttatggtgacttcctaaagaggtttttaagttgctctcttgatgtccagcaggtgaagcaaggtaatttctcaagtgatgccttggacataaacatgtcaagctgtcaactcttcttagttgagaggcagtacctgacatttaactcaagaagaagagaagcaatttgtattagagaactacaaaacctgctgaatttctgggctatgcttgctgacgcaggatttgccggccagagcagtgaaaggcacctccaggtccggactccagatgagagctacctcgaaagataa

SEQ ID NO: 99429 - DNA, 1170 bp, Oryza sativa
  Clone ID: PAT_MRT4530_97241C.1
ggcacgagggaactattgagtagctagcacagtattagtaaagactatagtgcatcccctgttttcacacgaccaagtcagtggactagtcgaccatgtcaacaagtcgtggccgcggcgctcctgtcggcaagcccccccggcccggccctcggccccgctgcgccagctggcgtgtggcggtgctgctgcggggcccttaacggcctgagcacccgcggttcccccgtcgtgcctttgcgagccggctgccactgcgcgcgtgtgatccggcccattcttgggccgccgccgtcccgcccccccccccgacctccatccccgcgttcggggaaccggcggagtcgacgagatcggagccgatccccctacacctccacacgtcggtctccttctccaagatgggagagaagccagtccccaactcctaggaggcgtagaagccctccatcaccaagacgacaacgaagacggagaagtcgaagcaatacaagttccactgtaaataactcctgcagcccaagtcatgtatcagagcaaaacaatttaattgagaagcaaaaagaagaaggagataagaaaaggcgccaaaaggaagctgaactgaagttacttgaagaggagctcgctcgaagagttgaagaatctataagaaaaaatgttgaggaccgtttgaactccgaggacatcaaaaatgaaataaaacggcgagttgaggaaggcatcaagcagttatttgatgaggttgatgctcagctacaaaaagagaaggaaacggctctgcgtgaagccaggcataaagctgaacaagaaagaagagagagggaggagttggataggatgcttgaggagaatcggcgaaaagtagaggaagctcaaagaaaagaagcactggaacaacagcagaaagagctagagcgatttttagagttggaaagaattccaaagcaaagggaagacgcgatgcgtagaaagaagatagaggaggaggaagatagagctaatcagatgaaattacttgggaagaataaccgttgatttggtttcagtattatgatctgtttcatctgacaagattaggcatactcgctctgtctcaagatattttggtggatgtgttatattttattataatgtatctatcacttgctgacgaaaaaaaaaaaaaaa

SEQ ID NO: 99430 - DNA, 2090 bp, Oryza sativa
  Clone ID: PAT_MRT4530_97242C.1
atggaccatgccgacatggatggcctcgccacggccatgctcccgctctcattgtggtcgcgggagatcgctggccttcttttcatgatggaccgtctcactggtaccaccgtcacctctttgagaaaccaaggaccaaaattctcctacgcaactcatggcgctcgctgcctcatgctgctacccacgctgactgcctcggcgtccttccctctcgacatcgccatcaatggcgagatggcaaatcgaatgatgcaccaagtccccaaaaagcgtgctcctcaaacgcataatgccttctacctagatgcgctcatgctcctcccacatgctgcgctctgtcaccgcaaccaccgcagcatggagcacgctacggtctcggagaaccggtcgcgccgccacttccgcaaccctgtcctcgcctatgtgaccccctggaactctaaaggttatgacatggcaaagttgtacagcacaaagtttactcacatatcacctgtgtggtatgacttgaagagcgatgggaataagctagttttggaaggacaacataattttgatgccaaatgggtctccgaacttcaaagtaatggatctttggtattgcctagagttgtcttagaagcattccctggggttgtactaatgaaaaagaagctaagggacaaagctattgatctaatttttgtcatctggctgtcagtgaatagggataaggggtatgatggtgttgtgctggaatcctggtcaagatgggctgtttatggagtgttagatgattcagagttacgcaacagggcacttcaatttgtaaagcatctggggaaaactttgcctttgaccagttcaaatttaagtacgcatcaccatttgaagttaatttatgttgtccctgctccacgaatgaaagagctcaacaatcaagagttcagaccagaagatcttctgcagttggctgactcagtagatggtttttctcttatgacatatgacttctcagggccacaaaaccctggccccagtgcacctttgagttggatacagtattctttaaaaacacttctcgcagcgaaggggtctgcttctcatgggcattctcacatgatattccttggcatcaatttttatgggaatgactttctcctttctaaaggtgatggtggtaatgctatcactggaagggatttcatttatttacttgataagtacaagccatctttgcagtgggatgagaaaagttcagagcattttttcgtctattcagataaaggtttgagacatgctgtattctacccaacgctgatgtccctttctttacgtttggatgaagctcaagattggggaacagggctttcaatttgggaaattgggcaaggtttggactattttttcgatgttctttaggaatatctcacgtgtgttctttttattttgggagcaatgtcagttagaccacaactattgcaaagtattacaaggtcacccgtggacattatttgtttagcatcaaaactgtcacttcataactgattacatccttctgggaaatgtttccaaacaccaaatttccccttcagtgtactgctgcaaaatttagattaagtgatatgagatttttcatcttctttacagaataaacatggttgcttgtttactttagttacttcacttggtagtactatactgcctcattccttaagcaagtatgatgatgttggtctggttttgttattagcacatcatgctctgtgtatattaatgtaatacactttacatttggtacagcaatcttatagttatgccttttgctgttcttccagggattcttccagctataagttcccacctgttcccaacaagcctgtgcattctgaaaacgagatcttcctcttcttccgtgaaatgaacaaaattctgtgcagtgttattaacttcttttgtttcacaaccatcactggttttggaattctttccctggctaccactgctgctatccattaggcgtgaaaaactccaatgaaatgccgagttgagatcttgtgctagctaagatcctcagacccttgttatgacgttatgttatctagggc

SEQ ID NO: 99431 - DNA, 478 bp, Oryza sativa
  Clone ID: PAT_MRT4530_97243C.1
cgatgttctttaggaatatctcacgtgtgttctttttattttgggagcaatgtcagttagaccacaactattgcaaagtattacaaggtcacccgtggacattatttgtttagcatcaaaactgtcacttcataactgattacatccttctgggaaatgtttccaaacaccaaatttccccttcagtgtactgctcttttgctgttcttccagggattcttccagctataagttcccacctgttcccaacaagcctgtgcattctgaaaacgagatcttcctcttcttccgtgaaatgaacaaaattctgtgcagtgttattaacttcttttgtttcacaaccatcactggttttggaattctttccctggctaccactgctgctatccattaggcgtgaaaaactccaatgaaatgccgagttgagatcttgtgctagctaagatcctcagacccttgttatgaccttatgttttct

SEQ ID NO: 99432 - DNA, 623 bp, Oryza sativa
  Clone ID: PAT_MRT4530_97244C.1
tcgtgaagaaaacccaacccgcgcgaagcacaagcacagaagcaaaagcgaacgacgaggagagacgcgaccaccgccgcgggtcactccccatcccaatctcatccagattggatttgagcggatagaggagggatggatgggaatttcgggagcgaggagcggattctgtggccggcgtcggttcttgccggcatcgccatgtgcgccgcggtatatgacataactcaaaaggttagctctcattgcttcaagggttatgacaatataagcccaatgaaaaaggttgaatggaataataggggtttctctacattccatgcattggttgcagctgttgtttctttttacctggttgtgatatctgacctcttccatagcaacataataattgatagaaactcatggctatctgatgccatgtttggggtctcgattggttactttttgacagatttggtgatgattctgtggtatttcccctctttaggtggaaaggaatatctcctgcatcatggactttcgatgtatgcaatctgtcttgctctgttgagtggcaaagcacacatgtacatactcatggttctctttactgaagccaccactccctttgtgaaccttag

SEQ ID NO: 99433 - DNA, 863 bp, Oryza sativa
  Clone ID: PAT_MRT4530_97245C.1
ggccgcaaattttttttttttttttttgttagcacatcatgctctgtgtatattaatgtaatacactttacatttggtacagcaatcttatagttatgcaactgtgcaattcccattattgtgagccagcttgtgatgcaattctaatagatcaaagaacaataaatagtcatggaataaacacattaattttgcattcagtttttcctccccttttgcatcaggcataagactgaggcaacacaaattatctaaattatagcctacttttagggcctaaatccttttctaaaaaagtttgcttctgaattgtacgctacttttagggcatacaccctttttccccccttatgtattctggtgctttactgcccagaacatttctacctcttttgctgttcttccagggattcttccagctataagttcccacctgcataactccatacaaggagcaaagttagggaactgcaaataatgtatttttttgaaacagacatatgggtttcatgaatttgccaaacttctgaaacaatcatagtacaagctaataatgtaaaaatacaatttgtcttcattttcacttgatgcacattacagatatgtaatatgtgtattaggatacctgttcccaacaagcctgtgcattcgaaaacgagatcttcctcttcttccgtgaaatgaacaaaattctgtgcagtgttattaacttcttttgtttcacaaccatcactggttttggaattctttccctggctaccactgctgctatccattaggcgtgaaaaactccaatgaaatgccgagttgagatcttgtgctagctaagatcctcagacccttgttatgaccttatgttatct

SEQ ID NO: 99434 - DNA, 387 bp, Oryza sativa
  Clone ID: PAT_MRT4530_97246C.1
cgactcataaatttctattaagatcttgattgtctgcataatcataaggatgtgctagtttatacagatatgctgtcacggaacctacatcaaggaggaccattcactgatcgaggattctacaatgcagttcgacatcaacgcattctacaaggagaaggacatgctgcacggcgtactacacctcattaggcagtagaccgccatacttcgtcacgcactgcaccccaacattaagaggatgactgaggtgatggacaacaagcaaaagaattattatgagatggttctcttacactttgactagctgatcactctgataaaccgggtgcgggatctggatgacaccattacattgcttcttacatgatggtcgcctccgcacga

SEQ ID NO: 99435 - DNA, 2138 bp, Oryza sativa
  Clone ID: PAT_MRT4530_97247C.1
ctcctcacttcacacacaagctcaagctcaagctcaagctaagcttaagcttaagctaagcttcacgcaccacgatctcgcgaacgccatgagcgccaccatggacgcggtcatgccgggcgccgccggcgcgcacaacgcgacggcggcggcggcggcggggcggcgcggcggcggcatcgtcgccgggatgatggcgttaccggaggtgcagacggtggagctgctggtggcggtgtcgatcttcgtggcgatccactcgctgcggcagcggcggtcgcaggggctcccgtcgtggccgctcgtcggcatgctgccgtcgctgctcctcggcctccgcggcgacatgtacgagtggctcaccggcgtcctcgcgtcgcgcggcggcacgttcacgttccatgggccatggctcaccaacctccactgcgtcgtcacctccgacccgaggaacctggagcacatgctcaagaccaagttcgggagcttccccaagggcccctacttccgcgacacagtgcgcgacctcctcggcgacggcatcttcggcgccgacgacgaggtgtggcggcggcagcggaaggcggcgagcctcgagttccactcggccgagttccgggcgctcacggcgagctcgctggtggagctcgtgcaccggcggctgctccgggtgctcggcgacgcggaggaggccggcgacgccgtcgacctccaggacgtgctcctccgcctcacgttcgacaacgaaaaaaaaatcggaaacatcttaggtttttttttttttttttaacaaaatatcatgtcgataactcgagaatcctgtcttattgaaaagagacaagtgagcctcaggtaggccatcttcacaccgaagataagcaagaggaaaggctagggtaaaaggaagatttgagtagttccgcggccagcaatgcggctctacaaaggaattgctcgctgttgcccacgagcaccaaaaagttttccaatgtttctctactgtaccatttgctctccctattctaacattccgcgttgattggaaatgtcgaacctagttgaaccacttttcgctgctgactcaacaacagtaactccagcatttttatcctcgccggccgcgactcctcgtgtgccgcggtctcctgcaccatttgtagcaccaccactaacacgactttccagattaagatcgtcgacgagaacgacgacaaagaccaggcgctgaggggctcgccgtctgcgtcgactgtaagcgcgtacggttcccactaagccgtccttttgttctacccgaaggatgcaatgaaaatctagtatctccaagacgagcaatccgtggcgctcagtctatacacatccgtacccgtagaccgcacaaaggttgaggaggacgaggtgttcccggacgggacggtgctgaagaaggggacaaaggtgatctatgccatgtacaccatgggcaggatggagagcatctggggggaggactgcagggagtacaagccggagaggtggctcagagacggccgcttcatgggcgaatcggcctacaagttcacacgcctgtctaacggcggcccttcattcgtgtggccttcaggcacaccacgttacgcctactaccagagtgaagtttgccgcggcctccatcctccgccgttaccacctctgccgtcgtcgacggccaacccagtggcggcccagcgaatggcgctacaccatgctacttgaagcatgggctcaaggtgaagctgaccaagagggacaaagagcaagctttgaaacctaagttgttaaaaagctttagccataaggctcatggtttggggaaaaaaaaggccggagcacttgatggaagcaatggtggcttccagatgtggtcggtgaagcagatgatgcgtgtgcacctgtgcaaagctttcttctgcatttgtttcttcatttgaagtttgctgttatgtactagtatttgatctgtttcctttttgtccaaatagcaatatgtactgtagccaagtgtggtggcctatagaatttaatgtatatgcgtgtgaggaatactttaagatgatattactaataatttttagcaagagtgtttcaacacaaaaaggaaaccagtaaaaagacccgga

SEQ ID NO: 99436 - DNA, 1916 bp, Oryza sativa
  Clone ID: PAT_MRT4530_97248C.1
gcaaaatctattgaagagaaagtatctctacaatcagattctcattttttgtcaggtctcataaaggtcaaagataccttcttagatatgagttcttatattgtaaataataggaaacaaataaggttttgggaagataaatggctaggaaatctggcttttaaagacaaatatccatctttatactctattgtccgaaggaaaagttctactattgctaattttatgagatatgttccactcaatgtttcctttaggagatcattagttggttagaatcttgcatattggcatgaattgtgtgcttctattgtacatattcaattgaatcaatcctctgatagctttagatggaattatcatcagaatagaatattttctgttaggtcgatgtatctagctttaattaataatggttatattaagagaaacaagattatttggaagcttaagatgccacttaagattaagatttttatgtggtacttgcttaaaggggttgtgctaaccaaggataatttggcaagacgaaattggaatggcagtttaagatgttgtttttgtatgaaaaatgagactattcaacatctttttatagagtgtcattatgatcgagagcttatgaaggttgcatgtcgtaggcttgagacaatggtcatgcaactccttgcaaactatggatggagattgcttatcgatccacgaaatgcacgtggaagtccacgaaaattgctgcaagttgccgacagttcgatagtacaatattactgtgtgtctgtaggtaagcagctccaagcgaggagtgacaatgctgttataagatagtgtacagttgcctggatggacgattaaaaagaggagaggttagaattattgtagtgactgcagtatgcaggctactctacaataaagttctcacactcgcaggcaattagaattgaaaagatatactactaatgaatagaaaacgcccaaatgtaatgtaagtacaaaggatgtttaactttgatttgtcgaaagttagacgcactaacaataaaagtgaacaaaacctccttccaccttccttgtaagttctactctgcctttccgttttcactttgctgtctccttttagacagggtcttcaacattcccttgaatatcttccagaaccaaaataggttcatcactgccagcgccggtggcaccgtcagtatactgtagaagcccagggggaagatggacttcacctgatcaaaatggaagtacatgtgagtgaagaaatatatgaacaagattacccgagcaaccagccatccgacaaacagagccaatccattgtataagtaaaggttatgcgtcttcttaccagcaacctccaaataccatctaaggttcacaaagggagtggtggcttcagtaaagagaaccatgagtatgtacatgtgtgctttgccactcaacagagcaagacagattgcatacatcgaaagtccatgatgcaggagatattcctttccacctaaagaggggaaataccacagaatcatcaccaaatctgtcaaaaagtaaccaatcgagaccccaaacatggcatcagatagccatgagtttctatcaattattatgttgctatggaagaggtcagatatcacaaccaggtaaaaagaaacaacagctgcaaccaatgcatggaatgtagagaaacccctattattccattcaacctttttcattgggcttatattgtcataacccttgaagcaatgagagctaaccttttgagttatgtcatataccgttaccgttttcacccctactagcagactaaaactgagcgattgaagtgctgaaaacgcggcgcacatggcgatgccggcaagaaccgacgccggccacagaatccgctcctcgctcccgaaattcccatccat

SEQ ID NO: 99437 - DNA, 314 bp, Oryza sativa
  Clone ID: PAT_MRT4530_97249C.1
gattcaacatactttttctttttatgaaataaaatatttttgacacacaacacaactggagacatcctttaaggaaaactttttaggatcccccaggaaaatgccgtggatggcatgactgcacacttgtgccctgccacctccagatgaaccaccccccccaatatttccagaggagatctaataagacaaatcattcaggaatcatagctggtaggagtaagaagctctgctctattgccgagccgaagctccaactttatggccaaggacaccaactccgaggccaggtatctgaagaccccaggcatgga

SEQ ID NO: 99438 - DNA, 4563 bp, Oryza sativa
  Clone ID: PAT_MRT4530_9724C.1
atgccgcgctacaagcctgagtacctgtttggtgttgagggttttgtccaggagttgcgtacaatgtcctttgccataggatttgggactgcccctttttatgctcagattcctcatgatcgtcacgaagagaagtgccgagtcaaagtcactttgaacagtaatagtgaagatatcccctcagtgatgttcgaagctggaggaagaaactacatccatgcatgtcaggaggtggcaaggatcgccataggagagctccgtgatcgctacagtgatcagttggccgacatggagtatcgctatcatcctcgccaaccccagggaagtgaccgtggcagttatcttgagactgaaggaattgagaatgatgctaccacaaggcatttggttgagatgctgtgggctatggatgaaagtcgtgcagagactgtgttagcggctcaagatcgtgaagaccggaatcgtggtaagatttgcaagctagaagacaaggtggatcgtttggagaaggaattagccgcattaaagggagaagcaccgccgcagaaggccaggattcgtcttaccgcaaggaagagagctctatttgtccctcgctaccaattggcgccaaaggtccgtgtggtggagaaagaagttaccccagccctagcggatcctccggtcgtcaatatggtgaatactcgcagcaacgggaatggccccaacaacaacaataacaacaacaatggagagaatcccacacttgcccaagttctggctcaacagactcagttaatgaacatgatgatgcagcaacttcagaaccagcagaaccaaggaaataaccatgcacctcctcagaataagttagcagaatttcttcgtgtaaggccgcctactttctctagcaccactaatcctgttgaagctggtgattggttgcatgccatagagaagaagttggatttgcttcagtgcactgatcaggagaaggtctcatttgcatcacatcagttgcatggccctgcctctgaatggtgggatcatttccgcctgaataggactactgcggaacctatcacttggcttgaattcaccgctgctatccggaagacgcatataccatcgggagtggtgtctctcaagaagaaggaattcaggtcgctcacccagggatctcgctctgttacggagtatctgcacgagttcaatcgtctggctcgttatgctccggaagatcgtcagttcttcaacaacaatgctggcaacaacatccgcaatcaagctccacatcctgttgcagcttcgacacagcaacagcctgccaagagggagcaaggcagcaagcccgtggtgtgtttcaactgtggagacccaggacattatgctgacaagtgtccgaagccccgacgcgtgaaggttgtccctacccagagcaactctaccgtaccagcatcaaaggcccgtgtcaatcatgtcgctgctgcagaagctcaagatgctccagatgtgattttgggtacgttccttgttaacttagttcctgcaacagtgcttttcgattctggtgctacacattcattcttatctatgagttttgcgggaaatcatgggatggaagtagaagatcttagacgtcctttgatggttagtaccccaagtaatcaagcactctctttgcaacgtagcccctctgtcaaaatagaaattaaaggagtaccatttctggccaatcttatcttgttagaatccaaagaccttgatgtcatcctagggatggactggttagccagacataaaggtgtgatagactgtgctaacagaaaagtaactctcactagcaatgatggtcgagttgtaactgttcatgcaatgtcttctgagtcgttaaggtcaagactgaaacagataactttggaagagattcctatagtccgggagtatcccgatgtgttccccgatgatttgcctggtatgccgcctaaaagggatatagagttcagaatagatttggtaccaggaacaactccgatccataagagaccttatagaatggcagccaatgagttggcagaagtcaagaggcaagtggacgatttgcttcagaaagggtacatcagaccgagttcatctccatggggagctccggttatttttgtggaaaagaaagatcatacccagaggatgtgtgtggactatcgtgcactaaatgatgtgactatcaagaataagtatccgctacccagaattgatgatttgtttgatcagcttaaaggtgccactgttttctccaagatagatcttcgatcagggtatcaccagttgagaatcaaagaggaagatatacctaagacagcttttaccactaggtatggattgttcgaatgtactgttatgtcttttggacttaccaatgcccctgctttcttcatgaatttgatgaataaagtgtttatggaatacctagacaagttcgtggtagtctttattgatgatattcttatctactcccgaaccaaagaagagcatgaagaacatcttcgccttgcactagagaagctacgagaacatcagttgtatgccaagtttagcaagtgtgaattttggttgtctgaagtgaagttccttggtcacgtcatctcagcagaaggagttgccgtcgatcctagtaatgtggaatccgtaaccaactggaaacaaccaaagacagttccagagattcgcagtttcctaggcctcgcaggatattaccggaggtttatagagaatttttccaagattgctaagcccatgacacgactgcttcagaaagatgtgaagtacaagtggtcggaagaatgtgagcagagttttcaagagttgaagaatcgcttgatatcagctcctattttgattttacctgatcaaaagaagggtttccaagtgtattgcgatgcatctaaacttgggttaggttgtgttctgatgcaagatgggaaggtggttgcctatgcatctcgtcagttacgtccgcatgaaaagaactaccctactcatgatcttgagttagctgcagtagttcatgcgttgaaaatttggcgtcattatcttttcggtactcgtacagaggtatataccgatcacaagagtttaaagtatatctttactcagccggatctgaacatgagacaaaggagatggttggaattaattaaggattatgacatgggaattcattatcacccgagaaaggctaatgttgtagcagacgctcttagcaggaaaggctattgcaatgctacggaaggacgacagttgccattggaattatgcaaggaatttgaaagattaaatttgggaattgtcagtagaggttttgttgcagccttagaagcgaagcccactctaattgatcaagttagagaagcccaaattaatgatcccgatattcaagagatcaagaagaatatgagaagaggaaaagctatcggtttcttggaggatgagcacggagctgtatggttgggtgagagaatctgcgtccccgacaacaaagatttaaaagatgcaattctgaaagaagctcacgatactttatactctattcaccctggtagtactaagatgtaccaggatctcaaggaaagattttggtgggcaagtatgaagcgtgaaatcgcagaatacgtagcagtatgtgatgtttgtcagcgagtcaaggcagaacatcagaaacctgccggtttgttgcagcctttgaagattcccgaatggaaatgggaagaaatcggtatggattttattactggtttacccagaacgtcatcgggtcatgactctatttgggtgatagtcgacagacttacaaaagtagctcatttcattccggtaaagacaacttattccggaagtcggttggcggaattgtatatggcaaggatcgtgtgtttgcatggcgtccctaagaaaatagtgtctgatcgaggcagtcaatttacttcaaatttttggaagaagcttcaggaagagatgggttctaagctgaactttagtactgcttatcatccgcagacagacggacaaaccgaaagggtgaatcaggttttggaagacatgttgagagcttgtgctttagacttcggtggaagttgggataagaatctaccttatgcagaattttcgtacaacaacagttatcaagctagtcttcagatggctccttacgaagcactgtatggtcggaagtgccgcactccacttttgtgggatcaaacgggagaacgtcaggttttcgggacggatatcctaagagaagcagaagaaaaggtgaaaatcattcaagaaagattgcgagtggctcagtctcgtcataagagttatgccgacaatcgccgcagagatttgagttttgaagaaggagattatgtgtatcttcgtgtcacgcctcttcgaggagttcgtcgttttcatatcaaaggaaaattggcaccgcgttttgtgggaccttataagattgtcagtagaagaggagaggttgcttatcagtggagttacctcaatctttggcaggagtccataatgtgttccatgtgtcgcaattaa

SEQ ID NO: 99439 - DNA, 345 bp, Oryza sativa
  Clone ID: PAT_MRT4530_97250C.1
gtataccctctacccttcgatatacgtcacatatcggtacggtatacctgcgcgtatacggacgttttctacatacattaaggaaattcatcacggagttcatagatggaaggagtcctactcggacaggactgggtcgtcactgtatcgtgcagggtctgatgtctccgagttctacttggaaaccgcctgacctgcgatataaaagggaccccccgagaggacctaaggcatcgaatctcatagccaacacatccaccacagcctacgaagtcggagtctacaggagccaagtcgccgggagatctagtcgaaccagctcgattacgatctcgccggtaccat

SEQ ID NO: 99440 - DNA, 261 bp, Oryza sativa
  Clone ID: PAT_MRT4530_97251C.1
ggagagagagagaactagtttcgagttttttttttttttttttttgatacaaagcaccaacaaaacacattggcacgctttttttcttaatctctggaagcgcaaaattcacaaaaaaggtggtatgtttacatgtgactgactgtttacaagtgttttgagtatgcttacactcaccaaacatgatgatcacatcttcagcgaaagggaaaacacagcagcagcatgacagagccatgaaatccggaacttcaacacaga

SEQ ID NO: 99441 - DNA, 471 bp, Oryza sativa
  unsure (1)..(471): unsure at all n locations
  Clone ID: PAT_MRT4530_97252C.1
aaaaaaaaaaggagttccccggggatgggtggggccccaaggaaacggccattttatgggggggaaccaccaaaaaaaaaagccttggggagggaccaccaggaacaacgggaacagggaaacggggcctaaaaaaccccccccaaatccccccctttttaaatttttaatttttaatacccgggcaggaggagggggatctacttatgggggacgaaacccttgggggggggggaaacgagcttgggggacccccaaagggccccacgggcaacccgggggggggggggggnccatttcccggggnttttttccaggccagcttgaggcagntaaacaaaaaaaacccttttcacaaaatcaaggggaatttgggcaccggttggaacaaaaccaaggggacctccctccgggggttcaggaaaaaggggggctcaaaaaaattcttgggaccctccaaaaaatcggcca

SEQ ID NO: 99442 - DNA, 661 bp, Oryza sativa
  Clone ID: PAT_MRT4530_97253C.1
cccagcgtccgcgcaatccaaccaccgcacgagattcgccggagaaagttgtgaataccgacctaccggcggcgaagatcgatgatgtacatgcgcgcgacgcaccgggacgaggaggggaagaaggtgacggagaaggtggcggtgccggagacgcggcacccggacacggccaggcacttcgagcggaagctggaccagcaggggctccaccgcatggagcgccacccggcgaacggctcccgcggcatcggcgcgccgccgcccaagtccggccgcggcggcaagttcacctgggagggccccgacagcatcgtcgacagccagctcgatcccctcccggccgccatcgaccgcaacgaccccaactacgaggaggaggaaggcgaccacgagcgcgaggccgacgtcgtcggcgaggtggaggtcgccaaggtcgccggcgacgccagggatggtgtcgccagggtcgacgtcgtcgcgccgccgcagctgcacgagaaactgcagctgcagccgcagtaggggcgcccagccgccatttgagtggtgttttcgaagtgtgtttgttactttgtttgagtgtttatttacgggtttgtatgcgtgttatttatgcctctgtatgaataataatcgagcatcaaactgaacttggatg

SEQ ID NO: 99443 - DNA, 410 bp, Oryza sativa
  Clone ID: PAT_MRT4530_97254C.1
ccaacaaccacaggtattcattctactctgcatattctgctgtatataatttctgcatgatcccctctgcattgcagattacagatacaaaatacactgagatgattccgtgttatagatacaggaacggtgtgtgtgtgtgtgtgtgtgtgtccacgagttttttttccaagtgaggttgcggtacatatgcacctcagatgtaagtaattcttacttagcatatagatacggtgcaggggatgatccgatccctgcttagcatagctcatacgctgtgcattcaaaagaaaagacatttccttttcctatcaactgatgctgagtctgtataatactttctgaagtctgaacctgaagaattgagtagcaactaaaaaaaaaaaaaaaggagggggggcctcgtgccg

SEQ ID NO: 99444 - DNA, 331 bp, Oryza sativa
  Clone ID: PAT_MRT4530_97255C.1
cctgtttcttgactgccaataacggtttcatcgggattttagccgatgaggtatctagacgttgcatcggcctacaaggattgcatccgattgtttctactggatattattattgttatattatatcactatcagccgatcatctttatttatatcaagtgtcatattctatatcaaacatatagccgattgttcaaaaccctattgctatcgactggattaaactggctggcacgtcagcatctcatcaacctttggatctgcactggagctaagcatatctcccaggcaagtgtgtgtttttcacgtcaacaggtgggtcggggcgtgg

SEQ ID NO: 99445 - DNA, 368 bp, Oryza sativa
  Clone ID: PAT_MRT4530_97256C.1
atcgttctcgcggggcgcgagccgcaccgagggatttattggccgaagatgttggggaccgcgcaccacgacaaccagtcaccggcggcgccgaccgacccgaaccacagctagaagatcttctggcgcagccaacgagaactactgcctcaccgtccgggacggcgcccacaggctcggccccagcaaccccgaggacgagcaccagcactggggcacggccacggggtatagcaccaaggcgaacgacggggagggcatgccggcggtcgggctatcacaaaggacaccggcctcgtcgtcaagcactgcctcggccagggccaccccgtgaagcttgtggcgttgaacacggagcacgaggacgc

SEQ ID NO: 99446 - DNA, 324 bp, Oryza sativa
  Clone ID: PAT_MRT4530_97257C.1
gcctcccgcaggtcttttttggtccaaatgcaaataaaggcccattagcggcaggagctttagggccggccccattactagccctaggccgagcttagtttctggttgcaaaccgtacggaatcccctttcctccctctcttgccacgaacccttcgccgtcgccggcgatcccaccgactcccggccgcctctgcttccccggcgatgtctcttcttagcactgcgccgtcaacgcgcgttgcccggtctatgcgtcgccttcagttctccctgcgtccttgtgagacccgagccgcaaatccaggccccaagcgagatgcca

SEQ ID NO: 99447 - DNA, 3293 bp, Oryza sativa
  Clone ID: PAT_MRT4530_97258C.1
atcacgaaatgtagcttggtaaatacccccccttgctaaccatcagagtggggttccctggccagtggtagacgattttatgttctccattgtctcggtcacagatgaaataacgaacagcggtgccatgagaacatcctgcgagcacccagtctgcacgatgctgttcaccttctccatttcttcctggagtttcattatcctccccatatattctttatctaccacgcgcagagaaattgggttaaaataagaaccttcctcttggaaaaaaggtagtcctgaatctctgtagatgtcgtcgattaaaaagctggtagaatcgttcttcaatagctcgaatgatttgtctttcatgttatctgtcgttttataattttgctgtttttgaaaacggtaagctcaaatttaatataatcgaacacaaaccactcgcaatgcagtgacctgtttgagcaattattgctgttccagaactcatcctcaacacatctctatcacactcaaattcacaggtccaaaaacgagacactcaaaacagagagatacggataccaggatatgacaggcttcagcttcactggctctcagatggttgcttggccactgaaagagggagaagacatgatggttagcatctctgtcacagaggccatggcgcttaacgctgccttcaggacatcctgggagcatccaggcttcacaatacttttgaccttctccaaatactcctgcaattgtttgatcctccccatgtagtctcgatcttcgacacacaatgaaatcggctttgtctctccacctggtccctcaaattgcacgaggaccagggtttctgtaacatgtcttccatccaaggaatgctggaagagttttgtctcaaccaactcatatgcttttacgataaccatattaggatgtgattgaagagcacactccaatgccacatgagaagccttccgccccatcatgcgaataaagtagtaatacttctcagccgaaagagcatcggtgcatacattgcttataagttgtgagttcaccttgcatatggtatcaaaaccaacggttgtctcaacaaactgattcttaaggtccccattcaaagttacaggaacacctacaaccttcgttgcacacttagcctcagcaaaagtctcagcaagttgagcagcatccgtattggatgtaacacctccaatgattactaaagcatccaacttcaaagcctgacaactagccatggcaccattgacctgctctgttgttctaatttgatcctttgtccggccaagcatatcataaccaccttggtttttatatgaagaaagaacttcgtcggtgatctccaaagttttctgtgcgagaagaccatcacttccaccaagaaaaccaataagtttgctgtttgggttgtgagccttaattgcctcatggagtccccagatgacattatggcctcccggggactgccttccgcagaaaacaacaccaaccctgacaacaggatgctctgatatgacagtagcatcggggacattagccgtcttccggagaaaatgggccaggggctgcccgtatgtgtgggggaacgcgtggctgatcacatgagcgcctgcaggatcagcagcaattgcagcgtcaccatactccactctcacagtggtgccagtatacacgaccagcgccggtgagatggactgatccggacgccggagcggcgcgggatctggcgccgcgcggtccggaagcacacagatctggaggcaggggggcagctcgggctggtagagcgcgcgcttcttctgcacctccagttgagcagcatccgtattggatgtaacacctccaatgattactaaagcatccaacttcaaagcctgacaactagccatggcaccattgacctgctctgttgttctaatttgatcctttgtccggccaagcatatcactaaccaccttggtttttatatgaagaaagaacttcgtcggtgatctccaaagttttctgtgcgagaagaccatcacttccaccaagaaaaccaataagtttgctgtttgggttgtgagccttaattgcctcatggagtccccagatgacattatggcctcccggggactgccttccgcagaaaacaacaccaaccctgacaacaggatgctctgatatgacagtagcatcggggacattagccgtcttccggagaaaatgggccaggggctgcccgtatgtgtgggggaacgcgtggctgatcacatgagcgcctgcaggatcagcagcaattgcagcgtcaccatactccactctcacagtggtgccctggaggcaggggggcagctcgggctggtagagcgcgcgcttcttctgcacctccgagagctcgcgcggcacgccgtagtcggagtccatcgccggtgacgcagcgcggcgcggcgcggcgctccgattcgttctgtgttggtagcttgggggggtgggcttgggcttgaccacgatacagtagtgcacgtctttggcggcctgaaagtctctccaacttgacgccatagtttacaaattgttacctgctcatggcctcccaggtgggcaacctgcctccataacttgaggcagttgagacctttgccatagaacttgggaggcttgaactcgaggccgtgctccctgtggaagcgctccagctccaccatgaacgccgcctgctcctcctccgttccagagtcgtcaccgtcgaggaaggggtcgggctcagcgggctggttggcgcagcccgccatcacggtggagctctcgccctccgccttcgcctccgccctcggcgacgcatcgggggtggagtcgtcatcgtcatcctcctcatcatcatcctcctcctcctcctcctcgccgtcgtcgccgtcctcctcgtcatcgccatcctcatcgccgtcgtggccgtcgtggctcatggcgtcctccccgttcatctccacccccctcgcccccacggcctcgtcctccccctcgtcgtcctcgcgctcacggccgccgcccgcccctgcattgagctccacccgatccagcgagcccgcgccctccgcgtccgcgtcgctcttcggctcgggggtcgggggagtgccgccgccgccccacgcggccctctcctccgccacgggcaccgcctcctcctcctcctcctcctcctcaacctccacggcacggcctgccgcctcctcccctctggcctcctcggcggcgcgcgcgtcgtcgtggtcggagccggagccggagccggccgtggcgccgttcat

SEQ ID NO: 99448 - DNA, 458 bp, Oryza sativa
  Clone ID: PAT_MRT4530_97259C.1
tatatatatatatatatatatatatatatatatatatatatatatatatatatatatttcctttatatgataattgtcggtgatatgggcccgggggtatcaggtttagagggaggaggctgccccccgatgccacgtggccctccccggagaggagtcagacccgaggtcaccatgtacggtgggttaagtgtccgcctccaggtggccacctacccgcatttatggctgcccgagtagtcgcgtcacgccgcatttaatgcggtgtgcaatgcactcaaccggtctgtgaccggtcgaatgaccgatgggactagggtagtgcaaccatatccaggttcatagcgtcacgaacctggacacgcatatgtccatatgtcttggacacgcatatgtccatatgtccagtttcgggtttttttagtcatatgtccaagttcatagctaggattggggtt

SEQ ID NO: 99449 - DNA, 773 bp, Oryza sativa
  Clone ID: PAT_MRT4530_9725C.1
gacgggtggggcccacccgtcatccccttcctcccgccgctcccgccgcctcgcccgcgccctagcgccgccgccgccgccgaatccgccgcatcccgtcatccccgcgtgcaatcaataggggggaattattccccttgattctctctccctttcccccatttttccctctctctctcgcgttcaaacgggcggacttgcccccgcaagtctcgccggcgccattgatggcggccgacatcccgcgccggtttccttccttccccggccgccctctctcgccccggctctatttaaacccaccccgcacctcctccgtccgtttccgcctctcgccgcccttcctcctcaccggaatcgagctcgcgccgtcgctctctctctccgccgtcgccgccgagctccggtccgccgccgtcgtcgccccagaccacctcccacctcggcgccgcctccttcggcttcgccgcatcctcgccgacctcatccacccctccgtttcgctcgccgaccgccggaacgccgtcgaccccgtcgacccgagccgcgccgccgccttcctccgctccggccgcctttttcgtcgtcgccgtggacctagggtgagccgtggaccgccgcctcttttcccccttcccttcccctctctcggccgccgctccgccgtgcctatggccgccgccggctgcgccggcttggctgccctcgggcgcgccgagtggctgccgcgtggggcccggccatcagccgctcgtgccctcgggtgcagctga

SEQ ID NO: 99450 - DNA, 522 bp, Oryza sativa
  unsure (1)..(522): unsure at all n locations
  Clone ID: PAT_MRT4530_97260C.1
agggaaacgnggaaggcagggntccagttattggatcccgggtactgngtaaaagcccttggccttcctnttaagtcacaggggcaaccatggtaccttaacaancaggttggtgggagatttnttgagtatcaaggattgccaatggccccagtaanaggagttggacatgcagtgccccaaaacaanccagaacnggcggggggtaancaattcctttntttcnggcagggtctcccaacaaaaaacacccnntgatacnccccanataaatnttncncataaaaataaanaaggaatnngtcctcgattttntcanacatagatgacncaacncntgttttgnagnctnttcatgtacgcaattgtcgtgtgtcaantagatgcccccnaancacataatntgnaaattttccctaaggttgngntttannttnanaannannanttnnaccctatnttttnnaacaaanantanaacttgcccntgttnntttnaaaaaaaaaaaaaaaaaaaaaaaa

SEQ ID NO: 99451 - DNA, 1861 bp, Oryza sativa
  Clone ID: PAT_MRT4530_97261C.1
gcgcccacgcgtccgcccacgcgtccgcccacgcgtccgtttctgttcagtttggttagcataggaggattctacatcccagctcatctgtctctgtacgggcaacccggagtggaaagatgagctgggatgtacggattctgttttctgttcagtttggttagcataggaggattctacagagaaaaaaaaaaaagggagaatttgaaccatgccacacaaattttacaaaatttgtgatatgccaccctgacccacatgttattgactcatgtgggtcttatatgtcattgagatacgggtggtatatctcaaatttataaatatagggtggcatggttccaacatgccggaagaacaacaagaagcggaagaggggatcgccggcggcggcggcggatgggcgagcacggcgctgcagccggtgcggtggctgcggatgctgtgccgggagctgggcgcgacgttcgtcgccggcgtggtgctggtgtacgggctgagccaggggttcgccgggtccttcttccgcgtggcgtcggactactactggaaggacgtgcagcgggtgcagccggccaccgtgcagctcctctccgccgtcttcttcatcccctgggtcctcaagcccctctgggggatcatgaccgacgtcttccccgtccgcggctaccgccgccgcccctacttcctcttcgcaggagtacttggaacggcttcagctgctattgttaccatggttaatggactaccgatgacttccgctatactttcctttgtggggatatcaacagcagttgccatagcagatgttacaatagatgcatgcattgcgaagaatggtattgataagccatcattagtcccagacatgcaaagcctttgtgcattctcatcatctctaggtgcacttattgggtatgctacaagtggaatgtttgtccaccatcttggggcacagggtgcattaggtgtgatggctttacctcctgcaacgttggtttttctaggatttttcatatatgagctgaaaatgtatcagcataatgtgaaagagaaggttttgaataaggttcatatggcagtgaaagggatggctcagacaataaagtacccagtagtgtggaagccatccctgtacatgtttctttccctggcgcttagtatcagcactcatgagggacagttctactggtatactagcaaggaaccacctaatcctggattttctcaggaatttgttggtatggtccatgccatcggcgcagttgcatccatggtgggcgtcctggtgtaccacaagtacctcaaggactaccctttccggagcatcctcttctacgcgcagctgctgtacggcgtctccggcctcctcgacctcaccttcgtgctccggtggaacctcctcctcggcgtgcccgacgccgccttcgtcaccctggaggagtgctgcgcccgcgtcgtcggccgcgtcaggctgatgccgatgatggtgctcagcaccaagctgtgcccgccgggcgccgagggcaccttcttcgcgctgctcatgtgcatcgacagcgccggcatgctggcggccaaggccggcggcgccgccgtgctgcgcgcgctccgggtgaccaggaccgacttcgcccgcctctggctcgccgtcctcgtcaggaacctgctccggctgtccacgctcgccgccatctcgctcgtccccacggccgaccagaccgacgtgctcctgccgcgcgacctcctcgccgtcgccggcgacggctctcctcccgccgccggcgacggcgacgacgaggagaggctgcagctcgcgaaattcgctgatcacgtcgacgacgacgacgacgacgactga

SEQ ID NO: 99452 - DNA, 357 bp, Oryza sativa
  Clone ID: PAT_MRT4530_97262C.1
atgaccagagttccgcgaggatatatagctcggagacgacgggcaaaaatgcgttcatttgcctcaaactttagaggggctcatttaagacttaatcgaatgattactcaacaggtaagaagagcgtttgtttcctctcatcgagatagagtcaggcaaaagagggattttcggcgtttgtggatcagtcggataaacgcagcaacgcggatacataaagtattcgataattatagtaaattaatacacaatctttacaagaaagaattgattcttaatcgtaaaatccttgcacaagtagctgtattaaatccaaataatctttacacgatttccaataaaataaagattatcaat

SEQ ID NO: 99453 - DNA, 318 bp, Oryza sativa
  Clone ID: PAT_MRT4530_97263C.1
atgctgcagaagggcacccgccgcctgaagcgcgcctcggggcaagccgccgtcaccataagtgaggcggcgccgtgccccgacgcgttgtggcctccctccgcccggggacgggagagggccaaaccacctgaccgggtggggtcctccctccgcgagggatcgcggcggggaggagttggagagttgtggcggcggaccttgactatgattgtcgagggccgagggaaacttggggcggaaggaaacgacttctctttaaagcgcgcgacctccccctacctggcgcgccagctgttgaggagtgatcctctctag

SEQ ID NO: 99454 - DNA, 1507 bp, Oryza sativa
  Clone ID: PAT_MRT4530_97264C.1
ccgggctgcaggaatcggcacgacgcgggtagctatctcgtcctccgtcctcacccgccgccgccgcgaccgcgagctaaaccacggcaccgccggcgacctcgtggacctcgcctgtcgccacatcatcgctgccgtcgcctactcgcctcccctccccgaccccgacccgatccgctccgctccccatttgtttattccggcgcgtgagctaatcaccgcgaggtccaccgccgccgataacacccaagccaagcgcggtcgcttccgcgtcttgatttcctcctcctcctcctcctcccactcgcgtgcgtacctccgccttattatatagcgctggcctgggcggggcggaagagccaaatggtggcgctgcttcgctcgtgccgccgcctgatcccgcacctgtccgcctgcgccgccgccgcgccgtcgtcgtcatcgtcgtgcgctcctcgggctaggccgatctcgcggggactgcggctgctgccggtggtgctcgcaatggcggggtacagcagcggctccgccgcggaggggaggaggctgctgttcaggcagctgttcgagaaggagagctccacctacacctacctcctcgccgacgtcggggaccccgagaaacccgccgtgttgattgaccctgtggacagaacagttgatagagatctcaatcttatcaaggagttgggcttgaagctagtctatgctatgaatacccatgtgcatgctgatcatgtcactggaacaggattaataaagactaagttacctggagtaaagtccgtgattgcaaaagtaagcaaagcaaaagcagaccattttattgagcatggggacaaaatatacttcggtaacctcttccttgaggtacgatctactcctggccatactgctggctgtgtgacttatgtaacaggtgaaggcgatgatcaaccttcaccaagaatggcttttactggtgatgccttgcttatacgtgcatgtggaaggacagactttcagggaggaagttctgatgagctgtatgagtcggtgcattcgcagattttcacattgccaaaggataccctgctttatcctggccatgactacaaaggtttcacagtaagtactgttgaagaggaggttgcgtataatgctcgactaacaaaggataaggaaacattcaagaaaattatggacaacttgaacttggcctatccaaagatgatcgatgtagccgtgcccgcgaatttgctctgcggtattcaggatcctccaccatccaaggtctgagctgttccggctgaagctttcaagctgttgtgaactcacggtcaactcgagaagctcgcagctatgttgtacattaaataatctgttgttaatttgtaaggcactacttgggaacatttccgcttcatgagatcaacggtaataataataaacagaggctagcttgcctcttgtcttgtgctaaaaaaaaaaaaaaaaaaaaatcggttgaaaaaaaaaaaaaaaa

SEQ ID NO: 99455 - DNA, 298 bp, Oryza sativa
  Clone ID: PAT_MRT4530_97265C.1
tcactccctcgagggacgcgaccctcgattgataggtttaaaaaaggggagagagagtgaggagacccctaccgtggacactgggtggaggcgccattgctggtcgcgttgatccacgtgccggctggcgccgcggaggaggccaaccaggtgaccaccagccacctgtggacggccggctacaagaacgccgaccgcagcaagagcaagagcccgaggcaggagaggagctttgccgacccggacaactacaaggccgtcttcgagcacatcgacgatgactcccacttcgacgacg

SEQ ID NO: 99456 - DNA, 828 bp, Oryza sativa
  Clone ID: PAT_MRT4530_97266C.1
ttccaaatcatctattaaaatattttttttcaaacttctacaaatgctgccggcttccttttttttaatctttttatgactagcaatagtgcccgtgcgttgcaacggaaaaacatcgtttgatagtgtgacaccttgaaaactttcggcataggtcttcccaagctagcccaaacttgggcttgcccatcttcggcgagttgagtcatcaattcgacggcccgcaagctgagcagctgagcgtggcccacatatgcggggacggtccgatgcacttccgcggcccattaggcgcagcgtaatcaacggcggcgacggcctgacgctaggcgaatctgagccgtccgatctaatggacggctccaatcgtccctgcctcggatgaagcaccgaccgggagagaggggcaaaaccctagctcccaaatcgctctctcctgatcccatttctcttcgacgacgagccagcggaacgacggcggtccggcaagctggtgcgtgcgtacggcgacgaccgccgagcggctcttgcttcgccggctgggggcgcacccgagggcgacgcaaagccgtgccacgacgtccgcggtctggctaggtaggcgtgcaaacggcgacgagcaccgagcggcctggacctcgtcggcggtaggggcaacgccaagccgacgcttcccgtcttcggcaaaggatggtggcggggtgctccaggacagcgcgcagggaacccgacacgactgcgaggaggtgaaggtgcggcggtgccgcttcctggaaagctccggtgtgctcatgggtttcaagtccgataagtaacccgaacctttag

SEQ ID NO: 99457 - DNA, 189 bp, Oryza sativa
  Clone ID: PAT_MRT4530_97267C.1
atggagtcaaccggcgtggaggcaaagccaccagtcagtggggcaatagagtcaattggtggtggagacgaagtctcccataagcggcgtggagtcggagaagaagagtttgccaaagttgtcgatgagaaaattggacaccgagaagaagagtttgcaaaagttgattacatagcacttgttgactag

SEQ ID NO: 99458 - DNA, 1596 bp, Oryza sativa
  Clone ID: PAT_MRT4530_97268C.1
atggcgctgtccttcgccgtgcgccgccgcgcgacggagctcgtcgcccccgccgcgccgacgccccgcgagacgaagcgcctctccgacgtagacgatccggagtcgctgcggtggcaggtccccgtcgtcttcgtctaccgcccatcagccgcggccgctgatcccgtggacaccatccgccgggcgctcgccgccgcgctggtgccgtactacccgttcgccgggcggctcagggaggttgaaggccggaagctcgtcgtcgactgcaccggcgagggcgtgatgttcgtcgaggcggacgccgacgtgacccgtctcctctgcggaggattcgtcctcgggatacgcctcaaccacgccatgtgcgacgcctcgggtatcgtgcagttcatggacgccgtcgccgatctcgcccgcggtgcccgtgaaccggccgtctcgccggcgtggtcacgcgagcttctggacgcgcgcaagcctcccaagctggcgttccatctccgcgagtacaacgacttcgccgccgcgcccccggcggcgccgtccgtgggcgccctcggcgacatggtcatgcgcaccttctctttcagccccggcgacgtcgccgcgctcaagggtgctctcccgccgcacctccgcggccgcgcgacgagcttcgacgtgctcgcgtcgttcgtctggcgcgcccgcgccagggcgctcgagacccccgccggcgaggacgcgcggctggcgatcatcgtcagcttcaggaacaacggcgagctccgcctgccccgcggctactacggcaacgtgtgcgtgccggtgacggtggcgatgcccgccgaggcgctgcggcggcgcggctcgctcgccgacgtggtcgagcaggtgcgcgaggcgaagaagacggtgaacgccgagtacgtccggtccgtggccgacacgctggtgatgcgtgggcggccggccatcgacacggcgaacctgctcctcctctccgacgtccggctcgccggcttccaccgcgtggacttcgggtggggcgagccggtgtacggcgggccctcgcacgcttggtatggagtgagctacttgatcgccgtcaagaacggcgccggggaagatggtgtggccgtgccggtcgtgctgccggcggcggccatggagcggttcacgtcggagattgaaaggctgcgcaagggtcagcagcgtggacactttcggtataccgtttggggtcggtcctggacaggacaatttctcacggatcagacagaccctcacgaatcagatacacaccctgaagaagcatctgagcagctcccaaacagacacctacagctctcaaatgactcccaagcatttgagtcatggctgcggcggtgggccggcggcggtgacgaagccggtggcggtggagcctgctcacgactccactttagcgacgccggtgcgcacgaggtcagctgtgccggtgagggagagtggcgtgagcatggtggtggcggttgcggcggcggctgctgcggcggagtcgggttcgttgaatccccaacctgtggatggggctcgtcgtatcacatccaaattaaaatcaaacagaggtga

SEQ ID NO: 99459 - DNA, 523 bp, Oryza sativa
  unsure (1)..(523): unsure at all n locations
  Clone ID: PAT_MRT4530_97269C.1
cattcccgggtcgcccagtctccggggnaggagaggaggcgacgggggggggggagaagaagaagagaaggttcgcgcgtcggtgaagcggctgtgcgcgtactgcaaggtggtgaagcgcaggggcatcgtgttcatccagtgcaaggccaacgccaagcacaagcagcgccagggcttctccacgctcgccgaggccgccgccgcctgccaccccccacctccgccgctgctcaccaacacatccccggctgtcgccgccgccgttgcggaggcctcgaaggttgctaagcaagagccgtctatgaagtttaattggcctctgggtttagctgctctgctcaagaacagcgataaataatgtatctgctatttctgcatgaatcctagcttcttgatattttggtactatgtgtaagattttagttaaagaaccaacaaagtttgtgtatctgcagtcatcagctgaactgatcttgtgatggaataacacatacctacacttttaaaaaaaaaaaaacac

SEQ ID NO: 99460 - DNA, 431 bp, Oryza sativa
  Clone ID: PAT_MRT4530_9726C.1
cgaaatcccgagtatgtcactgaaatagtacataatgattttagaactaatagtacaagatcgatcgggatgtaagctggtatgcctttcgtgcttagaactataatctctagcctgcttcttgactgctaataagggtttcattggggtttcagctgatgaagtatctagacattgcatcggcttacgaggatttcatccaattggtttctactggattatattgtttaattatattgattatcatcagtcgattgtctttatatcattgtctacattggacacccgatagcttcaaaccctattgctatcagctgggtcaaactgactggcacgtctgtatctcatcaacctttggacctgcactggagttaagcaaatctcctaggccagtatgtgtttttcgcgtcaacacgtatgtattttctatt

SEQ ID NO: 99461 - DNA, 963 bp, Oryza sativa
  Clone ID: PAT_MRT4530_97270C.1
atggatgatgacgacgatactagtttcaataattctcttgatctctactgcgatgaggaccctttcgactctacgccccccccgccgccgccaccgccggagcagcagcaacaagctgggacgacgacgccagatgatattgatgatgaggtgatggagtactacaaggcgaagcagaggtgttacgctcttcagatcagagattactgctgctacctgcaatgccatcatcttcttcttcagcagcagcagcatggtgtggcggccgccaggctcaaagccgcaatgggaaggctgggactggaggccgcgacggcgttcaacgcagccaactatctggatcgcttcctctccatcaattgccatttgaagtgggaggagtggatggtggaagtggtgagcgtggggtgcctgtccctcgcctgcaagctcgacgaagtcaccatcccctcgctccacgaccttcagatggaggaggcgatggggcactcgttccgggcgtccaccatccgggacatggagctcacgctgctcaaggctctccgctggcgcctcgcctgcgtcacccctttctccttcctccccgttactactactactacaactactagggccctcctcctccgctccctcttggatccctcctttctccgctttgatgcctcgctgcttgctgcctctgctcttactttatcctctactacaccacaacaccccaatcatctcctcctcaaccgcctcattcatcctttctcccagacggaccatgaggtgaaggaatgcttcaacatgatgaaagcacttcacttggatatgtccaaaaatcctggcaggtctagtgaccatccgtgctggagcccgatttcagtagtaattcccttccacactgacggtacagttaagagatcagcaataagccgatgtctatttggcagcggcagattaaaagccagatcaatttga

SEQ ID NO: 99462 - DNA, 1433 bp, Oryza sativa
  Clone ID: PAT_MRT4530_97271C.1
ccgcggggctttccgcccgcgggtgttcttcgctgtgcttgtgctgctgctttgccaggatgaagaggtgttgcttcttctgcacccccttggggtgcccatgccctcgcttcacggcccctccccggaccgaggtgcgctgccccagcgcgccgggatcgtccatccgtgcctcctgcgctggccctgcacccgaggcggcgccgtcgcgtggcggcgtcaaaccccagcgccagctgctggcgttcccaaactcaagcccagcgccgcaagcatcgagtggtgggcagaaacaaatccttccacgatagtacttcgcagagcaagagcagcagcatagcaaagattaagaggagatgcttaatcttcacaccattaggatgtccattccttcgctacacagatcctccccataccgatgtgcgctgctaaagaggaagagatcttgtatccgtgcctgcagctctgaagatgatggatccgatgcttcgtcgtcgcttggcggagacaaacgccagcaggaggtccttgcgaagatcgcaatgcttcaggcgcagaaggtgcgcatcacaagcttcttggacgagcgctctgcttacctgaccaagtttgcgaaggatgcggacaccgagttcgatctgattggccagaacgccatgaaagagcttgatgaagttggggaccagataatggagaggctggacagcaagatgcaggcctttgaggagactgctgaagttcaaaggcaggagatagaaatgaacgagagggtgcttgaagacttcgaagattggattgagaaggagaaaaatgaaggtatgttcttcaaaagccttgggaaggtgaagcctcgcaacaagaagaaactcacagtaaaaccaatacccaagctagaagcacaaaaggtcaaagatattgcaaaagaaagtgcaggatcaaaaactaggatgaacatttaccttgggctcatggcaatactcgggcttacaattgcaaatgccgtcttcgcaacacctgaggtggagtggaggaaggttgcagctctgggtctaatattcattggtttggttgctcaggtcatctacgagcaggatatctcatcaccagaagctgaaaagaagggaggaaaagaagaatgaatgaaagacttgagagataagcatgaaaaagtagcagtagattttaatcaacattttcacaagaaatgtaaagtgtataaagttcatatgaatatatagtcttttgcaatccaaaaaaaaattttaattgtagcttggccaatagaccacaggtttctcaaacctgtgatttgataaactcaagctaacttcactcttgcatcagatatatgtttcagccattaaacctcttcaaagccaaaaacaggtaactgggttacatcgatgcacctaaaaggcgtctttccctcgtgc

SEQ ID NO: 99463 - DNA, 372 bp, Oryza sativa
  Clone ID: PAT_MRT4530_97272C.1
atagaaagaaagagagagaggctcaagctaaccaatgaggttggtgccgactccaatagacgagataggctaagcagcaaaaaaacgacgggtgtgggaacgccggcgccaacctagacaaccggagggggctaagactgggacttcccatgagtggcagcaagaaccgcgaggcggcggccaaggccaaaaatacgggcttcgaggagaccattgacctgaagctgaagctgcccaccgccggcatggaggaggccgccgccggcaaggcggaggcgccggccgtccagaaggccaagaggccggcggaggccgtcgtcgacgacgccgagaagccacctgctcccaaagcgcaagcagtgggttggccac

SEQ ID NO: 99464 - DNA, 325 bp, Oryza sativa
  Clone ID: PAT_MRT4530_97273C.1
atgaaggcgcttaatagacacccagctccaacgaagaccgtcaccggttctgaaaccggcggcactcaccgtggtaccaggacgagggaagccgacgctgacggctgcctcggaagccaaaagaccgaaaacaactacgggagaaccatgaccatacgggaagacccgactaaaactacaactaatagaggggtggaggggccggacccctctccatcccttccacggcggcgagccaccggggaggaggagggagaggggccggaggggacgaaggattcctatagaaaggattcaagagaactctcgagagaggaggagaagg

SEQ ID NO: 99465 - DNA, 426 bp, Oryza sativa
  Clone ID: PAT_MRT4530_97274C.1
cggacgcgtggggcgctggtccccctctctctctctcgccacctctcccgtcgcctcgaatcctaagcggtggaggcggctgctcccctccccggcggcgacggcagtgacgacggctgctactcttcctccccggcatggcggcggctgctcccatccccggcgtggctgcagcggctgcgcccccctcccctaccggacgtggagccgaaggcggctgctactccccctccccggcctgggcgcgtagcggcagcagcggcggatgcttccctccccggcgtggtgcagcaactgccccccctcctgcccggctgtcctctcacctacccgacgtggagccaacgggggctgatactccactttccccgcatggccacggtagctgtggcggctgcttacctccccggcatcgtggtagcagct

SEQ ID NO: 99466 - DNA, 312 bp, Oryza sativa
  Clone ID: PAT_MRT4530_97275C.1
atgccgggaggaaaaactatcggtccaacaagagaagaaacaagagaaaacctgccaagtgaagtagagctcgccgagatggtgcaagcacaaggtgctgttatggtgaacaaagaacaatatgaagaactgcaaagagaattgcaaaggttttgcatgatcaaaccatgggagcaggaggatctgaaaatgcccgatccaaacacaacccagtttgctagccaattcctaaaccagatggtccagttcgcaccaacacaatcccatttccaaccaacaagagcaattgacacccagaatcctttgagttaa

SEQ ID NO: 99467 - DNA, 549 bp, Oryza sativa
  Clone ID: PAT_MRT4530_97276C.1
atgggccacccgcgccttcaggccggcccggcacggcccgacagctggtgggccgtgcctgggcgggaggcgcagcccatgggccggcacggccctgcacgaagtgccaatcgggccgtgcaggcccgatggctggtgggccgtgcctggccgtgtctgggccgggccttttggccatctatactccccgacgacgatgacgacgacgacggtggacggcgcccgcaccgccgtgttgtccccgtgctagcgccgctgccgcatcaggcctctacgctgctcatcctcgatgacaccgacctcctccccaacgatgacgatgacggcgaggaccggacggcacccacatcgtcgtgctgtcccgtgctgtcgccgcatctgggcgctgctaagggcacccatcgtcgtgctggcacccgcatcgtcgtgctgtcgccatgctcagtgttctcgctgccaagggcgtccaggagctcatgctgctcagcgtgctggcgtcgctcctttccttaccagagagcaagttaccaagggcaaatttatctttaa

SEQ ID NO: 99468 - DNA, 296 bp, Oryza sativa
  Clone ID: PAT_MRT4530_97277C.1
ttcggcacgagggtccaaacactgctgtgatgggagagatcatgaaggaggcaccacattctctgtggagaagcaggctagtggatgcctttctcaggtctcgctgctgctgccttattgttgctgctgctctccatggccaactccaccattgcatgccttgagcaggagaagagctctctcctccggttccttgctgggctatcgcatgacaatggcatcgccatgtcgtggcggaatggcatcgactgctgcgcgtgggaaggcatcacctgcagtgaagacggggctataat

SEQ ID NO: 99469 - DNA, 1511 bp, Oryza sativa
  Clone ID: PAT_MRT4530_97278C.1
tgcaaagctcacagcgttctgtcttaccagaacacgcttctctttcgagccacactcctaagaagactccaaggatagctccaatggaggtgaagtgcttgctgctcctggctctcttccttctgctaggaacacatggtggtgaagcgcagccgctcgtgccggccgtcatgacgttcggtgactcatcggtggacgtaggtaacaatgactacctcaaaaccatcatcaaggcaaacttccctccctacggaagggacttcaagaaccaggtacccacggggaggttctgcaacggcaagctggctactgatatcactgccgagacgttggggtttgaaagctacgcacctgcgtatctcagcccagatgcgtcagggaagaaccttctgattggagccaactttgcatctgcaggatctggctactatgaccacactgcacttctgtatcatgctattcctttgtcccaacaattggagtacttcaaggagtaccaatctaagctggcagccgtggccggaagcagccaggcccagtcaatcatcaacggctcattgtacatcatcagcgccggtgccagcgatttcgtccagaattactacatcaatcctttcctctacaagacccagaccgccgaccagttctccgaccgcctcgtcggcatcttcaaaaacaccgtggcacaactgtacagcatgggagcacggcgcatcggcgtgacgtcgctgccgccgttgggctgcctaccggcggcgatcacgctgttcggctacggcagcagcgggtgcgtctcgaggctcaacagcgacgcccagaacttcaacggcaagatgaacgtcaccgtcgactcgctttcgaagacctactccgacctcaagatcgccgtgttcgacatctacacgcccctctacgacctcgtcacctctcctcaatcccaaggattcacggaggcgaggaggggatgctgcgggacagggacggtggagacgacggtgcttctgtgcaaccccaagtcgatcggcacctgcccgaacgcgacgacgtacgtgttctgggacgccgtccacccgtcggaggcggcgaaccaggtgctcgccgactccctcctcgccgagggcatcaacctggtcacataaattccggtggctttcagccagcagagggctgcattgtagatcgatgacaagaacaacacaggcttcaaactcgacctgtttgattataaatgagaataatgataataatgtttgctcggtggtttggcagcgacagctctaaaatgtgtcgatgtggagttgagggtgtttcgggctgtcgctgtgttgcatgccatcagcccagcaatataggacgatgttttacagttttaaattttatacccagctcgataaactgggagtaggtcttgaaggtttctgtacttatcatttttttttgtttgaaagttttattgtctcgtcgtattaatatactcagatgatttcaaccaaaaaaaaaaaaaaaaaaaa

SEQ ID NO: 99470 - DNA, 210 bp, Oryza sativa
  Clone ID: PAT_MRT4530_97279C.1
atggctgggagcagcggcttccgctcggaagaggccaggcctggccgggtgttgcacggtgggcaacagcgacgtcgacgggctcggggagaagcggcggtggccgccgcagccgggagtgccaacggggtagtggcgggcgcggcggtgagctcggtggactgcgagggccggcgtgtactctgctcctgggagatctttttggagtag

SEQ ID NO: 99471 - DNA, 776 bp, Oryza sativa
  Clone ID: PAT_MRT4530_9727C.1
ggagctcccggcctcccccccgcggccccccggcccccgccacccgccgccgcgcccccgccccgtcgcccccccgacgccacttcatcctctcccccccccccccccggccatgcgctctttgcgcatcctctccactccgatggctcagcggagctcggcgccgttcatcgcccactgcctacccctaccctacctgtgcagtgtgcaggtcgtgcccggaatccccgtgtcgcacccccctcccccttcccacaggcgatcaaggctcagctcgacttcgatgggatcccttgacctcggtgccgcccaggaagatcgtcgtcactcgcggcgccacacaagaagttcgtcgggcttcctgctccttccctgtcgcatgggtctcctcgccggtgatctcctcccttctcaccctcagtgcaagatatggttccaccgctggccacgctggagacgaggtcgttcctcttccccatcggccacagctggagccgacgtcctccccatctgccgccgccgacggagctgaggtcatccccagctgccgccgccgccgccaaactccagcgctgccacagtttgtgcataagtcagcgaggattgatttttctttccctgcaagaagaagaaagagtaatagtggtggcagctcgatggctcacaggaaaagcaaggggaagaggaagggcgcaaagagacagggaaagtggactatgagctataatgacagtgtggccactgatcggtgccccttggcctattgcagtggataa

SEQ ID NO: 99472 - DNA, 426 bp, Oryza sativa
  Clone ID: PAT_MRT4530_97280C.1
atggcgaggaaggtggcggtggcggccatggacgccaaggaggcggaggaggtgatgaggaggaacgcggcgctggaggcggcggcggcggaggcggcggcgagggaggagcggctgcggcgcgagctggaggcggcgctggcggcgctggcggtggcggaggaggcggaggagcggctgtgcgtgcagctcggcgagctggaggcggaggcgatggcgcaggccgtcgagtaccagcagcaggtcagggagctctccgaccgcctcgccttcgccgacggcgtcctccggtttccaaaggccaaagctataattgccgaaagtaaacagaggcaggacctcttcgtcgactttggatgtctggcaaaagctcgacttggattaaggttgaagcttgaacgctacagcttcagtcttttgaattga

SEQ ID NO: 99473 - DNA, 697 bp, Oryza sativa
  Clone ID: PAT_MRT4530_97281C.1
agaaacgcttctctttcgagccaactcctaagaagactccaaggatagctccaatggaggtgaagtgcttgctgctcctggctctcttccttctgctaggaacacatggtggtgaagcgcagccgctcgtgccggccgtcatgacgttcggtgactcatcggtggacgtaggtaacaatgactacctcaaaaccatcatcaaggcaaacttccctccctacggaagggacttcaagaaccaggtacccacggggaggttctgcaacggcaagctggctactgatatcactggtcacattctcactcttgctaaatgttgttactttccaatgtatatgtgagttgcagttgcattttctaatagagatcctgttctgctacttcctgtggttgcagccgagacgttggggtttgaaagctacgcacctgcgtatctcagcccagatgcgtcagggaagaaccttctgattggagccaactttgcatctgcaggatctggctactatgaccacactgcacttctgtatcatgctattcctttgtcccaacaattggagtacttcaaggagtaccaatctaagctggcagccgtggccggaagcagccaggcccagtcaatcatcaacggctcattgtacatcatcagcgccggtggcagcgatttcgtccagaaatactacatcaatcctttcctcta

SEQ ID NO: 99474 - DNA, 594 bp, Oryza sativa
  Clone ID: PAT_MRT4530_97282C.1
gatggcgcaggccgtcgagtaccagcagcaggtcagggagctctccgaccgcctcgccttcgccgacggcgtcctccggtcgtcgtccggccgccgcaccgccgccgtcgccgccggcatggactgaccgacgaacgaacgaccaggtttaattttcagtggatcattgctagggtgttgtatgatgaagcatgtacgttttcttttttccctctttgctccgatggagtgaagaagtggtgtgtactttgtgtgtgtgatctgtgaagggcagtaaaatttacctgagatgtatatacatgctgaaagagatcagtcgttgttgggtactgatccttcaggtttccaaaggccaaagctataattgccgaaagtaaacagaggcaggacctcttcgtcgactttggatgtctggcaaaagctcgacttggattaaggttgaagcttgaacgctacagcttcagtcttttgaattgaccctgtgtccctgttgacatgaactcaagacttggtttgttttgggcagagtgaactcaagaccagtattttcagaaaaaaaaaaaaaaaaaaagggcgggttctagatcgcgagct

SEQ ID NO: 99475 - DNA, 1835 bp, Oryza sativa
  Clone ID: PAT_MRT4530_97283C.1
atgggggggattctggtcccatatgtgtgcggtgcgtgcgggccgggacggacgggcggaaagcgaggcttcgccatccgaggctccgaagcgacaaaaagccgtcacgacgcgccacaatccccgattcgcttccccgtgtctcccagaggggagttggtggtgttcctggagcttcttgggggtggtttttccaagctgcggcgggctcgccgaagttggatccggcggaagagaggatttctgggaagggtgccgcgaagctgctcgacggcaggctcgtggtggccttgaggaaatcgcttcaatttcgaacgggctgttcagttggctggacgattcatttcaagagcagaagtgtttacaccaagccgtagcagaagagggaatccttgatttgtcgtgggaataaagaggtgctcacctttgagttggacaatgcatcccagggctcgaatccacgcagacccggctccggagttcgaccaattcgactgcctgccggatccagttgtcctcctgattctgaacaagctggaggacgtgcgttcgcttggccgctgcgctgccgtgtcgaagcggttcagcggacttgttcctctggtttccgatgtgtatgtcaagattgaccgtgtcgtggccacagatggtgatgctgatgatgctctcaatctgtcttcggcgaagccaaagaacatcttctcccatttctttaagcttatgctattcacaatcgtcaagccattccacagtatgcgcaacctgaatggcacgggcaggccgttgttcccgcttgcgcagcattcaccggtacatgtgcttaggaatttctctgatgtctggaatctccgggtggagcttccctcgggagatgttgggaccgaggagggtgttctgcttaagtggagggctgagtatggtagcacacttcggaattgtgtgattctgggaggtaccctggtcgatcgcaagcctataggcgcagagcatgagtcgtcggtagaggataatggaagcatgccagaatctttctataccaatggcgggcttaaacttcgtgtcgtgtggactatcagctctttgattgctgcatcaacaagacactatcttctccggtcaattatcaaggaccatccgacgttgaggagcttggttttagcagatgccgatgggcaagggacattgtacatggggatggagcagcttagagagtttagagaaaacaaactgtcagcctcagcatgttccaatagaactcaggtcccagcctgcaacatgaagctgaaatatgccccataccttgagctacctggtggcatgacattgcaaggtgccaccctggttgtgatcaaaccctccaatgatggaggcagtggtggtcacagcagtcggaaggaaactgaagcttttgtttcaagtgcattcgatgaacctttcagatttgctgtgaaggcgctgatgaagagacgaacatatctactggagatgaacggtttctagatagtctacttgagttgcagtggattgtctttctatcaactgcttcaaatatatcatttttgtttttttctctcaagcagagcaacttcaatcctgtttagaatgatgaaatgtccaccgcaacgggctcttccacgacggcgctctacgtcggcctcgggcaggctcctcctcgccgccggcctcgggctcttccacgccacctccagggcgtcggcttcttccgcaccgcgaaagaaacccgtcactgtcagcctctgccccgctgcctcgacatcggcattggcctcagcctcttcgtggtcttgcaagttacaacaactaggaagggctga

SEQ ID NO: 99476 - DNA, 402 bp, Oryza sativa
  Clone ID: PAT_MRT4530_97284C.1
atggcggcttacaagaggtatatatatggtggaaccctaaaagggataacgatccgtaccgcgggggctccggcccaagcctctggcaatgggcctccgcttcgctacagcagaagctggcctttattaagtgcaaataaatttggatcacaactcaacagaggcagcgtccgtggcgaccgcaacggcagcggcgaggaggatgccggcgagcaaggcggagaggagggcggttgtggtgggtgcggtggcggcggcgaggaggagcggggagaggagcgccgaggccaccgcgttgggcttcgaccaccggtgcgacgcgatgtccaggatggtgaggcggcgcgggaggtagagtggcgagtggaggagatcgacgaggcggcacgcgaacattcttag

SEQ ID NO: 99477 - DNA, 208 bp, Oryza sativa
  Clone ID: PAT_MRT4530_97285C.1
catcagaggtgtcattcgccaccatctggcgtggctggtgctaatttgtgctcatggcgggttgcagctgctcaggatcaacaagcaccaaaaactgatccagtcgaagatgatgtcgtctcagacacagaggcactccatcaccaccgccctcggccgcctcgacctcgccgcgcagccgcgtttggatgtccggccgccgcactag

SEQ ID NO: 99478 - DNA, 141 bp, Oryza sativa
  Clone ID: PAT_MRT4530_97286C.1
ttccggcgccctcctactgcatcggggcatggcgctcgcccaggatggcctgcggtgtgggtcgcgcgcttcagacgcacacatcccattatctggggactcagttagcattcggccaggtgcaagttgttcccaccactc

SEQ ID NO: 99479 - DNA, 318 bp, Oryza sativa
  Clone ID: PAT_MRT4530_97287C.1
atggccaagttgatcccgtgcaacacggtggtacagacgaagaagacgcaggtattcaccacctataaggacaagcagatgatggtgaccatccaggtgttcgaggacgagcaaagcatgacgagggacaacctgctgcttggcaagttcgacttcaccggcatcgtgttggcgttgagagggctgccgcagatcgaggtgaccttcgacatggacgagcatgtcgatacccgaaacaacctggaggcctacgtctacaacatcaagaatgcagtggacggcaagatggcagatgccgtggagggggaggagaagtag

SEQ ID NO: 99480 - DNA, 364 bp, Oryza sativa
  Clone ID: PAT_MRT4530_97288C.1
gggaccaaatttccccaccccgcagggggaccccccggaccccccggaagggccgggcgaacccggaaagaccgccaccaaacccggaggcgagacaaaagagacaatgggggaaaaaaaaaaaaccgggggaaaaggggaaaaagagaggccccccgggaaaaacaaaacgagaaaaaaaagcaaaaaaaaagggaggcccaagggggaaaggaaaaaacgggaaaaacaaaaaaggaaaggccaaaaaaaaaaagggcaaacccgaaaagccagcggttccaggggaaaaccccagggggccgatgcgttaaaagaagggagaagcccacgggaagggcccgtttcacattgggcccccggg

SEQ ID NO: 99481 - DNA, 1044 bp, Oryza sativa
  Clone ID: PAT_MRT4530_97289C.1
atggagctcccacaggacattttgatgagcatctttagcaccctggagatccttgacctcattcgggccggttccgtctgcaactcttggcgatctgcgtacacaagtatatgcagccttggacactgcaagccgcagcagacaccatgcttgctgtacacatttgagtctgacagcaccaaggcgacaggtctctacagcctagcggaaaagaaggcgtacatgttgactctcctggatccggcattgcctagtaggtttatcatcggatccagccatggctggattatcaccgccgacgagaggtctgagttgcaccttgtcaaccccatcaccggcaagcagatcgccctgccacctgtcaccaccattgagcagctctcgattgcgaggtcaggggatgataagtggacctggctgccgccacacaaagactatgaggactgcatattccgggatgggttgttgtatgccttgacgtcagaaggagaaatttatgagtatgatctcagtggcccggcaatcacacggaagatagtcctgaacaaggtgaagggctttacgtgcgagaacatgtacattgtccgagctccgtgtggtgatctattgcaggtgtggagatcgtacgatccgctggatgacgaggatgaagatgcatcggatgacctcgaggcagaccatgatgatgagtcttatgtttggaataccaccatgatcaaagtacacaaggttgacttggtagcgagaatgctcgtggaagcatgcgacttgggtgagaatgtgctgattcttgggcacaaccaatcgctttgtctccgtgctgatgaatatcctctgctgaaggcgaatcatgtctacctcagtgatgatagagagctctatattaaaggatgcaagaatggctgccgtgatattggagtgttcaacctggaaaacaactgcgctgaggaaattgtgtcacctcagctttggtcgaactggcctccccctgtttggatgacacccaatgctagaaaaataagtttggaaacgcacagtttgtga

SEQ ID NO: 99482 - DNA, 557 bp, Oryza sativa
  Clone ID: PAT_MRT4530_9728C.1
ggtgccaattccggcgacgaaactcgacggggaaggggcggccggggtggagcttagcctcgcgaacccgacggcggcgacggcgcggtgcggcgcgaccctagcggcggctagcggcggccggagtaacggaaacggcggcggcgggggcgggatttcgccggccaacgtggggagtgggggaggagagaggggcgggattcgaaaattgaatcccggccatctcgggcgcggggcgcgggtgcgggcgggagagagagaggagaagtgggtgcgggagatgcggcacacgcgcgggcgtggctgacgtggcctggagaaggcggagacgtggacgcggcggcggttgcgggcgcggcggcgccggctggaggaaggagacgggcccgacaggtggggcccacctgtcggcgtcccggggagagagggaggggcggcttgggctggcccacaaggaggagggtgcgcgcggcggggtggactgggccgacggcccaagaagaggaaaaggaacaaacaaaaaacagcggaagactagggcgacgaccacaggcgct

SEQ ID NO: 99483 - DNA, 745 bp, Oryza sativa
  unsure (1)..(745): unsure at all n locations
  Clone ID: PAT_MRT4530_97290C.1
ggatcaaccacctatatctggtatcaggcccatcatcaaggagggttgatttattttgttggcattatgtattgtggttgatgccattgccatgtcagacacatcattagcatcaacaatgacatttatgcaatgtttgacttagtcagccaaccgaactataagatgggaatgatggtgttcgtgacgaaaatatcaatgcaattgctctctaaccaacaatgcctcttttaaattacgagactcgtcatatgcattcggtatataatggagtactctctccattcacaattgaagtataagcttttctaacgatatgcatttttcaatctggccaaaaattggttcggccttgtttttgagaaaattcgacagaataatttgatcgtggttgatttggttcaatcttctgttttacgggaaaaaaacaaatcacaacaaaatatcaagatagcgtcaattgtagcagttctaacttccaactcaacacaagaataagatagctacttgaacttcttttccaattccaattaattctgtcattttgactaaacgaggatgatagatgaattaattcaggttagtagatgagctcttgatcggtaagttcgtttgtttttccatctcgcacatttggagaaaaatattttggttcttctcgtntaaagaggagtatatgggtgtagaaaagtggttgaggaagataggaatacatggaatgctaatatttatagaccaggggagt

SEQ ID NO: 99484 - DNA, 423 bp, Oryza sativa
  Clone ID: PAT_MRT4530_97291C.1
atgccttctcccaccgcaacctcggtcgtgcctccacttgctgccgccagtgatcgtctgcacgacgccttccccgcctctgcatttgccaccgtcgccagccgtagctgccgtcgtcgcagctgcagccaatgtcgtcatcgccgtcagccaccgccgtcacctgccgccatctgccgccgccaacacgcctgccaccgccagccacgaccgtcgccgctgtccagatctgccaaaaaaacgccgccaccgtcgccgccaaattccgcagtgccgcgtccgccaccaagcacccccgccgccaccttcattccccactgccggctgctcctccccagatccggccgggcccggcacggatctgggcgccgccgctgccgctccgaaacggcgccccctgccgccgaacacgaggcgaggtga

SEQ ID NO: 99485 - DNA, 2010 bp, Oryza sativa
  Clone ID: PAT_MRT4530_97292C.1
tcagcttgtatcttgtggctctgagctgtaggagcttcgcttctgcttcgtcctctggagccaaccgttcttaaggtacttcacgaacggtgttcgccagtcctttgggtcctcgcccagttctgcctggtcgattgccatgatgtccaggctctcagtaggcacacttggtgcgtacaaagacctcaaaaaagatgcccggtgaatgtgggcccaaggttgttcgacaggcttgggttcaggggtgaatgccggcgtccattcggccacgaagtcagctaggacttgggacttgatagcagtgcgggcgacaaaatgcagatcgaagggagataactccgccgcccacttgctgagccgggggaagtcgtctttcgggcacaccttgttgaggtcttgccatgaggggcgggtgctttgtacggtcatgcggttcggcctgtacattgtgcactgccctgctaattgcggccaaatcgccctatgatgtagccgaaggctgaagcccctgaccacgatgacgcctgccggactaggcatcttgagcttgagatagttgtggtttgagatggctttgaacttgttcaaggttgcacggccgaagatggcgttgtagttgtatgggatgtcgacgacgtcgaagagtatttgctcttcgcgcttgttctcgttcgtgccgaacgccaccgccagttgtacttgtcccaggacttgaactgcttcaccaccgaaaccacgaagccaggctgctgcttgagtgagggctagggtgggcaagcccattatggcgtaagcttcggcgaaaataacatcggccgagcttcctccgtcaaccagaatttgccggacttcgaagcccgctacttcggccaagatcaccaaggggtcttgatgcgggaacaacactccttcggcatcttccggcccgaaagagatttgttgggcttgagcagcagcgatggaggccttatcgtactcggcttggattgcttgccatcgcttagaatcctcttcgccccttgcgtacccatcaatgatacgaagcaggtgctcaagtgtctgcggctccttgttggcgatttttcttttgagttcgccttcgagcagcccggccgaagcagcgttgatgacagacgcttcggttatgtcctttgccttggtgttttcgtcgccgtgagcggcttcgattgcggactcatagatggacagaaattccttcgggtccgttttgcccgagtaccgcggaacaggtgggaacttaaactggggtgggattggatgaatcttgattcccctgctcagcggtagccccttctcaccccctggcttgttcggcaccaggctgtgtccaagccatggcgacctggttcggcgcttgattggttccgaagcttggtgccgtcgcctgtggttggacggtcggtgcttgaatggcagtgttggggtcgaactgcggtccttggctccaaggcgaagcccctggaccaggctggttcgacggtagccaactgggtgcaccctgacttgcattcccttccggtcagatcgaaggggttgtacttgaaatattgtggggttagttgagctggtgaaggaaagcttgaaactgcgcttgccaggctgaaaccccttccaccatcgcctgtgatgtgcctgctgctgcccttccatctgacgaagcatgtcctgaagtcgtgccatgttctgacgcatggcctccatgtcagcttcggcctgcgcgtcgaggttggggttgacttgtgcagcggcgagcgcggtcgaagtcggagcctgctgtggcgaagcagcttggggcgccacctgttggctcgttgaaaggatctccgccctggtctggagcacccttgctgttgcagccgtgttcggcgcctgccccgtcgaagcggcaggagccgaaggtggtggttgcagcgcaggtgccgaagccgatggtgccacgccagcttcaacgtcgggcgccgaaggctctactacctcttcggcggccat

SEQ ID NO: 99486 - DNA, 403 bp, Oryza sativa
  Clone ID: PAT_MRT4530_97293C.1
cccaaattaaagtttcagggggggtatataatcatcaggcaagcccagggttccataaattaatcccaaggcagtttgattaaacagggggcataatcacatcgctttcaaaggaagggttttttaaattacaaaaaaatttgcaaaccccccgttgggggttccatacataaacgggattgggggaaaattaacccggggagggccctggtgtttaaaacaaggagggcccccccccctagaaccccgggaagggtcacggcccaaataaaaaccccgggggttcccccaacgtgggggtcaccggggggaaaccctccccccggcaaaaaaattgggctgtacccgccaacttttgcccccatcttgtaaaaaaatgggaacacccccttccccgggcttt

SEQ ID NO: 99487 - DNA, 1152 bp, Oryza sativa
  Clone ID: PAT_MRT4530_97294C.1
gcacgaggccccccccttttttttttttttttttttttttttttttgcactggacaactttcccatgaaatttatccattttcattttagctgaaagtgccacaatcaatacaaggaacaccaggatacattaccaatttaccacatgtaccacaacaagctgctgctaaacctgagtttttgcagctcatcgtagagagaaaattcagcattttcagaacagaaccaaatatgagtacaattagtgatctcaggcaaaacttgacccacatcatcaatagtatcagtgaactgagacatactaggagagtatgtttagtcactatcgtcatcttcctcccgctcttcatgctgggcgacaaccttttcgatgaacttcctgcgaacgccttctatgacattgtcccgggatgaatcaccgccgctctgcccatcattcaggactggctctgactggcaaagggccaatgcaacagactcaggtgtgcatctttttccaccaaacttctgcagaccgacataagtccctttaacagcactgttattgtacacaagtatagtagggacatttcgatctgggtagttgggaatgcagtctgtagagatgattttaacaaacttagttgctgggtatcttgtagccaattcatccagacaagtctgaagcaacccacattctggtattccatccttgtagaggaagaccacaacccagacatcggatggggcctgggagacctctcggacaaaatcagagccagtgataggcacaatagagccgaatttcgcggcctttgctgcctccctgagctctgcaagcctcatcctcctatactgctcgaggaagcggtcgtcgtcgaggtcgtcctcgagatcctccagctcgtcgggctcccgctcgtcgagccattccttggacttgggctgctcgtcggcgtcgaccttgggcgcgtacgccggcggcttgaacggctccggcttcggcggcaggttccccaggcgtcgctggatgtcgtcccactccgtgctcgccccctccacgtccttgtacacgaagtggtagtccgccatggccgccgccgagagatcgagagagagacgcagccgccgcgagatgggaaagacgagaagagcccggccgatagaaaagtt

SEQ ID NO: 99488 - DNA, 1111 bp, Oryza sativa
  Clone ID: PAT_MRT4530_97295C.1
atggtgtcctcccatgcagccatcgtcttcttcctcgtcgccgcgtcgtcgctcctctcatcggtggcggcggactacgggtacccggcggactacgggtacgcggcggggagcaagctggggccggagaactgggggaagctgagcccggcgtacaagctgtgcggcgacggcaagaagcagtcgcccatcgacatcgtcaccaagcaggccatctccaaccccaacctcgactcactcaaccgcacctacaccgcctccgacggcaccctcgtcaacaacggcaaggacatcttggcaagccatccagacaaggtggggacggtgacggtgaacggcaaggtgtacagcttcaggcgggtgcactggcacgcgccgtcggagcacaccatcaacggggagaagcacccgctggagctccagatggtgcacgctgccgccgacggcagcctcgccgtcatcgccatcctctacaagtacggcgccccggactccttctacttccagctcaagaggaagctcgccgagctcgccgccgacggctgcagcttcggcgaggagaacgcccaggtcgccctcggcctcgtccacctccgctcgctgcagaagcggacggggagctacttccgctacgccggctcgctgacggcgccgccgtgcaccgaggacgtcttctggagcgtgctcggcaagatcaggcagatcagccaggagcaggtcgccctcatcaccgcgctgctccccgccggcggcgcgaggccgacgcagccgctcaacggccgcaccgtgcagttctacaacccgcccaacagcaccatctccttcaaggtctagtagccccaggcccaatgggctttggcccatttatatatactatatgggttgcattgggctgcacaggccctgaaattgattgaaggatctcaatttttgagatttttcttgtttctggagaaaaaaaattcatgtactgttgcttagataggcccttatctatagtatagtaacatatgtatatgaatttaattttaggatttggaaacatggttgcttatcctcacttggaattaggcttttaaaagtcgagcacatgtgcacttgtttttcattc

SEQ ID NO: 99489 - DNA, 487 bp, Oryza sativa
  unsure (1)..(487): unsure at all n locations
  Clone ID: PAT_MRT4530_97296C.1
cccacgcgtccgcccacgcgtccgcttcccagcttcgaattgtaagagaaaatgggattatgtcatctgccgactcggcatggaatcctggaggtggagcttcaaacaggatgaagcactctgtttctactcctaatcttatgtctggtgggtcctctgttcaggcactaagtacatctaacggtggcaataaaaaacaacagccaccacaaagcagccaaacattgcctgctgctgatgatgttcgtgctgccaataagaccctggttgaaagaatgcgcagtgctttaggcatggatgaagataggtactctgcatttaaagaaatcgctggtgaataccgtcaaggcatcattggtacttcagaatatctttcatatgttgagcnaattggtctgtcacaccttgtgcctgaaatggcttaggctgtacctgatcctcagaagcagaaaagaacttgctgatgcctatcacaccaatatacgct

SEQ ID NO: 99490 - DNA, 805 bp, Oryza sativa
  Clone ID: PAT_MRT4530_97297C.1
ggttttgggccggaattcccgggtcgaccccgcgtccgattacatactgtccggaaaaaggccttcagattaattagcagcaatggtgtcctcccatgcagccatcgtcttcttcctcgtcgccgcgtcgtcgctcctctcatacggtgaggcggcgccgaagatgacggcggtggcggcggactacgggtacccggcggactacgggtacgcggcggggagcaagctggggccggagaactgggggaagctgagcccggcgtacaagctgtgcggcgacggcaagaagcagtcgcccatcgacatcgtcaccaagcaggccatctccaaccccaacctcgactcactcaaccgcacctacaccgcctccgacggcaccctcgtcaacaacggcaaggacatcttgatggagttcgagccagacaaggtggggacggtgacggtgaacggcaaggtgtacagcttcaggcgggtgcactggcacgcgccgtcggagcacaccatcaacggggagaagcacccgctggagctccagatggtgcacgctgccgccgacggcagcctcgccgtcatcgccatcctctacaagtacggcgccccggactccttctacttccagctcaagaggaagctcgccgagctcgccgccgacggctgcagcttcggcgaggagaacgcccaggtcgccctcggcctcgtccacctccgctcgctgcagaagcggacggggagctacttccgctacgccggctcgctgacggcgccgccgtgcaccgaggacgtcttctggagcgtgctcgggcag

SEQ ID NO: 99491 - DNA, 632 bp, Oryza sativa
  Clone ID: PAT_MRT4530_97298C.1
ccggccgggacttcagatctccattgctagattttctatctcacattttacctgatttctaaccttcgatactatcctcgctgccgtgcccgcgacactcgactgtaaggattacaccgatggtctccctaggcatactggtaccaataccctcagtactcctctgcacgtcgccagaggtcagaactttgacgctggctgggtcaagtatgaccgtgttgtgaaatgtaacgaccagtctgaaggtgttgatgaaggacactgttttcgtcctcgaagaaggagccaagctacgcaatggcatcattggcgccaatcataaagaaggcgtatactgcaaggcttcatgcactcttgaattcgtgtggtgtgaagacgtatgctaggacgtcatctccatcaagggagctggcacagacgacatcatcgtaggtgtcgcttacgaggccgccgacaagatcatccatcacaacggttgtggtcacatcaacattatcaacttctacgccaatgactacggtaaggtgtaccgatcctgtggtaactgcagtgcaaactgcagacgctccgtgcacatgcatatgacaactgctgtcaatggaggtgagctcatggacattaacctcaactac

SEQ ID NO: 99492 - DNA, 187 bp, Oryza sativa
  Clone ID: PAT_MRT4530_97299C.1
tcatccgcctccgcctccgcttccgccgacgatgcggacgccgatctcgcggcgccgaaggaggaacacggcagtggtggacacggcgacgacggagcggaagaggaacacggtggcgctggggcccaccagcaactccgccgtggcgcggaagaggaacacggtggcggcggatcgggatttctag

SEQ ID NO: 99493 - DNA, 590 bp, Oryza sativa
  Clone ID: PAT_MRT4530_9729C.1
ctacatagcggcttgtcggtgatatgggaccgggagtatcatgaccagaggcttgaggcagacacaatcgcccacgtggcctggcaccttcggggacgtcgggcccgagggtgaggtgtccgccctcctcctgatttcccccgaggggggggtcgggttgcgcttgccccggccccgagggccgaggcaccccgacccagcgcgttcctttattcggttggcggtctgacgcacgccttaccccatcccgtcaaggtgtgagcttctaagcactcgtccccagctggagctagcgtgttacatcccagagatggcacgttaaccccgatcgatatataccaggcttcatccggtctggcactggtcgcgtcagcaacgggcagccacgatcccacgttgcgcctgtctccgccgggagtggaggtaggtgtgggctgtatacatcgccgtgtcttgtgtgtcttgcgggcagacgatctttccagatacagagggagagcgagagcttgagatttcaccctaagcccccggccgaaccggcaaaggggggcctgcgcggtctcccggtgaggagccacgagctccgtcat

SEQ ID NO: 99494 - DNA, 657 bp, Oryza sativa
  Clone ID: PAT_MRT4530_972C.1
atgatctcgtatacaggccagcacgtgccctcccgcatatcggctcgaccgacgacactcttgcttcaaggcctcatcgatatgcttgccgataccttcaagctgggcgtaggccccattcagccacgagatgtatccagccgcaaattccttgggatacccgcgaggtactcggagttccttgcaaactcccgccatggctgtacaacaactccggaggtacgagttgaaccacacctcgcgacctcgaagtgcttccacggcccgatccttcttcacttcttacatagtcccctcgagttctgccacctcaaacttcgtccttcagtattgcatgcgatgatctcggtcggcaagcacactctcgagagcgaagggggtggaaacaaaaaggaccaacctaaggaagtcatcgccatgcccgtttccacgggcagattctggtccacgacgtcctgtggcacatacggctcaagcgcaaagtgccggcacgagtacaggcaactcaggctgcccgcgctgctggacatcctcgacatcgacatctctacacacaatagcaaagtactcggaatcaaaatgctaaagaaaactaaggtgataactgcacacacaaaggcagttggaaccgacgaaagttttacagagcatgattga

SEQ ID NO: 99495 - DNA, 2471 bp, Oryza sativa
  Clone ID: PAT_MRT4530_97300C.1
atagctttcaactacctcaccacagccatcttcctcctcctccttccggcgtgcgtagctgatgaccagcttgtccccggcaaacctctgtccattggctccaccgtcgtttcgaacggcggcgccttcgccttaggattcttctccccgaccaactccacctcgtccaatctctaccttggcatttggtacaacgacatctcgccgctcaccttggtctgggttgccaaccgaggaactccggtgaaggacggcggccatggcagctcttcctctgcaccgtcgctcaccctgtcaaactcctctggcctcgtcttggccgacggcgacggccgcgttctttggactacggacatcaccattattgcggcgaattctccggcggttgcagtgctgatgaacaccggcaacctcgtcgtccggtcgccgaacggcgccacgctgtggcagagcttcgaccacccgacggacacgtacctccccggcatgaagatagggatcaactacaggacgcgagtcggcgagcgcctcctctcctggaacgacggccccggcgatccatcgccggggagcttctcgttcggcggcgacccggacacgttcctccagctcttcatctggaaccagtcacgcccgtactggcgctccccggtttggacaggcaacccgatccccagccagctgatggtcaacggcaccaccgtgatctacctgtccgtcgtcgacgccgacgacgagatctacctctccttcggcatctccgaccgggcgccgcgcacgcggtacgtgctaacaaactccggcaagctccaagtcctctcatgggacggcggcgacggcgcgtcggagtggagcaagctcggcgagctgccgaaatacgagtgcgaacactacggctactgcgggccatacggttactgctactattcggaggtggctccgacatgcgagtgcctcgatgggtttgagccgaggagcaaggaggagtggagcaacggccgtttctcgcggggatgccggcgaacggaggagctgccctgcggcggcgacggtcgccggaaggaggcggcgcgctgcggcgacgggttcgcggagttcccggacatgaagctgcccgacgggtacgcgctcgtcgggaacatgaacgccggcgagtgcgcggcggcgtgccgccgcaactgctcctgcgtggcgtacgcctacgccgacctgagcaggagcacgaggagagatccgaccaggtgtttgatgtggggcggcgagctgctcgacatggagaaggtgaacgagagctggggtgacttaggcgagacgctgtacctccgaatggcaggtgcaggtaaataaatctattcagatatatggcattatcaattttttttagactggtgctttctcaatttctcactgcaaaatatgtattgagtgtctctgatgaatttgggaaagaaatccctgcccaagatcttgattttccgtttgtagaatataacgagattgccactgcaacagaaaatttttctgacgcagctatgaatggaaaaggaggttttggcaaagtatataaggtaaaattgataggtggtcgtgaagttgctatcaaaagacttagcaggtgttctgaacaaggagtagtggaattcagaaatgaggtgctcctaattgccaaattacagcacagaaaccttgttcgacttgtcggttgcagcatcgaaggagatgagaagttgctgatttatgagtttatggccaataagagcttagatgcttctcttttcaatagtgaaagaaaatcatcattgaactggtccacacggttcaagattataaaaggggttgcccggggcctgctttacctccatcaagattcaagattaacagtaatccatagagatctcaaggcaagcaacattttgctggatgcagaaatgaacccaaagatatcagattttggcatggcaaggatctttggggacaaccagcaaaatggaattactaggagagtcgtcggaacatatggctacatggctcctgaatatgctatgggaggtatcttttctatgaagtccgatgtctatagctttggtgtgctgcttttggagatcgtaagcggttctaggataagctctactgatttcattgaggacttcccaaatctttcaatatatgcgtggaacctatggaatgaagggaaggcaaaaaacatgattgacccatctattgtggcaagttgcctattagatgaggtcatgctatgcatccatgttggactcttgtgcgttcaggaaaatctaaatgataggccactcatgtcatctgttatgcttattttggagaatggaagcaattcacttccagccccaaatagacctgcttactttgcgcaaagggatatcgaaatggagcaaccaagagatgacactcagaactcaaacaacacagtcactcttacagttatggaggggcgatag

SEQ ID NO: 99496 - DNA, 357 bp, Oryza sativa
  Clone ID: PAT_MRT4530_97301C.1
atggccgccaccacctgccgcctcgccgccgcgccgttcgtcctcgcaccgctgcctcgccgccccaccacggtcgcctttgccgtcgccgccaccggcatcaagcagtgggccaaagttgaggacaagtacgccgtcaccgccatcggcgtcgccgcgctcgtcggcctctggactgccataggcgccatcaaggccatcgacaggcttccacttttgcccggcgtgcttgagctcgttggaatcgggtatacagggtggtttacataccggaacctcatcttccagccagacagggaagctctggtgagcaaaatcaagagcacctacaatgaaatcaccgggagcagcagctaa

SEQ ID NO: 99497 - DNA, 919 bp, Oryza sativa
  Clone ID: PAT_MRT4530_97302C.1
cccacgcgtccgcccacgcgtccccccacgcgcccggcgaggacagacaaacagatcaccgatcgatcacgcgtccaccgccgcgccacccgctcggtcaccccaccatggccgccaccacctgccgcctcgccgccgcgccgctcgtcctcgcaccgctgcctcgccgccccaccacggtcgcctttgccgtcgccgccaccggcatcaagtacggtctcagggcgtcgaggggcgtggcgatcagggcggccgacggcaccggcagcgagacggaggtgccggaggtcgtcaaggcagcccaggacgcgtgggccaaagttgaggacaagtacgccgtcaccgccatcggcgtcgccgcgctcgtcggcctctggactgccataggcgccatcaaggccatcgacaggcttccacttttgcccggcgtgcttgagctcgttggaatcgggtatacagggtggtttacataccggaacctcatcttccagccagacagggaagctctggtgagcaaaatcaagagcacctacaatgaaatcaccgggagcagcagctaatttcataccattttcgagaagatttctgtaaatcagagagcagcaggactgcatctgtcggcagccatgccagtgaagaggaggttgctaacgttttgagactggtccctccattatttccatcttatcccctggctcaaagcagacaaaatactattattgctgatgagctgctcatgtacctattttaattcaacaataatgaaatatgttttcagtttccgctcctgacaactgcgtactacaaacatcattacatcaatgtggggttcccaatcacctgtattttcttttatcgaattcaatttgaagcccgttggcatgagaagttaatgataattaagaaaaaaaaaaaaaaa

SEQ ID NO: 99498 - DNA, 498 bp, Oryza sativa
  Clone ID: PAT_MRT4530_97303C.1
atggccgccaccacctgccgcctcgccgccgcgccgctcgtcctcgcaccgctgcctcgccgccccaccacggtcgcctttgccgtcgccgccaccggcatcaagtacggtctcagggcgtcgaggggcgtggcgatcagggcggccgacggcaccggcagcgagacggaggtgccggaggtcgtcaaggcagcccaggacgcgtctcagtttctgcttcagttagttgtgaggccattcctgtgcaattgggccaaagttgaggacaagtacgccgtcaccgccatcggcgtcgccgcgctcgtcggcctctggactgccataggcgccatcaaggccatcgacaggcttccacttttgcccggcgtgcttgagctcgttggaatcgggtatacagggtggtttacataccggaacctcatcttccagccagacagggaagctctggtgagcaaaatcaagagcacctacaatgaaatcaccgggagcagcagctaa

SEQ ID NO: 99499 - DNA, 1826 bp, Oryza sativa
  Clone ID: PAT_MRT4530_97304C.1
ttttctttttttttttttttttttttttgtaacatgagctctactttaatgccatgagtttcgacatacaacagcatctagttagctgaagttaagaagctcatgataatgcacaaaaaggacttgttgccaaaagactgatgacaacaaggaatatgcacaacatatttacaaactaccaaataccaactaatgacactcacattctgccttgctaatgggagcggaccaatgctgttggattcggaccaatcttttcccgagtttctcccaagcttttccgacgaggcttaccgctgttcttgctagcatttgcagtaggggcttttttgcctgtacctgtggtggattcttgacgcctctctgctgctggtttcctgtccacatggctggattcttgaagctcttcaagaatagtgaccacagcttccatagaaggcctcatcttagcttcgtacgacaggcactcaagagcaagggtggcaactgtttgtgctccaacgtgagagtattgaccttctagcctggtatccaggacacggaatatcttgcgcttatgtgtgaggtatggtcgggcccattccacaagattgtgttcaccctggggccggttcttgtcaatggcacgacgacctgacatcatctccagcagcaccaccccaaagctataaacatcactcttcgcagttaaatggcctgttgaaagatattctggagcagcataaccatatgttcccatcaccctcgtggatacatggctcttctcaccaacaggaccatcctttgccaatccaaaatcagatagctttgcagaatagtctgtgtcaagcagaatattggaagtcttgaaatctcgataaataacttttgcctctgaactgtgaaggtaagctagtccttttgcagctccaagtgcaaccttcattcttaggttccatgaaagaggctggaaatgcgaacctctcctaaacagatgattttccaagctcccacgtggcatgaactcatacactagcagtcgatgctcatcctctaagcaatacccaaatagcttcacaaggttgggatggcaaaactgacctaggtaattaacttctgccaaccattctcggtgcccttgcaaactctcctggttgagtcttttcacagcaacagcaattccagtgccaggcttgcaagcagataatgtattctcatcaatccatcctttatagacagatccaaaccctccttcaccaagtacactgtcaggacggaagttccttgtggctatcctgagatcactaaaactgaagatcttcacattggctgactgcagtatctcacattcagttttcgcagttggaggcatggaagctgaagaggctcgactactgcagccactaagcctactcccatctttagcaccactccttgagaacatcccagaggctcccggttgcgggctcccatccttgatccgcgcgccccacccacagcaattccccatccccctccaacaagcgactcgcccgcggcgccgagccccagtcaggatcgaaccaaccctcccgccgtcccgacccggcggcgccgcatggggtgaggggggaggagagctccacctagggttttgggggacaccaagcgcgaggcggaggcggaggcggaggcgttggctatatagcgacgaggacgaggtgcgctcgctggcgagagatgtggcgtgcggcgcgtgaggtgaggcgagcgagtgaggagttaatggcgggggcaagggaagcggccaagcggagagggagagggagcgaggcggcccgcgcagccacgccgctgctgctggctgc

SEQ ID NO: 99500 - DNA, 154 bp, Oryza sativa
  Clone ID: PAT_MRT4530_97305C.1
caccattgtgttgatagtggtgaataactgtagctggaatgccggtgactttggctgatgggcaccagaagaaacgccatgatcacatgaatagatgtggtctgaaataaataaaattatattttcccctgaaaaaaaaaaaaaaaaaaaaaaa

SEQ ID NO: 99501 - DNA, 495 bp, Oryza sativa
  unsure (1)..(495): unsure at all n locations
  Clone ID: PAT_MRT4530_97306C.1
gaggaaggtgaatgagaagcggtggcctataggtgtttgtggaatgaagtgagcattnttttgtggtatggtaggaatagggcttgctttctgtggtggccctagctcgggctgtagtatgaacgtagtggtggcttggatatgtagtggtggaaggggatacgtagcaagtattcctagcctatatcctatatacctggggttgctagctgacctacttgactgttttctagtctgcgttacctatcagggcctacccttccctcctatcgtcttttttataagtatctatactgttgtctgtttctgttgttttgattctccagtgcatatatttagctatgtacattaacatcttgctatctagtttatatatggataggcttctgatagtatacttgcgtctgtggttctataagctgtatgcctatctactgtgctagtataatatgaatactatatacagttactatgtgaaaaaaaaaaaaaaaaaaa

SEQ ID NO: 99502 - DNA, 665 bp, Oryza sativa
  Clone ID: PAT_MRT4530_97307C.1
ccgggctgcaggaattcggcacgagggtcacatatggattttagaggctgccaaaactcttttttcaatcacacgaacttctactcatttgacttctataaatataccatgcctactcgatactactcatataactctagaattatatagtaaactcaaaattattaagcaaaaaaacaaatataaaacaataagtttacattaattttccttctttacatatactatgcatactcgatactacttctataactctagaatataaattaaaaccaaaattattatgaaaaaaattcaaaatattaaaaatttaatagtttgtttatgaaatcttcagttatggcataaggtgcatctagaataacatcgtgcacccatttttacagcacgaaccattatcaacatacgtactaggaaataaaacatttaaacaaatcattctaactttttttcgagtaaaaaatatggatatatgatagaaatagaaaaagaaaatataatacctagtctgccatcctataatccggttttcctaaactacaaactatacattctgtagcagaaaacgaatctcataatctgttttttcttattatctcgccgcatgtggcttgcgcatgcgcatgattaacaaactcgtaacaacatgatctcaacaatctctc

SEQ ID NO: 99503 - DNA, 233 bp, Oryza sativa
  Clone ID: PAT_MRT4530_97308C.1
gcacgaggttcgtctccaacccctcgccgccgccgccacccaaaaccctacccttcccctccccgtattctaatggcgctgcaaccaatccggcacagctgctagcaatcgactcccatcatccgcgcgcgtcgagtagctccgtgaacctaccgcagcctctcctctctctctctctctctctccggcgcccccccgcccccccccccccccccgtctcgccatggcgaccc

SEQ ID NO: 99504 - DNA, 529 bp, Oryza sativa
  Clone ID: PAT_MRT4530_97309C.1
gacatttttagtgttcaatgaaaacaaagtgccaaatttgcaatcgcaccttgagaatatcgttggcgagaattatttcctgaatcagtcagctaaagaggcatacagatcctacatcttggcatacgactcacactccatgaaagacatttttgatgttcataatctcaatctgaaggtacactgcttattgaatttctttctgaaggatttttggttcccctgtgcatgaccaattgttacccattatatgctttgttgtattggacattcaattcacaacaaatgctcttcattttggcatgttccaaatcttttaagtgtcaagtggagtgtctgttgttttttcttcaattttagtagtatttagctctcttgagagaaaatggtatgtgctaggtaagtgatgataatttatcatctttaacttttatataaagtatgtgctaggtaagtgaaggtaatttatcatctttaacttttatataaactaactgaattcttttgcactttttactgagctagatta

SEQ ID NO: 99505 - DNA, 3623 bp, Oryza sativa
  Clone ID: PAT_MRT4530_9730C.1
ctcccgtgcccggctagctcccctccgctataaaatgggatccccttccaccgttctctcgttttagcctcctcccgcgtctccccgtggtcgcaccgcctcttcccaccgccctcctctctctcccgtgccgccggccacttccagccgcctccccctcatcgcccgtgcaccggtaggccgtgtcgtcgccatcctcggcatcgcaaccgcctcctctcccccagcctgccctccgtttcgcacggtgaccaccggaggcgcgtcctcgtcgacgtccagtggcgtcgccgccactacaccgcctccggccgcctcggctgccgcgcctgagcctcggtcggccgtgccgtcgcctccctcagctccgcggcgtcgtcctcatccccggccttaccatctcctcgcccgaatttcgcccgaacgccgtcgtccgcgccgcccctccctcgttctcgtcggcacccactccggcagccccttccgcctagccagtgcgccggccgacgtcgccgtctccaccttcgcgtcctcgccaacgtctcctccggtcggccgttcctctccgtcggctcgtcgtcccatggcgccgcctccgtcgtcggcaatgcagtggcgcgttccacgccgttctcgtctccgtgcagctgctgccggctgcccttgtcgtcctctcgtcgttcccgctcgtcgtcggccctcccttcgtcaagccgtgctcgttcgtcgcccgcgtttcgtcaagagtgcgtcgcagccctgtcgccgtcttcgtccttggctccgcgtcgtcaagcgttgcgccggctgcgtctcgcccatgtatcggtgtcggtagtcgttcgtatgtgcgtgtggtgaccgtgttagtgtgcccgctcggtagccgcgtggtttccacgtgtgcagcccgcgtggtgtctagtggagtacgtttgtcggccactcacctcggttgacacacggggtccgcttctgttgacccgtggaccgtctctgtgtacccggttttctttttatatactgttattgcttctttataggcttgtagctttgcttgtgtgcttcgtgtagcttctttcgttccggaggttcccgaagcgtggctcgtggtcgtcgccgaaggttcagaaggccgttctctctctccccctctattcaaactcctaaatggttgtaggctgggctcgaggtgcatggttttgctaggagcacctcggccaccataaggaccggtcttcgggcctctgttgcaaagcactaccgtactaaccatatgtctaatgggtaaggcttaactcggtgctcagtctagtcctgaacaaaaggacacggatagagatggatgaagtcgttgcgacgatggatatctctgaggcaaatgaaggctacgcgagctgcggctcggtaatcgagatgtctaggcaaatgaagactacacgggtcggtgcccgggctcaaccctggcctgcctgtcccgggataccggccgtaggcagggttgggtcggtacttttgttcacggctaggatgggtgaatggttatgtcacatctttacgacgggttccaaggccatggaatgcggagtaaagatgtgtcttgtgggttggcctgggttggcttgggacgagctgggacccaggtcgggttgccagttcggtccgaatcatcgtaggccttgggttaaggcagtactagatggtcaggtcagtgaagaagaagacatcgtcagttgttcgccgaagctccggaagactgcaggatctgctagtgaagtggaggaagcagtgaagccagctgtgaagcaggacaaaagacttagatctgttaaggtcctatccttagtttctaatctgtctctcccctttgttttccctctctccctatccaaacctttgcaacagatggctgacaatgagaaaggcaataaggtcagaagtcaggacattggtacctcaagctctcgagtgaatgaagcaccagacaccagttgtgtggcagtggtccaacacctgattaaccagaacaaattgcttatagagatactacagcagcatcggatgccaattttgaacccgagtcagatacaacctcaagtgcagttggaggcagtccaagcactcacaccacaagtcagcgcaccgccaacatcccagaaggcccctcatgccatgccacatgttgacccaaaagaagcaagtatcatctgttttatgtgtgatgagcaagggcactatgcaaggaactgtcctcagcagaaaagaaaagcaccaatgcgaaccgaagatgaagtccgtaagatgatcattaccagcacagaatggcctccaccaggaatgacaaaatgtcagagaagaaattcctcccgaggtgcacaacagttgacagagcatcttttagctaatggaggtagagtgtctggtagtgaagattcagatcaagtctcctcagatgatgaagatgagaagtctccccaaggttttaaccagaataaaatagaacttaaggcatgctctcgttgtggagaaatcggtcatgttgccagctcgtgtgcctctacatgcgttcattgtgaggaagaccatccacccgataggtgtccaacgagcaggatcacttgtttcttttgtgaaggaactgatcatgtaccaaaagattgtcgattcagttttctgctgacgaagaagatggccaaccaacccgtcagttccaacggagagaagcatcaaggaaacacaaatcctcgccaagattacagtttcagcctaactccagtgccaggacagaggaaacaaaatgagaaaagaaaatgccgagtccgggaagatatctgttgcttcaattgtcaaggaatgggtcatttcgccgacaagtgcccaaaaccgagaaacgtagctgccagcacgtcagtccacgcaaacccccgcaatcagaagcttgctcctcaacgaattgtcatccatgcatcccgaagcagtcctatagcccgcgttgcaacagctccaattccaatgagtgcactaccacaaggtgtcaatgctcaatttcagccccagccaccagctgacaagacagaggccagtatctgcgttgtacctttggaagttccaatacagcagctgagaaatcaagtacaagatgaagaacccgagtgtaagaaagttattgtttgttacaactgcactgaagaagggcattactccaaaaactgtccccaaccaaggcaaaatcgacctccacattaccgccaatttacacgaagcagacattccaatcgtattgtggtcactggagcaaacgccgtaccaaagagtgaaatcttcaactcggtatcagatgctacacggagtgaaaagtgcaagcaccggttaccaggttgacgccaaagatatgaatgataagaagttctagaaccgaagccccatcctcaaccaccgcagcctagtctgggtcagttagaagttcaaccagggacaagtcgggtgaagagaagattccatctgcaacaggagatcgagccaagcgttccagagtggagaagttttgttaggcaagttggttatagaagacggagcggaagaagtcagacaagaagagaagaccgcccaacctatcttcatgc

SEQ ID NO: 99506 - DNA, 1429 bp, Oryza sativa
  Clone ID: PAT_MRT4530_97310C.1
atgcggccatcgccggcgctcgccggcggcggcaggacggtcgcaaatcttctctccgccacggagtggatgcttccttctccggccacccaagtccacaccatctccgtcctcccctcccactcaccgccgtcccctcctcaccacttcgcgttctccaacctcaccaccgcgcctaagcgcaacggaggcaagggggaagaggagggccgcccaaggttcgaggtggtgcgcgacgatctcctccacccgctcgccaatggcaacaaggcccgcaagctcgacgccctcctgccgctcctgcgccgccgcggcgctactgacgttgtccgtgctcaccgttgcattccccttcacccagccttgatcacatcttgtttttcaaatctgatggtgacttgtgggggttgccagagcgcccatgctgcggccactgcggtccactgtgctgagtggggaatgaggccacacatattgctgagaggtgaacagccagatatcccgacaggctacaatcttatctctttgatgtttggcaatgtggcttatgcctctcggtcagtgtacgcacacagagatgaaatgctttacaatcacgccagaaaagttgcaggcacaggtggtacagtgttgtgggctgatgatattagcaaagaggattttgttttagatgaagataatggttgtgaaattggttcgagaagagtagttattattaaggaaggggctggtgacgtccaagcattgctaggtgttattcggctagtggagtacctttacaatctgtcgtcatttcataaacatgagaatgttcatgtcgtggtagatgctgggacaggcacaacagctgtggggttagctcttggagcggtatgtctaggattgcattggagagtaactgctgtcatgcttgctgacacactcgaaagatataaagaacgagagaagtccttaatatctgactttaagaagctttgccataacaactaccatgaaatggtgggagaaaatgatattggtgacagtttagttgaatgggtggaacgattttcaccaagacgatttggcaaggtgctgaacggtgaaattgcattatgccgccagattgcgcagcaaactggtatcctgttggatccaatgtacaccttagctggttgggagcaagctgtggatctatgtgttggagacagtagaaccaaagtggtgatgatccatacgggaggaacgcttggcttctgcggattggcgcagcggtactcatcgcacttcacctcggatgagcaaacttaggccctgtttctttcagcttagaattattataatccagattattgggagtaagctaaaagatagcttattataatctgataagctcatttaggtgagctttttctagattattgggtgaaaaattacccatcatgccacc

SEQ ID NO: 99507 - DNA, 238 bp, Oryza sativa
  unsure (1)..(238): unsure at all n locations
  Clone ID: PAT_MRT4530_97311C.1
gatcgatcactcgaccgaccatctcacaagcaaagcaaaagctcgtggcaacaatggcgaagtgggcggcgatcatggcggtgctgctgctggcggcggcgtgggcgcggcgtcggcgacgnatgatgcaacgtcgggcagctggcgatctgcgcgggcgcgatcatcggcgggtcgacgtcgtcgggntngnctgctccaacctgcgcgcgcagagtgggtgcttctgccagtacgn

SEQ ID NO: 99508 - DNA, 165 bp, Oryza sativa
  Clone ID: PAT_MRT4530_97312C.1
atggttggttatgtgatcagagtctctgcatccgaaaagagtagtaacatgtattgcatcgacgagtggcatatggcagaagatgacatgcttaaacacgtacaggaaaaagagcggtacacagcgcaccgaccaacaaaaaccaagtcaaaagctttggcaagc

SEQ ID NO: 99509 - DNA, 402 bp, Oryza sativa
  Clone ID: PAT_MRT4530_97313C.1
atggtgttaactgaagcacaaaatgtctcttatgcctttaatgatttgaccctattacatcgcaacgccacccctcctcccaccaccgcgccggctgccacgacctccctcctcacgccgcccccgccgctgctcctctctccgcgtgccggcgcccccgccgccgcctcctcctgctggctccccgcatcggcgtcggcgccgccgccgcctcctccttcccagtgccgcctccaccacctccttccccatgccaccgacgccgcggagatgtcaacgagagagggtcgggccctcctccccgcgccgccgcctcctcctgctcgctcccctcatcggtgtcggccgcgccacgcctcctccttccccatgcgtcatcccactgcggggcgcaggagctag

SEQ ID NO: 99510 - DNA, 1861 bp, Oryza sativa
  Clone ID: PAT_MRT4530_97314C.1
cccagcttacttcaatggagctcatcgtcctaccttcatacagctgaaaaaattccctcatatacaagataaaggtaggaggagggccgggagctcgacggatttcgatcaattgtggtttttttttttgtggtaaccgtataagagaggagattttgtttaacgtagctagatcatatctgagttgagttttagcaatggaggaccagaggctccagtggaggaagcccggctccttcctcctcgtcgccggcgtgttcctggcggcggcggccgctgtgtcgaacgccggcataggcgagttcgacgagcattgggagaagcgcagggcggcggcggaggcggcggcggaggaggtgtacaaaccggaccccttcaatgtcaccaacgagttcaaccacgctgtcatcagatcgacggagcgcggcgttctccggcgagagttgagtgggaagaacagcaagtacaaggggccgtgcctggcgacgaacccgatcgaccggtgctggcgctgccgcaaggactgggccaccgaccggaagcggctcgcccggtgcgccatgggcttcggccgcggcgccaccggcggcgtccgcggcaagatctacgtcgtcaccgaccccggcgacggcgacgccgccaacccgcgctacggcacgctccggtggggcgccatgcaggcggcgccgctgtggatcaccttcgccaagtccatggtgatccgcctcacgcaggagctcctcgtcgccagcgacaagaccatcgacggccgcggcgcgcaggtgcacatcgcgcgcggcggcgccgggatcaccgtccagttcgcccgcaacgtgatcatcaccagcctccacgtccacgacgtgaagcacagcgacggcggcgcggtccgcgactcgccgacgcacatcggcccccgcacgcgggccgacggcgacggcatctcgctcttcgccgccaccgacgtgtgggtggaccacgtctccatgtccatgtgcgaggacgggctcatcgacgtcgtgcagggctcgacgggggtgaccatctccaacagccacttcaccaaccacaacgacgtcatgctgttcggcgccagcgactcgtacccgcaggataaggtgatgcagatcaccgtggcgttcaaccacttcggccgtgggctcgtgcagcggatgccgcgatgccggtgggggttcttccacgtcgtcaacaacgactacacgcactggctcatgtacgccatcggcggcggcatgagccctaccatcctcagccagggcaaccgatacatcgcccctcccaacatcgccgccaaactgatcacgaggcactatgcgccggagtgggagtggaagaactgggcgtggcgctcggacggagacctgttcatgaacggcgcctacttccaggcgtccaacggcgccatcaacaggaaggtgaagggctccgacatggttaagcccaagccaggctcctacgtcaggaggctcacacgcttcgccggcgcgctctcctgccggcccggcgagccgtgctgatccgccggcgagatgacgtcacgtaggcatgcagcatgagcgaccacggagatcatcatcatcaagaaaaaaaatataatggggaaagaaaattaaacatttggacgacatagaagggtgacaaatggaagggtagccaggttaaatttcctgtccattttgtcttgaaattgagtgaattttggtatgttcgtattttcaagaggggccagggattatccacaacatgtactatctctatgtataatgtaatacagcatggatgtaacgattgctctttgcgatcaccaatgaccaaaaaaatgtaaaatattgttaatgtt

SEQ ID NO: 99511 - DNA, 273 bp, Oryza sativa
  Clone ID: PAT_MRT4530_97315C.1
atggcggcggcggcggcggcggcggcggccgaggtgcgggctcctgtgccctcccgccgaggatgggaggaggtcgacgagcgacggtgctggctcccgaggcctcccatcgtggatgggaggaggtcaaagacggtggcgtcgacgacggtggctcccaaggaggttaaagaaaacaacgacaacaacagtggttcccgagcctcctgccgtggatggaggaggtcaaagatagtggcggtgacgacaacggtggggtcggtgagacggtga

SEQ ID NO: 99512 - DNA, 1277 bp, Oryza sativa
  Clone ID: PAT_MRT4530_97316C.1
ttttttttttttttttttggaacaatgaaacgtgcaacatccatatgcattcattaaaaaagcgccatatatctacatgtttcagaaacttggcaagtgctccaaaattgtgcttcatcaaaatatctggatctccagcttcagaattcagttacctatcactaacacacctacacaggatgcccagaaggtatttcagatcacttagttgcagtgtgtttcgcctggaatgagcttccagacccatagaggtgttgaaagtctgtgcatggcttgcaggcataaccagcagaatgctcagacatgtcattattggcagtcctcttctttgcctgttttgctggataaggggtcgcaacgtggacatagccagaggattgcttagccatgtcattgtttacaggtgtcttctttgcctgttttgctggataaggagtcgcgacatggacgtagccacttctcttgccagttcctgcacacaagatctttgaaggagtctcttcttcatccgaactatcaccatcatcatcactagaatcctgtttatcaatcatatcctcatcatcatcatattcatcctcgcctgaagcatcactttcttcatcgctgtcatcatcatcagcttctgatttcccataattctttctttcctctacaatagcctctggtgtaggggatgcagcagcagcagacttaagtgtggcaaacttacttggactgttttgaacttctttgatcttatcatcatctgaattggggaatagtggaatagccagtggaacctcctcatcagattcatcaccttcttcagtaggagagtcagatgtgcatacagccaggcaaaaggttaaggaaaaatattccagatcaattgacaactgaggacgatgttcaactgaaagtgtgccgagcagaatccttttaccatcaacttcaccaaaaacttgcacgttctcattcagctcaccaggctctaacgctatctgtgaaatatgataatagaattctcctggtggatcacacatcactgtctctccaggtctgacagcaactcctccacggagcgctcggcgacgccggactccgcctcctcgtcgccggccacgctcgtggactcgtggtccgtccggtcctctccatgtctcggcgtcgaagtggaactcctgcacggcgacgttgaggaggccaccgatgtactgcgcgaacccgtcctggatggccgccttgttttcgatgaaggagaacgtcccgccggtgacctcggcgatggtgtgcat

SEQ ID NO: 99513 - DNA, 3924 bp, Oryza sativa
  Clone ID: PAT_MRT4530_97317C.1
atggcccagcctcgacggcgcggcggcggaggccacaacaagtgcccgcgcccggccctgctgccggcggcggcgctcctgctcttcctcctcgccgccgtcgcgctgctctacgtctccccgccgccgctcatcgatcacccggccctcgcttcctctcgccgccgctcccctcatgcccccctgctgaacagctccggcggcggaagcacggtggtgtccgagcacagcgagatttcgcgcgttccgataagcaaagaggcagatggcctttggggttctaagtttgcgagcagattctatgggtgcagcaactcaagcagcaggttccttggttcaagtgttatcacgcaaccagaccgttatttgatgatcgttacaagtggaggcctcaatcaacagagaacagggataattgatgctgttgttgctgcacgtatcttaaatgccacacttgttgttcccaaattggatcaaacatctttctggaaagatgcaagcaatttctctgaaatttttgacgtcgactggttcatctcgaatctatcaaaggatgtaaagattgtgaaagagcttccagagataggaggcaaactgcggactcctcatagaatgcgtgtgccccgaaaatgtactcagagatgttatgtgaaccgtgtgttgcctgcacttcttaagaaacatgttgttcggctgacgaaatttgattatagactagcaaacaggttggacacagatctgcagaagctgagatgcagagtaaactatcatgggttgagatttactggcctaatagaagaaatgggtgaaaaattaatacaaagaatgagagagagaagcaaacattttattgctcttcatttaagatttgaacctgatatgcttgcattttcggggtgctattatggtggtggagaaaaagaaagaaaagagcttggtgcaatacggaagagatggaaaaccttgcatgctatcaaccctgagaaaggaagaaggcaaggtagatgcccattgactcctgaagaggtggggctgatgttgagggcactgggctacagaaatgatgttcacatttatgttgcatctggagagatatatggcggggcaaggacattagcacccctcaaagcgttcttcccaaatctccacacgaaagaaacaatatcaagcaaagaggagctggctccattctctaaatactcatctcgcatggctgcacttgattttattgtatgtgatggaagtgatgcttttgtgactaacaacaatggtaacatggctaaaattttggctgggcgaaggagatattttgggcataagagaacgatccggccaaatgctaaaaggctctattccttaatttcgaacagaagaaacatgtcatgggattcattctcctcaagagtgcgcatggttcagaaaggatttatgggagagcccaaggaactcaggccaggaaggggagaatttcatgagaacccttctacctgtatatgtgaaaaaaccgttagcaaaacagtagccaaatctaactcccaatctgagcaagtcttaagtaatgatactgagagaggaatagccattcaaactgagcaagtctcgagtaatgatactgagatgggaatagccactagtgagcccacagttcctgatcatactgatgaagaggcaggtgaatccgaggcagatgaagatgctcctggagagaaagaggagataattgatcctgaagcggatgatgatgcgttcttcgggatatcgtatggttttgttgttactgaactaacttttctggagtctgtaacctccatggacgtaaataaccggccaaacaaacagaggtctcacctctcaacaagtcaagcctctgaagcttttgatcccttcacctcgcactcgcagcagcagcaggctgtactgaccaaccaccaagaagttgagattaaaaatggcatatttgagcttacgctgtccaaccccgacgggatcgtgaccggcgtccggtataatggtgtggacaacttgatggagattcttaacaaagaagacaacagagggtactgggaccttgtttggagtaaactgggagaaagaactggcatatttgatgtaataaaagggacagagttccgaatcatatatcaggatgaaaaccatgcagaggtctcgttcgttagaacatgggatccttctctggaaggcaaagctgttcccttgaacattgataagagtttgctgaattatgctacatcttacactgaatgtctgaatccattactttggtgcaaattcaggtttcattacatggcattagctgacgacaggcagagaataatgccgatgcctgaagaccgagtgccgccccggggacagcaattagcataccctgaagctgtccttcttgtggacccaataaatcctgacctaagaggagaggttgatgataaataccaatactcctgtgaagaccagtataacaatgtccatggatggatatcattcgatcctccaattggcttctggcagatcactccgagtgacgagttccgaacaggaggtcccgtcaagcagaacttgacctctcatgttgggccaactatgctggctatgtttcttagcggtcattatgctggggatgaccttacacccaagttcttgactggtgaatactggaaaaaggtccatgggcctgtcttcatgtaccttaactccagttgggatggaagtgacccaactctactctgggaggatgcaaaagttcaggtgataacattcaggttgattcttattgacagtacaagtgttatgaacacggcacaaatgatgattgagaaagagagctggccgtactgttttgcactgtcagatgattttcagaagactgagcaaagaggttgtatctctggtagattactcgtccgagacaggtatttagatgatgcagatctttatgctacatcagcttatgtaggcttagctctaccaggagatgttggatcctggcaaagagagtgcaagggataccaattctggtgtagggcagaagatgatggaagcttttgcataagaaacattgtagctggagactacaacctttatgcatgggttccaggatttataggggactacaaactggatgctaagctaaccatatcttcaggggatgacatttatctgggtgaccttgtgtatgaaccaccaagagacggtcccacgatgtgggagatcggaatacctgatcgatccgcctctgaattctttgttccagaccctaatcccaactatgtgaataggttgtatatcaaccatcctgacagatttaggcagtatggactttgggaaagatatgcagagctgtatccagacggtgatctggtatacacaattggccagagcgactataccaccgattggttctttgctcaagtaaacagaagaactgatcagagcacctaccagccaaccacatggcaaataaagttcaatcttgacagtgtcagtcctaacagcacatacaaattcagagtggctcttgcatcatccgcaaatgccgagttgcaggttcgtttcaacgatcaggacagaactgctcctcacttcacaactgggttgattgggaaagacaacacgattgcgaggcacgggatccatgggctgtactggctgttcaacatcgatgtgagtggagcttggcttgttcaagggatgaacaccatctacctgaagcagcccaggaaccagagtccatttcagggactgatgtatgactacctgagaatggaagaattaaggtctcccctctcaacaagtcaagcccctgaagcttttgatcccttcacctcgtactcgcagcagcagcaggctgtactgactactgaccaaccaccagtttcggcgccattgctgtcctcctccttggcttga

SEQ ID NO: 99514 - DNA, 528 bp, Oryza sativa
  Clone ID: PAT_MRT4530_97318C.1
gcacgagggcagaggaaccaaagagaacaggtaataaagtggaacattttcttttgtcggaaggtaggacttatcatgtttattagggacatatggttactaaaagcttgcgatggttccctccaacacatatgggtgaggagagactgtcctgctgctcctggtgaagcaatgcaggccttgaagtgtgctgggtgtggtgccagtagcaaagggtttctgatcttgttagaacctgttctttgtgaccccaatttcctaaaagctaattattttgttgtttctagtcctttattcagtcacatgagcagttcatgttatttaggaataatgtcctttatacacctttggcaattggagctgttaacaagattaacatgctgacatatttcttgcaaaaagttctcttattttgaaatccttacaattatttgtctacttgtcagaggagtgcccacaatgcaaatcgatggtcatcagggtcatcgaggcatgacataattgctgctggcaacagtcgaccaatga

SEQ ID NO: 99515 - DNA, 2251 bp, Oryza sativa
  Clone ID: PAT_MRT4530_97319C.1
ccacgcgtccgtgtgcttctcacttgtgatcttttcccctaggtttgcagcgaacagcttccactgaagaagttgccagatggtggcaaggcacatacttcactcaaaagctccaacaagctgttagttaattaggtctcacctctcaacaagtcaagcctctgaagcttttgatcccttcacctcgcactcgcagcagcagcaggctgtactgaccaaccaccaagaagtatcggcgccattgctgtcctcctccttggcttgaactcaactcaactccagtgcaggcacatgcttgctttccaaaccaagggataaccactcatctaatcaagccaactccacaagcagctggccatccactgattgatcaatccatccatccatcagcttgctcatggggaaacttagctgcaagaacctattgccgtgctgcatgggccatccaccggcgacctcctcaccggccggcgccaccgccggcgtcagcgttatggtcagcgaccgatatgttgagattaaaaatggcatctttgaggttacactgtccaaccccgacgggatcgtgaccggcgtccggtataatggtgtggacaacttgatggagattcttaacaaagaagacaagagagggtactgggaccttgtttggagtaaactgggagaaagaactggcatatttgatgtaataaaagggacagagttccgaatcatatatcaggatgaaaaccaggcagaggtctcgttcgtcagaacatgggatccttctctagaaggcaaagctgttcccttgaacattgataagaggtttcattacatggcattggccgacgacaggaagagaataatgccgatgcctgaagaccgagtgtcgccccggggacagcaattagcataccctgaagctgtccttcttgtggacccaataaatcctgacctaagaggagaggttgatgataaataccaatactcgtgtgaaaaccagtataacaatgtccatggatggatatcattcgatcctccaattggcttctggcagatcactccgagtgatgagttccggacaggaggtcccgtcaagcagaacctgacctctcatgttgggccaactatgctggctatgttccttagcggccattatgctggagatgaccttacacccaagttcatgactggtgaatactggaaaaaggtccatgggcctgtcttcatgtaccttaactccagttgggatggaagtaacccaactctactctggaaggatgcaaaagttcagatgatgattgagaaagagagctggccgtactattttgcactatcagatgattttcagaagactgagcaaagaggtcgtatctctggtagactactcgtcagagacaggtatttacatgatgcagatctttatggtacatcagcttatgtaggcttagctctaccaggagatgttggatcctggcaaagagagtgcaagggataccaattctggtgtagggcacatgatggtggaagctttagcataagaaacattgtagctggagactacaacctttatgcatgggttccaggatttataggggactacaaactggatgctaagctaaccatatcttcaggggatgacatttatctgggtgaccttgtgtatgaaccaccaagagacggtcccacgatgtgggagatcggaatacctgatcgatccgcctctgaattctttgttccagaccctaatcccaactatgtgaataggttgtatatcaaccatcctgacagatttaggcagtatggactttgggaaagatatgcagagctgtatccagacggtgatctggtatacacaattggccagagcgactataccaaccgatggttctttgctcaagtaaacagaagaactgatcagagcacctaccagccaaccacatggcaaataaagttcaatcttgacagtgtcagtcctaacagcacatacaaattcagagtggctcttgcatcatccgcaaatgccgagttgcaggttcgtttcaacaatcaggacagaactgctcctcacttcacaactggattgattgggaaagacaacacgattgcgaggcacgggatccatgcgctgtactggctgttcaacatcgatgtgagtggagcttggcttgttcaagggatgaacaccatctacctgaagcagcccaggaaccagagtccatttcagggactgatgtatgactacctaagaatggaaggtccttctggc

SEQ ID NO: 99516 - DNA, 399 bp, Oryza sativa
  Clone ID: PAT_MRT4530_9731C.1
atggcatgtccgtgcaccgcaccgcgtcgcatcgcgctggtgtggtccccgccgcccgaccaagccaccgaaaccccgcgcaaaagctgcgccgctcgggtgcgggcatcgcctcggagccaagggataacggcccatgtgccaccctgcgtcatcctagagaccctagctcctaggcccaactaccctaaagtcgcctggctggatatccgctctcaccgagccgcgccgctctgccattgcccatgtgcgtgcgtcatcgccgtcgcatccgtgacgccgtgccatgccaggcggacctcggtcaagccgccgtcctctcaaaccttctactccaagggttggggagtgaaccgagtggccacatccaccgcctcatccacaactaatgatgactag

SEQ ID NO: 99517 - DNA, 1237 bp, Oryza sativa
  Clone ID: PAT_MRT4530_97320C.1
atgggccatccaccggcgacctcctcaccggccggcgccaccgccggcgtcagcgttatggtcagcgaccgatatgttgagattaaaaatggcatctttgaggttacactgtccaaccccgacgggatcgtgaccggcgtccggtataatggtgtggacaacttgatggagattcttaacaaagaagacaagagagggtactgggaccttgtttggagtaaactgggagaaagaactggcatatttgatgtaataaaagggacagagttccgaatcatatatcaggatgaaaaccaggcagaggtctcgttcgtcagaacatgggatccttctctagaaggcaaagctgttcccttgaacattgataagaggtttcattacatggcattggccgacgacaggaagagaataatgccgatgcctgaagaccgagtgtcgccccggggacagcaattagcataccctgaagctgtccttcttgtggacccaataaatcctgacctaagaggagaggttgatgataaataccaatactcgtgtgaaaaccagtataacaatgtccatggatggatatcattcgatcctccaattggcttctggcagatcactccgagtgatgagttccgaacaggaggtcccgtcaagcagaacctgacctctcatgttgggccaactatgctggctatgtttcttagcggtcattatgctggggatgaccttacacccaagttcatgactggtgaatactggaaaaaggtccatgggcctgtcttcatgtaccttaactccagttgggatggaagtgacccaactctactctgggaggatgcaaaagttcaggtgataacattcaggttgattcttattgacagtacaagtgttatgaacacggcacaaatgatgattgagaaagagagctggccgtactgttttgcactgtcagatgattttcagaagactgagcaaagaggttgtatctctggtagattactcgtccgagacaggtatttagatgatgcagatctttatgctacatcagcttatgtaggcttagctctaccaggagatgttggatcctggcaaagagagtgcaagggataccaattctggtgtagggcagaagatgatggaagcttttgcataagaaacattgtagctggagactacaacctttatgcatgggttccaggatttataggggactacaaactggatgctaagctaaccatatcttcag

SEQ ID NO: 99518 - DNA, 174 bp, Oryza sativa
  Clone ID: PAT_MRT4530_97321C.1
atggcgaagacaaccccccatggtattggtgatggcttcataatccgagaggcttgtggagaccatgtcccaaaatgcgaagcaaaccttcctcttgctgccgcccctaccatcgacccgtcgccgccatcgtcatccgtctccgcccccgtcgtcgagccattgccgccctag

SEQ ID NO: 99519 - DNA, 249 bp, Oryza sativa
  Clone ID: PAT_MRT4530_97322C.1
tgtgcaggtaaggacgactggtgagtgcaatgcacgttatgtgatgcatgtgggtgaacatggatggataatttgaagagagctcagattcggtcgactgagctagaagagtgcgtaccgatcatgactgctagcgaacctagaaacgcagagtggggactccttatcgagctatacatgaataggttgaccagtctattaatgctgcttaccaccacgcgtgtgataaacgtggtaggtacagatgcg

SEQ ID NO: 99520 - DNA, 248 bp, Oryza sativa
  Clone ID: PAT_MRT4530_97323C.1
gcacgaggaataccattctctgactcctccgggctccggcgggcggcgagagagatcccaccctcaccgacggctagcgaccaccatgtcctcctccaccttcaatggcgatcagaccgcccctttcttcggcttcctcggcgccgtctccgccctcgtattctcctgcatgggcgccgcctacggcaccgcccagagcggcgtgcgcgtggcgtccatggtggtgatgcgcccggaactggtgatga

SEQ ID NO: 99521 - DNA, 981 bp, Oryza sativa
  Clone ID: PAT_MRT4530_97324C.1
atgtacatgggcaacaacaacaacaacgggtattgtccacaaggaggtcagggatggaaccaaacacgcccatattatcaaggaggtaacaacaacgataacttctctaaccagccctccttgaaagatctcgtctttgcgcaagctaaaaccacatatgctttaagtaaaaagctagctgcttatgacaagaccttagaaaacataaatgtcaagctagatggcttcgcttctgcatttcaaaaccagctgagctttaataagatgattgaaacacaactggctcaattagctgcttttgtacctgcaaatgagtctgggaggattccgaggcagcccgaatcctccgttgaaaatgttaaggtgatcacaatgagaggaggtaagtccactcgtgatctgccatatcctaaccgtgcaagcactagcagtatcactagagaagcaccatctagtaacacggctgatgaagaggttcaaccaaagaagactgtgccgcaggagtattgcgacacccggttgctgccgttaactcaaagaagcatgaaacctaatccagaagatccacatcaacgtgccattgttggatgctatgcaagtgccaacatgcacacgttatctcaaggacatcctcaacaacaagtgaccgctcacgactatggaagtggtcaagctgacgaagcagtgcatcaatgtcatactccacaagctcccggaaaagaagaaggatccagggtatcccacgatcacctgcttgatcaggtcacagcaattcgaccaagccgtctgcgaccttggagcaagtgtaagtgtcatgcccaacgacatcttcaacaagctcacttcacggtgttggcaccaacaccaatgcgcctgcaactggccaattcgtcagttcgttacctggcagggatagcggaggatgtgctggtcaagatatggacatggacacagagtaggaaacgccactcatctttgtag

SEQ ID NO: 99522 - DNA, 789 bp, Oryza sativa
  Clone ID: PAT_MRT4530_97325C.1
atgattcctgttcctgacatcttgtatgaggcagacgatgaggactcgatggctagcgactccatggatgaggcgagcgaggaagagcttgtagtcttggacatgcacgtggtcgtcgactccatggacgtcatggccggcaaggaagtgcatgtggtcgccgactccatggacgacgaggtcggcgaggaagtgctgctcctggttgctgactccatggacgacgcgactggcgaggaagtgcacgtggtcgccgactccatggacgacgaggttagcgaggaagtgctgctcgtggttgccgactccatggacgacgaggccggcgaggaagcgctgcttgtggttgccgactccatggacgacgctgccggcgaggaaatgcacgtggtcgccgactccatggacgacgcggccggcgaggaagtggtcatggtcgccgactccatggacgacattgctggcgaggaagtggtcgtggttgccgactccatggatgacgaggctgccgaggtggttgaagttgaacaaaacaaaaaggtacattctggtcacgaatttgatgagattaaaatagaaatgtggaagcttcttctacctaggtattttgcgaaagaggagtgtgtcactaccggtgctggcgacaacaatgatgaggtgattgaagaagaacgagacttgcataaccaaaaggtgcattctgattttgaatttgatgagattagaacagaaatgttaaagcttcttctaccttcttattttccaaagaaaagaaatgattcaagttag

SEQ ID NO: 99523 - DNA, 296 bp, Oryza sativa
  Clone ID: PAT_MRT4530_97326C.1
gctcggggctcgcgggccgcgggcttttttttttttttcttgcaaaggattctcttgttccaacaagtagacctttctttttcttgctggcgggaaacatgccactacagagcgcatctccacaaccaaatctaggttcctctacaattcttatctaccagggtactttcttgtcaagtttctgatcccgaaaacggaacttcataacagtgtgacgaactcgcacatcctgccatcgttgcgaaggcggcctccattcttgatcctcaccatcttagagctcatcatgcttctca

SEQ ID NO: 99524 - DNA, 159 bp, Oryza sativa
  Clone ID: PAT_MRT4530_97327C.1
atggccgcgccgcgtgcgccattggatccctcggcgatcgccgcagagagaattgatgaaatccacgcgacggggtcttccgacttccgagcctactggcgggtgggtcccaccgcgtgtgggaccgggatgtcattgtgtcgttgccccggcgcgtag

SEQ ID NO: 99525 - DNA, 444 bp, Oryza sativa
  Clone ID: PAT_MRT4530_97328C.1
atggcggcgtcggcgccggtggaggtcggcgcgcagggcaccatcggctcgctggtgtgccgcgaggtcgagtacttccgaaggatggaggtcgccgtcgtcagccacgaccacggcaagaacatgagcagcagcagcaagcaagcaagccgccgccgccaccggcagcgtggggagccccaggaccaggagcaaggtccggccgccgttgaaggagggcgcgggcggcgggcctacttattcttgcccagcatttgctcgtcggcggaggtggcggaggccaccggcgccgccagggtcaggccatttgcatcatatcagatcagatctggagaagaacagaatgtcaggggtcaaaactgtgtaatgacatgtgtgccatctggcagaattactactttaattattgaagtggattatttggtcctaagaaaagactactga

SEQ ID NO: 99526 - DNA, 398 bp, Oryza sativa
  Clone ID: PAT_MRT4530_97329C.1
gtgatgtgaactagggttcccgattttccgaaaggttatgagaaaaagtcgatttaggtagagtcgcgacacaaatcgatcgggcttctaaacgaacatgctcttgaaccccgcaatcgcagcaccatgtctcctttgattatcacacgtgttgaaacggcacaaaagcctaaatacggtgacgcaacaccgggactgattctggacattaacttgttcggtcgattcccgttgactcggaaagaatttgaatgtgggaccagaacaattggaaatgtttctaaagtgaaaatattgcttaaaggtggtctaaagtaaaacataggtaaataaaggtggcccgaagtgaaatttactttttttttttggctggggccacggtttcttttgtgaacaac

SEQ ID NO: 99527 - DNA, 4468 bp, Oryza sativa
  Clone ID: PAT_MRT4530_9732C.1
atggggccaacgccacggcggcggcggcgagggaaggtagtcggcggcggctgcgccggagtggggctcgccgggcggtgcaacgcggtgctgaaggagcacaagacgaggctgtacatcctcgggagaattttagatgaaaaatatggcagcttgtcccttgttcgaatggggccttacgtaaccatcattttgcttattcgcggaataatcgaaaacggtatatttgtaaacgaaaagatttcgtttggattttggtgctcaatccttcctctagatctagccccgacaggtggaccctgcaagctacaagaagtattcagatcagaaaacgggaaaatgggatacctaacagagcttgtagtcccagtagcgactgcagctgatacggattcctacaagaaagcctctcgcactgtcaggtgggccctcacgtggaaggccgacgccgcgtcgccggaatgggccttcccccggccccgtgggccgtgcggcgcggcggcggccggctaccgacagcctgccatggattcagggattattgggagcacaattgggatattcatgcaagtaatcttcgacaagtacctaagctccaagttagagcagtgggcagatcgtgcaaacttaggaggtgaatttcaaaacctctgtcgtcagcttgatatggctaaggcaatacttatgaccctgaaaggcagtcctgtgatggaggagggcatctggcaactagtttgggatttgaagtcttcagcttatgatgcagaggatgtgcttgatgagttagactactttcgccttatggaaatagtggacaacagaagcgaaaacaagcttgctgctagcattggattatcaattcctaaagctcttcggaacacttttgaccagccaggttcctcccttttccctccattcaaaaaagccagaccaacctttgattatgtgtcatgtgactgggattcagtctcttgcaagatgaaatccatttccgatcgtctacaaagagctaccgcccatattgagcgtgttgctcagttcaagaagttggtagctgatgatatgcagcaaccaaagtttccaaactcaagacaaaccagctcactcttgactgaaccagaggtgtacggcagagatgaggagaagaacaccattgtaaagatactcctggaaacaaagttttcaaatattcaaaataggtacaagagcttcttggtgctcccagttgtaggcattggtggtgtgggaaagacaacccttgtgcagtatgtgtataatgatctagctaccatcacttgttttgaggtaaccatagacatacttcaatcaatagatgaagaaggacataatcagtttatcagttcgctcagtttaaacaacattcagaccatgctggtgaagaagctcaagaagaggaaattcctaattgttcttgacgatgtgtggtcctgcagtaactgggaactgttgtgtgcccccttatcatctgggacaccagggagcaaaatcataatcacaactcggcatcacaatatagctaatactgttggcacaattccttcagtcattcttggagggttacaagacagtcctttctggtctttcttcaaacaaaacgcatttggggatgcaaatatggttgataatctgaatttgattggcaggaaaatagcaagcaagctgaatggtatacctttggctgcaaagactattggaaagctgttgcacaagcaacttactacagagcactggatgagtatattagacagcaacttatgggagctgagacaaggacctgaagatatcatgccagtccttctcttgagctatcaacacctgcctgcaaacatccaacgttgctttgtattctgctcagcattccccaaggactattctttctgtgaagaggagctaatattttcctggatggcacatggttttattcagtgcatgaggagagacaaaacactagaggatacagcacgggaatacctatacgaattggcatctgcttcattcttccaagtttcatcaaatgacaacctttacagaatgcacgacttattgcatgaccttgcaagttcattatctaaagatgagtgcttcactaccagtgataatttgcctgaaggtatcccagatgtggtccgccacttgtatttcctttctccggaccatgctaaatttttccgccataagttctcgctgatcgagtatggatcactgagcaatgaaagtttacctgagagaagaccacctggtcgtcccctggagttgaataatctaaggaccatatggtttatggattctccaacaatttcattgtctgatgcatctgatgatggattttggaacatgtctattaactacagaagaatcattaatctccgcatgctatgcttacatcatataaactgtgaagcccttccggtaacaattggtgacttgatacatttgaggtacttggatctcaggttctcagacatcgctgagttgccagaatcagtacgcaagctttgccatttgcaggtactggatgtaagatcttgcaagaaccttgttaaattgccaactggtgttaacaatctcattagcattagacatctattagttgatgcttcaagcaagttgcttgctggttatgctggtatttcttacattgggaagctgaccagcctacaggagttggactgtttcaatgttggaaagggaaatgggtttagtatcgagcagctaaaagagttacgggagatggggcaatctcttgccattggggatcttgagaacgtaagaaacaaggaagaagcaagtaattcaggagtaagagaaaaataccgcctggttgagttaaatttactttggaatagcaacttgaaaagtagaagcagtgacgtagaaataagtgttcttgagggtcttcaaccccatccaaatctcagacatctcaggataataaattatagaggctctacatcaccaacatggctagctacggatttacataccaaatacttggagtccctctacctacatgattgctccggatgggaaatgcttcctcctcttggacagcttccttatctaaggagacttcatttcactggtatgggttccatcctaagcataggtcctgaactctatggaagtggctctttaatgggtttcccttgtttagaagagttgcattttgagaacatgctagagtggcgatcatggtgtggggttgagaaagaatgcttctttcctaaattgctgacattgaccatcatggactgtcccagcttgcagatgctacctgttgagcaatggtctgaccaacctggatcaattgcctccacttccacattcttcaacgttgtcaaggataagtttaaaaatgcagggataatctctctcatggagttgaatgatgaagagattgtaatttctggcatatctgatttggtgctggaaagacaattatttctgccatttcataacttgaggagcctcaagagtttcagcataccaggttgtgataatttcatggtactaccattgaaaggccagggaaagcatgatatttctgaggtatcgacgactatggatgattctggatcctcactgtctaacatcagtgaactcaagatatgcggttctgggatatctgaggatgtactacatgaaattttatcaaatgttggcattcttgactgcttgtcaataaaggactgcccccaggttacttcccttgagctgaacccaatggtaagactggattacctgattatagaagattgcctagagctcacgacattgaaatgtatgaaaactctcatccatctaacagaactgactgtgctaagaagtcctaagttcatggagggatggaaaaatctcgtcgaagaggcagagggatcacatctcagaattactgcctcactgaaaagactgcatattgatgatttatcattccttaccatgccaatttgtaggacacttgggtatcttcaatatttgatgattgacacggatcagcaaaccatatgcctaactccagagcaggagcaagcatttggtacactgacttcattgaaaacactcgtgttcagtgaatgctcatatctccgctcattgcctgcaacgctgcaccagatttcctccctgaagagcctgcatttatcatcgtgtgagagcatagactccctaccacacctgggattgccaggatcactggaaaggttgttcattgctggatgtgacctgttgagagacaagtgcgtagaaggtgggattgaccagcacaaaatcgcacatgtcagggaaacaattttggcatagctggatttcccatgacctctaacaatgtagtgagtagtgactactggtttgatatgtttacttcagtaataaaccactctataattttttttctgtgctcatatttactaggagtatttcaggttgccaaaaaaaaaaaaaaaaaaaa

SEQ ID NO: 99528 - DNA, 605 bp, Oryza sativa
  unsure (1)..(605): unsure at all n locations
  Clone ID: PAT_MRT4530_97330C.1
ccggccgggctgtacaatcctcatccactcagatctctcttcccatctgatgacatcatagtaccactaccctccgggcatggcggcgtcggcgccggtggaggtcggcgcgcagggcaccatcggctcgctggtgtgccgcgaggtcgagtacttccgaaggatggaggtcgccgtcgtcagccacgaccacggcaagaacatgagcagcagcagcaagcaagcaagccgccgccgccaccggcagcgtggggagccccaggaccaggagcaaggtccggccgccgttgaaggagggcgcgggcggcgggcctacttattcttgcccagcatttgctcgtcggcggaggtggcggaggccaccggcgccgccagggtcaggtaccagcatctggggcaagatgagggccattctcttcctcaataatacgcattttcgtgcaggccatttgcatcatatcagatcagatctggagaagaacagaatgtcagggtacctaatgcatgttcgtcctgctctcatctttcgtcttctttctttgatttttngtcaaggtcaaaactgtgtaatgacatgtgtgccatctggcagaattactacttta

SEQ ID NO: 99529 - DNA, 1933 bp, Oryza sativa
  Clone ID: PAT_MRT4530_97331C.1
atggcttcgcgggctccaatcgccatccaaaacgagaacctgccgatctttcgcgggatcgatggcaagaaggccggggcggcggcgagggtggggcggcaggagcgcagagccctaggtgatctcagcaaggcccggagagctcggccggcgagctccacgggagggaaagctactgcagcagccagtgttgggggatctggtaagaatctggtgaagcctagctacctgagcgatgaggattggatgaaatgctgcgagtgggcgaaggatggggttgaaactgccagttttactgggaacgatatgcagaaactgctcagtgataagctggaagagcgcatacagaagaaggtggagaaggcaatggggacgatgcaactctccatggacagtctttaccgcatcgatgcgcattcaaaggcatgcatggtggatcctgaagataaaacagaactggatcttgatacagaatttcttcctccaatgtcatacttaagctcaagactaggtgaacacaacgccaatcataattgtgcatgcccaccaccaagcaagggaaacatgatcacaattctgagtattgatggaggtggggtgaagggtatcattcctgctgtcatcctctcattcctggaatctaaacttcaggagcttgatgggaaggatgctcggattgcaaactactttgatgccattgctggcacaagcacaggtggtcttattgcaggcatgctagcagctccatcactgggcaatgccaatcaaccatgctatgccaaggatattgtcccattttacctcaagcattccccccacatctttccgcacaggactggattttttggttggttcttcaacatcctgggcatcataaagatggccattgggccaaagtatgatggaaaataccttcacagactaatcaatgatcttcttggcgagacgaggatgaaagaaacattgacaaatgttgtgattcccacttttgatgtgaagtgtgtgaagccaataatattcagcacattcaaggcgagacgtaagcccttgaagaatgcttgtcttgctgatgtatgtattggtacatctgcagcaccaacctttctccctgcacactattttgaaaccgtggatcacacgggtgcatcgcaaagcttcaacattattgatggtggcatggcagcaaacaatccaactttggtgactatgggtgagataacaaagcagatcaagcggaagagcgaggagttcccgaaagccgagcccttggattaccgcaagtatctggtgatatctttgggcacggatatggccgatactctcgttgcagacctctttcaagcaatcggatgttcacaccaactattgcgcattcaggatcacaacatcccaataggggcaatatccaatgacctctcgacgaaggatcatcttcaactgttggttaagataggcgaaaaccttctcaagaagccactaagcaaggaagagtgtgagaagaacaacattgagccagagccaaaccttcatggtgaccatgtgacgacctatgcagatatgctcacacggtttgcaaagctactttcagacgagaggaagctaaggctccacaacatgaagctggatgctaagccctagcacaattgaaacgtgagatccttggaacagatgtctcatgttcatctataggattgcgtgtcccctactaagccattaattttgtattgtgaaatagctgtctgccctgttagaaaataagaactttgtacagtagtggtaatgttgcttttatttgcttcaaaaaacactagttggtaaagtttatactacctatatctgtgtgatgtgtggtgtctgttcagaatgtagaactatgtattgtaatggtgaattctacgaaaaacgatgtatttgcataaaaaaaaaaaaaaaa

SEQ ID NO: 99530 - DNA, 189 bp, Oryza sativa
  Clone ID: PAT_MRT4530_97332C.1
atgtcaattgtacctgatgtctccaagactccacttgtacacgcggggactggtgcaactgccgagtccgttctggctgctgagctgtgtgctaccggggggagcaacaagaacagcagaaagtgtggacaggctaggcttaacaggcaatacaatcatggagctgggcagctggacttggccatataa

SEQ ID NO: 99531 - DNA, 2235 bp, Oryza sativa
  unsure (1)..(2235): unsure at all n locations
  Clone ID: PAT_MRT4530_97333C.1
ctggtttacaggatggcttcgcgggctccaatcgccatccaaaacgagaacctgccgatctttcgcggtgattatcccaccaccgtctccgaaaatccgcggcgagcgttttttcttgctctttgatttctttgctctttgatgcgaagggatcgatggcaagaaggccggggcggcggcgagggtggggcggcaggagcgcagagccctaggtgatctcagcaaggcccggagagctcggccggcgagctccacgggagggaaagctactgcagcagccagtgttgggggatctggtaagaatctggtgaagcctagctacctgagcgatgaggattggatgaaatgctgcgagtgggcgaaggatggggttgaaactgccagttttactgggaacgatatgcagaaactgctcagtgataagctggaagagcgcatacagaagaaggtggagaaggcaatggggacgatgcaactctccatggacagtctttaccgcatcgatgcgcattcaaaggcatgcatnggtggatccctgaagataaaacagaaactggatcttgatacagaatttcttcctncaatgtcatacttaagctcaagactaggtgaacacaacgccaatcatgttctttctgacttggaantncgaacatgaacatttgctaatngcaattttgtcttgaagctcaaggaagaatatggaacataatttcctgagaattgtgcatgcccaccaccaagcaagggaaacatgatcacaattctgagtattgatggaggtggggtgaagggtatcattcctgctgtcatcctctcattcctggaatctaaacttcaggagcttgatgggaaggatgctcggattgcaaactactttgatgccattgctggcacaagcacaggtggtcttattgcaggcatgctagcagctccatcactgggcaatgccaatcaaccatgctatgccaaggatattgtcccattttacctcaagcattccccccacatctttccgcacaggactggattttttggttggttcttcaacatcctgggcatcataaagatggccattgggccaaagtatgatggaaaataccttcacagactaatcattgatcttcttggcgagacgaggatgaaagaaacattgacaaatgttgtgattcccacttttgatgtgaagtgtgtgaagccaataatattcagcacattcaaggcgagacgtaagcccttgaagaatgcttgtcttgctgatgtatgtattggtacatctgcagcaccaacctttctccctgcacactattttgaaaccgtggatcacacgggtgcatcgcaaagcttcaacattattgatggtggcatggcagcaaacaatccaactttggtgactatgggtgagataacaaagcagatcaagcggaagagcgaggagttcccgaaagccgagcccttggattaccgcaagtatctggtgatatctttgggcacgggtctgccggagcacgatatcatgtttgatgcaagaaatgttgccaaatggggcatttttcgatggctagttgataaggatacaatgccgttgctcaacatgttctttcatgccagctcagatatggccgatactctcgttgcagacctctttcaagcaatcggatgttcacaccaactattgcgcattcaggatcacaacatcccaataggggcaatatccaatgacctctcgacgaaggatcatcttcaactgttggttaagataggcgaaaaccttctcaagaagccactaagcaaggaagagtgtgagaagaacaacattgagccagagccaaaccttcatggtgaccatgtgacgacctatgcagatatgctcacacggtttgcaaagctactttcagacgagaggaagctaaggctccacaacatgaagctggatgctaagccctagcacaattgaaacgtgagatccttggaacagatgtctcatgttcatctataggattgcgtgtcccctactaagccaattaattttgtattgtgaaatagctgtctgaactgttaaaaataagaactttgtacagtagtggtaatgttgcttttatttgcttcaaaaaacactagttggtaaagtttatactacctatatctgtgtgatgtgtggtgtctgttcagaatgtagaactatgtattgtaatggtgaatttatgaaaaacgatgtatttgcatatattgtat

SEQ ID NO: 99532 - DNA, 333 bp, Oryza sativa
  unsure (1)..(333): unsure at all n locations
  Clone ID: PAT_MRT4530_97334C.1
tagtggtatgatttggaaaagatttggngcatccaaaaggtggggtttntgtgtgctaatggnggaatttcgatcacnttgtggtgcnaaaaaaaaatggcagcgatttgggagggtgaggtgattatgaatatggatcgtccattttacgattccaaagagattttggtttttattctttcgtttgttcgtgtaaagttcaccgagtgcctcctgtttctgttcatattgttgatgattgatttagatgtcgaccagagtttgaattccaagagactatgtatatattntatgttcaacttgaaaaaaaaaaaaaaaaaaaaaaaaaaaaaa

SEQ ID NO: 99533 - DNA, 187 bp, Oryza sativa
  Clone ID: PAT_MRT4530_97335C.1
taaagggacacagaacgctggacctggagggcgcgctttttttttttttttttttgcacgtctgaaagatgcagatacgttatcgaatggtatcttatttctagtgccagcacccgatcctatgccacgccttattacctagaggccctgtagccaacacctgctcaactgctgccacactaagaga

SEQ ID NO: 99534 - DNA, 1834 bp, Oryza sativa
  Clone ID: PAT_MRT4530_97336C.1
aaaaaaaaataaactgcccatatattttattcatagtaaggtagaatgaggatttcctaggaaaaaagtagaatgaggtgggaacatatcaaaatacagttgaacttatttaaccttagcctcgccctctcttatcgtcgtaactgatttaaagtttacactccatacgcatggccatgtcagtctaaaactggaacaatccttattcatccttcaaatagctcgttgaccatgtcttccatgtcctgtagatcactgctgcatttctccagctccggatggtcctccaggtaccttttgtatccagtaatgaccttatcaatgatggcttctcgcagtttctgcctgagccttgggttggggaccttccatagcttctgatgtctaaatgttttctgaaattctgacttgaatcttgccagctgcgaggagtgtttaggaaaccacagtggcatcttttcgtgtaggcaatacagaacgggttcccaggaggcaagcatgtacttctcttggtactgcataaatttgagcgttgtgcctgacggaaggatgaacacgtaattgctgggctcaagaaactcttctcttacgaagtaggaattgttaagcaggaacaggtacctcaggctagggtcagagaatgactctgagatcttctccagctgatcttcaaagttgatgagcatttgcggaatcatggtgatcggaatttgaacccatttaagataccgcatgttactccgcaagctctggtatccccaaaacaatcttacatagtcaacaattagcctagtagcttcgtggatttctgcattctgcttaaaattttcacaggaatcccaaccaattaagacaggggtaacagcttcggcgaccatcgccatactctctatcgcattgcacaaggttgtcgttgtaattatgaaagcaccaaccactttgcggcctaggcattgcaattctgaatcaactatttcttctgaatcagttattactactacattgcacttgtagaagcagctgtagatgcagctgcacaggcccacgagtctcgagaggttgtctattgacagccgagtgttttcagcggcgagggcatcaacaaaggcaagcatcttggatactgtcgcctcaacgaaccgcgcgaattgaagtcggaggtcgtcttccagctcttgatcacacataatattgttatggtcccgctgggcctgcggaagtattatggcgggtacacctgcaaccttagtctgcgtggcgctgagtgcttcggccatcacggtatatcctcgcgtccaccgccgcacgagatcagccaagccgagctcggattgctccttatccgccgccgccgccgaccggagtaaccagccgacgtcgagctcggagaaccacctctccagcgctggcccgggcgctcggtcgaactctctgatcaagttcaccatgaacccgtcgtggaccatctgccgcgcaatgtcctgagcaccgtggaggtcaatgtcacccggcgacgagtttgagtaaggggcgtaccgatgattatgagggccacccgacgcgttgcttgacatgctgctgctgtagtaactggatctcgccgaccgagacgacgacgccgacgccgacgacgaccacccggcgacctcgcccgagacgacggacaggctacggatcttctccaggtagctgtatctccgtgacggctgcgtgaaattggccggctcggagctatccagctccatcacggtcggcagctgtgtctccatgctcgcttgcgcgatatctgcagtaggtgctaagaaggctctaggcaggggagtggtacggacgg

SEQ ID NO: 99535 - DNA, 114 bp, Oryza sativa
  Clone ID: PAT_MRT4530_97337C.1
gtatttacaatgtaatatgtttctaccattctgagctatctttggagtttctttgcgtatttgttatgatgataccacacagcacaacttgtagtagttcttaccttctgctgc

SEQ ID NO: 99536 - DNA, 471 bp, Oryza sativa
  Clone ID: PAT_MRT4530_97338C.1
atggggaaatgccgtccaatgaagatatataagatggcaatgaagggattgagggggaagaagggcaaaattgacatgttccatcatagttcacagaacagttacaggagggtgcaattccacatggcatctggttacctacttcgctaccatcgcgacagtgtgccacggcatgtaatccacaaggcgttcggcgaggcgactggggtcggagagcagcaaaaagctaaggtaccttggcggtcggacgcggagaaggacggcagcgagaccgcgatgatgaggacggcgacgcgcagctccctcatctcgcctcacaacccgacggggaaagggggcaaggggatggtcggtcgccggtgccggggggcaggaggaggagggcgccccggtggccgcggcggctgctggtggtggccggaatcccgcggcggcggaggccgcggcgagggttttggtgggcggctctag

SEQ ID NO: 99537 - DNA, 1260 bp, Oryza sativa
  Clone ID: PAT_MRT4530_97339C.1
atgcagttctgcacgctactgaccttttccaactacgaccaactgcatatcatgaaacttccccaatgcagtgatctatttactgcccggttcgctgactctatcttttatgaggaacatttcccggcattagggggagacttcaagtaccagaaagaatgccatgaaattgattgggacgcccaagaattagcctcactttacaaaagagatgtattctcggctgtaatgcctactcctcgtggtatctttcctgtgggatacaaatgggttttcgtccggaaaaggaatgaaattaacaaggtgttgatggacgtagtgacagcatatctttatgggtcacttgattctgatatttacatgaaggttcttgatggaatcgacatcccgaatcaggaggtgaatcgtaacatccgcccctgccgccatgtcagcacgccggccggccgtgccgtcgcctcccccagcgtcgcagtcgcctccccttccccggcctgccctccgtttctcgaggagacctccggaagtgcatccccgccggcaacagtggcgttgccgccactgttccgcctccggccgcctctgccacctctcctgtgcaccggccgacgtcgccgccacctctcctggcaccgaaacgccatcctcttccccggccaggccacggcgtcgcccgtatttcgccggaacaccaccgtgccgcgccggcctctccatcgcctcgccggaatttccccggtcggcccttcctccacccgtgcgccgtcggccgtgccaccaccacctccggcttcgcagcggcgagccggcaacttcgtcctcggcatcgcctcccctccatccgaacccctccgctgtccgttgttgtcgtcaccgttcgtcctcgtcgtcgacgtcccgtcggtcgcccagctcattgtctcactgcgccgccaccatcgtcatcatcgtcgtcatccgcgccgtcctcgtatccatgcagctactgccggctgcccttatcgcctcctcgccgactgctgcagcctcgtcgttgtcttcatcctcggcgcctcgtcccgccttcctccaaggatcgccgccgaagtgtcgtccattcgtcgtcgtcgttcccacgcctcgtcgcgtggtggtaaggatccgtcctctcgctgccccgtcctcgtcctttcggtgtcgcctcatgcccgttgtgtggttgtcgaccccgcccgcgtggtgtctagtggagtccgtttgtcggccactcgcctcggttga

SEQ ID NO: 99538 - DNA, 1551 bp, Oryza sativa
  Clone ID: PAT_MRT4530_9733C.1
atgcagcagctgtacgcgaagtttggcagcgtgttcaccgtaagcgtggccggattgctgaaggcgacgttcttggtcggaccggaggtctcggctcatttcttccaagggttggaatcggaggtcagccatggcgacctgttcgagttcacggtgcctatgttcggcaaagaggtcggccatggcgtagacaacgccacccggatcgagcagggtcgattctttgctgaggcactgaagccggtcaggttgaggatccatgttgatcccatggttcaagaggttgaggactactttgcgaaatgggggcaacacggcacggtcgatctgaaacatgaactggagcaactactactgttgatctcaggccgatgcctcctcggcaaggaggtgatggggacgaagttcgacgaggtctgcaacctgttccgcgatatcgagggtggcgtgaacctgatgagcgtcttcttcccctacaccccactcatcccttccaaccgccgccgcgacatggcgcgcgagagactccacgccatcttctccgacatcgtgagatcccgcaagcagcagcagggagatcaggaggaggtcaatgacaaggacgtgctccagagctttatcgattccaggtacaaggccgatggtcgcgccacgacagaggcggaggtcgctggcctcatcaccggcgttctcttcgccgcgaagcacacgagcacccataccagcgtctggaccggcgctcgcctgctcacccacgagaagttcctggccgcggccgtcgacgagcaggatcagatcgtcagaaaacacggcatcatcaatggcagaatcgtcacagatcactatggtttcctgatggagatgcacatgctgcacatctgcatcaaggagacgctccggctgcaccctccggcgccgatgatcgtcaggacagccctcaggcagttcaccgtccggacgagagaaggccatgaatactgtgtcccggcagggcacaccatggctagccctatagtgatcagcaaccgtgtgccttacatctacaaggatgctcacctgtatgatccagacaggtttggtcctagaagagaggaggacaaggtcggcgggaaattctcttacacatctttcggcggtggaaggaacagctgcgtcggcgagaactatgcttacatgcagattaaggcgatctggagccatttgctgagaaactttgagctcaaattgttgtctccatttcctaagacggactggagtaagcttgtgcctgagccccaagggaaagtgatggttgtgctggccgtgatgttcatctccggttatctagtagcgaccgcgttagtcttcatccttgtctccaacgatggttcttcaagcgaccaccgagacgggaagagggaggaggtcgccggcgacatgctggtggtggcgggcagcgcgacgctaagagggaggaggacgccgccgaccatgctggcggtggtggggcaacgcgaagcggtgaggggggaggatgccgacgaccttgctggtgactatggatcaggctga

SEQ ID NO: 99539 - DNA, 264 bp, Oryza sativa
  Clone ID: PAT_MRT4530_97340C.1
gaggacgcgccgaagtggaaagatgatgagcatcacgacgacgatgatacacaggcttgcccagagcctgcgaaaagtttcgaccaagcagccggtcttttcgtcacctcgacaagctgtgaccgtctccgggagctgcatgtgtcagaggttttcaccgtcatcgacagtggcaatggtggttgctcaagggttcttggaaacaacgaagtgggaatttacatggttgccctcatgagagggacacttgtatgggcatacaat

SEQ ID NO: 99540 - DNA, 468 bp, Oryza sativa
  Clone ID: PAT_MRT4530_97341C.1
atgccgaggacgaagttgccggctcgccgctgcgaagccggaggtggtggtggcacggccgacggcgcacgggtggaggaagggccgaccggggaaattccggcgaggcgatggagaggccggcgcggcacggtggtgttccggcgaaatacgggcgacgccgtggcctggccggggaagaggatggcgtttcggtgccaggagaggtggcggcgacgtcggccggtgcacaggagaggtggcagaggcggccggaggcggaacagtggcggcaacgccactgttgccggcggggatgcacttccggaggtctcctcgagaaacggagggcaggccggggaaggggaggcgactgcgacgctgggggaggcgacggcacggccggccggcgtgctgacatggcggcaggggcggctggagttggccggcggcgtaggagagagagaaggtcggcgacggtgtggctag

SEQ ID NO: 99541 - DNA, 522 bp, Oryza sativa
  Clone ID: PAT_MRT4530_97342C.1
atgccgaggacgacgtcgccggctcgccgctgcgatgccggaggtggtgttggcgcggccgacggcgcacgggtggaggaagggtcgaccggggaaattccggcgaggcggatggagaggccggcgcggcacggcggtgttccggtgaaattcgggcaacgctgtggcctggccggggaagaggacggcgttccggtgccgggagaggtggtggcgacgtcggccggtgcacaggagacgcgacagaggcggccggaggcggaacagtggcggcaacgccactgttgccggcggggatgcacttccggaggtctccacgggaaacggagggcaggccggggaaggggaggcgactgcgacgctgggggaggcgacggcatggccagccagcgtgctgacgctgcggtaggggcggctggaggctgttggcgccgggagagagagggagcagcgacgggaggggctacggacttgggagaggccaaaacggaacgaagggaggaggagggcttcgttttatag

SEQ ID NO: 99542 - DNA, 951 bp, Oryza sativa
  Clone ID: PAT_MRT4530_97343C.1
cgccccctcggcgtcccctcgtcggcgtcggtggcgcccaacggcggcatcggtagcagcgaaatggcggcggtgtgcggcgaaaagggtggcggtttgagcggcgaaaacggcggcagcagcgaaatcgtgggggcggctcctgctgacccagagagcaacctcaatgttctcccagaagatgtcgctccactctctgcgatggatgatatgttcatcgaatactgctcaacggacccacttgttgatgcattccacacttggcatgatcgacttgggcaccccggtgatctatttactgcccggttcgctgactctatctttgatgaggaacatttcccggcattagggggagacttcaagtaccagaaagaatgccacgaaattaattgggatgcccatggagatcacgatgagtctataagggttgatgaaattgccatcaactactctaaaactggagaatcttttaatagaagagctacaattgtcgatactaatttttctgaacaaattgctgagtgcctccaagttgatccagaacctaggtctataaaagagtgccaaaagggctctcactggaacaaatggaacgacgcaattgacgtagaattagcctcgctttacaaaagagatgtattctcggctgtaatgcctactccttgtggtatctttcctgtgggatacaaatgggttttcgtccggaaacggaacgaaaacaacgaggtgttgatggacgtagtgacagcatatctttatgggtcgcttgattctgatatttatatgaaggttcctgatggaatcgacatcccgaatcagaagggatcaagcaatcgaggtcggggtccgctgcggacatccaccgtcgtggtcgcgctccaaacgctcgagctggtgtggcgggagctgtgctcggacatccaccacggcgccgtgtcgccggtgcggtga

SEQ ID NO: 99543 - DNA, 738 bp, Oryza sativa
  Clone ID: PAT_MRT4530_97344C.1
atgggaggacgacgatgggaaccggcgaggaggcgacgacgaacgccggcggattcaactgaaggggaggcgaagccaaggacgacgttgctggctcgccgctgtgatgccgaaggtggtggttgcgcggccaacggcgcacgagtggaggaagggccgaccggggaaattccggcgaggctgatggagaggccggcgcggcacggcggtgttctggcgaaatacgggcgacgccgtggcctggccgggcaagaggacggctttccggtgccgggagaggtggtggcgacgtcggccggtgcacaagagacgcggcagaggcggccggaggcggaacagtggcggcaacgccactgttgccggcggggatgcacttccggaggtctccacgggaaacggagggcaggccggcgtagaggaggcacctgcgaggccgaggaagatggtggcgcggccagccgacgcactggcgcggcggcacgggcggctggaagtggccggcggcatgggagggagaaggaggacggcggggagaagtggtgcggccgtgggggagctcgggaagaggcaaaacggggacaggagagggaggagatcccgttttataggtcacagaggggagcaggccatggcaagggcggggacggcgccgggaatccggccggcggccatgaatgccggtcaagggagggaataaatccccggcaattggggacaggattcaaggggaaaaattag

SEQ ID NO: 99544 - DNA, 416 bp, Oryza sativa
  Clone ID: PAT_MRT4530_97345C.1
gtggggagcctaacccaaaaaactttggttgacccaccctaaaagaaacaaaaggggctggaggggccaccttctttaagctacaaatggattttttaatacattaaactggggctcccaagtaggtttaaggttttttaaagaatttagcggggggaataacaggggtgtgggcccgaaaagggcctaatttgcacaagattggccggcacgggatgaggggttgatgcccacaatgagaccttacggggcaggcgcttttgggaaaagggggttggggatcttgcccacgaaaggcttgggttgctgggcattggccctgacaccagtttcaccgacgttgccgagggcctttccggaagggagaccgggggggccacaggcgagcccggacaacagatgcgcgtatccgaaaa

SEQ ID NO: 99545 - DNA, 561 bp, Oryza sativa
  Clone ID: PAT_MRT4530_97346C.1
gtcctcctcatgccgccgtttacagcctcaagaagcgtgcactgaggagcatcctggtggaggtgtacgccgccgccgctggcggagctcggacagcccgcctcgctcgcttgctccgccgcccacttgccctcagcccgcgcgccgccgccgccatcagtcccccctgcgccgccaccacccagcctacgctgctgccgcatgccacctgtgtcgccgtcgatgccgtcagcccacgcgtcgtcacccaggcggcacgccgccgccagcccccacgccgccagttgccgcggatctcgccggaaatgatgcgaggatgggaggaggagaagtttaggggtagttcggcatttctatgtaaatacatcaaaaaattaaagggtagtgggttttttgggtggagtggagctgtggagcagtaaaaacccagctccacccccgcagtacaaatttgtgaagtagctctgctaactctgctccaaaaaatagagaatctgtaccgtttaacacagctccagctctagataagcagctggagctgtgccaaacgggaccttaatt

SEQ ID NO: 99546 - DNA, 270 bp, Oryza sativa
  Clone ID: PAT_MRT4530_97347C.1
ttgtaaggccgcgctgtggatgatagggcgggcgggctttcaagatgggttggttacctgccaggtgaagttctggtagatgcacagcatctggaaagagatgaacggaaaagcataagcttcagcgaacctgacgagggatgcgtggactattttcacaagctaaactaagatgccattgctgaacatccacaggtccgaagagttccacctggctggatcagctgcccagtttggaaaactagacaatatggatccaataaacgaggg

SEQ ID NO: 99547 - DNA, 2954 bp, Oryza sativa
  Clone ID: PAT_MRT4530_97348C.1
gcacgaggcacaatcccaccaaatccttgtcctcacgtcaacgatcgcaagccatagctccgatggatccatcgtaccctccctccgccaccgcccgccgcgccgccgccatcgcccgccacctcgccggcctctcccctcgcgacgccgccgccgttgctgcagcgctggagccctccgcgtgcctgagctacgcgcccccggagtcgtcggagcccgcccctgcgttctcgccgctggagctccgctcgctcctcgacgggcaccacctccgggagcgcgactgggcgttccgcgcgatggaggagagcccgctcttttgccagcgccgcagcggcggaaaggtgttcgtgtctccggactacaacgagggcaaggaggggcagcgggaggccacgatgcggcgggtcggctacctggcgcggcggggcgtgttccggggctggctcacggagccggggcccgacgccgagctccgcaagctcgcgctgctcgagtgcctcggcatgtatgaccactccctcgccatcaagatcggcgtccacttcttcctctgccggcgcgccgcagcgattgcccgccacctcgccggcattccggctgccaaattcgcctccctgctcgagccattctcctgcctgggctacgtgccgccggagtccaatgagcagcccccggcgttcgcgctaggcgacctccggaggctgctcgacgggcacgacctgggcgtgcgggactggatgttccgcgtcatggagcagagcacattgttctgcagccggcacgggggccccggacctgcaggcagggtgttcgcatcgccggacttcaacaaggacaaggaggggctgcgggaggcgaagatgaggcggatcgggtacctggcgcggcgcggcgtattccgtggatggctcacagacacggagggcgacgccgaggccgagctccgcaggatcgcgctcctcgactgcattggcgtctacgatcactcgctcgccatcaagatcggcgtccatttcttcctctggggcagcgcaatcaagtttcttggaacaaagcgccaccatgacaaatggttgtcggacacagaaaattatgttatcaagggttgtttttccatgacagaactgggtcatgggagcaatgtccgaggaattgagacagtggctacttatgatattaaaacaagagagtttgtgataaatactccttgtgaatcagcccagaagtactggattggtggagctgctaatcatgctacacatactatagtctttgcgcagctccatataaatgggagaaatgaaggagtccatgcttttgtagctcagattagggatgaacatgaaaatgttatgcctaatatccagatagctgactgtggccataaaattggattaaatggtgttgataatggacgaatttggtttaacaatatacgtgttcctcgagagaatttgctgaatcttgttgctgatgttttgccggatgggcaatatgttagcacgatagatgaccctgatcagaggtttgcagcatttttatctccacttacacttggtcgagttaatattgcagttaatgcggtttatatttcaaaggttggcgttgcaattgctgtgagatatgctttgtcaaggagagccttttcagttacaccggatggtcctgaaatgctgttacttgattatcccagtcaccagcgacgccttctaccactgctagcaaaagcatgtctgatgagcagtgctggtaattttatgaaaaggatgtatgtgaagaggactcctgaacttaacaaatctatacacatttactctagtgctcttaaagctacacttacctggcagaatatgaccacacttcaggagtgccgtgaagcttgtggtggccaaggtttgaagacagagaatcgcataggaattttcaaagctgaatttgatgtccagtctacatttgagggcgacaataatgttctaatgcagcaggtaagcaaagccctttatgctgaatttttgacagcaaaaaggaagaatcaaccattcaagggattgggcttggaacacttgaatggtccttgccctgttattcctgattatctgacaagtggcacactaagaagctccagtttccagatggacttgctctgcttgagggagcgagatttactgaaacgattcaccacggaggtttctaactatctggcacaaggagaaaacagagagaaggctttgatgctgagctaccaactcgctgaagacttagctagagcatttactgagcgcacaattttgcaaatatttttggaggatgagaagaatattcctactggttctttaaaggatatattgggcttactaaggtctttatatgttatggtttgcatagacgaatctgcatcctttttgagatatggttgcctatcgcgagagaatgtagccgctgctaggaaagaagtgatgacactgtgcagtgaactcaggccccacgcacttgctattgtcagttccttcggaatcccagatgccttccttagcccactcgcttttgactggattgaggcaaatgcacggtcttctgggaatgaatgactccacgctaccatcaggtagttatggggttttccaatggaactactacagatggacagccaaacacactatacgcaaagataggtgtacatttgcaactacttcctgtcaagataggttacaataatttctctgaagtgtatagttcgagatggtgatgttgatctggacttcatagaagtttatgttcttgtaatttgcacttcagaatgggacatacgtgaataagtggaacttcagaatgggacatacgtgaataagtggatgtagcctctacatttttttaaagaagaagacggcttcatagccaagctgaaactcgagactagttctctctctaaaaatcgagactagttctctccc

SEQ ID NO: 99548 - DNA, 463 bp, Oryza sativa
  unsure (1)..(463): unsure at all n locations
  Clone ID: PAT_MRT4530_97349C.1
gaaggctctgaatcagagctttgatctgaaggagtggaggggctctttggaggcagtgaggaaattgccgatgatggtgctgtggtcgggttcttggactgataggtggatcgatgaggggaagaaggtggtcgcggcattgccggatgccaaattcgtctaccattccggtggtcgatggcctcaggaggatgcgtatgatgaactctcggagctgatagcagagtttgtnacatcattaccaacatctgtgcggtcgcagcatattgaccaatcttctgaacaagcaacagctcaagagtaatcaagttgtacaagattcatccccatggttcagcattaagggttgtgtgtttggaaatgcctgtgggcataatggtttcctaaccttcatagatcctgctgntaggaaggnaatatgtacctatctgtgggtacatcctttcggttcccacttcatgta

SEQ ID NO: 99549 - DNA, 594 bp, Oryza sativa
  Clone ID: PAT_MRT4530_9734C.1
atgacagtctcactggcttgtcctcacacttgttcaccttcctcagccgacaagaaaacagagacggtgagagagcgaagggaaacagagccagccgagctctgggcgtgctcgacacgtggcctcgacgcaaccgaggaggaggctctcaacttctccgtcgccctcatctccatcgccggccaccgagaagacgaagcggttaaacggaaacgcgaccgcgcactccgacgctctggagcacgcaccgagtgccaccgctgcatcatcatcgtcgcgctggcctccgtggaccaaatccggccaagccatcgccccaacatcatcaccacgacctcctcttcaaaatccctcaagaatcccaggctcccagccaatgccgcaacgtggagggagatcggcgtcgtctaccttaagtccggccgccggccatcgtcgcccattcctcactctcggcttgaagaccgaaggaacgtcgacgccgtcgccatgccgatttccgtcgctgccgggtcgtcttctccactgtcaccgatgttcagaacaatccaagctgcggtcaagcttcagtgatctctcaaggcatcgcatcgg

SEQ ID NO: 99550 - DNA, 998 bp, Oryza sativa
  Clone ID: PAT_MRT4530_97350C.1
agcagggtagctaaagaacatgatgttagaaggataaggttgctaggaagtatgatcaattcgtagtagttacagaaattacagatttttcacaggaggctggcagtcagtcgcatgccattgttgtcaacctgccattttcatgagcctcctatgaaacgaaggcgtacacttacagcttgacagactactcgcacacagggaggatcacgagcaaaaaaagaggagggaataaacaaccgttgcaaaattagtaaacagaaactccagagatccgtgtatcaccgtatgtgtttggctcgtttcgtagtcctagttgtcctctctattttcgtctggcggcggcggcgccggttgctcttcgggcaccacttccggcaacacctcctgggactcgctcttcttcttcatgtgattgtagctccctttctccatgaacagctgcccgaagtgtatcttgcagtacaacaccccgttgagcgccgcgtaggaggaggtggtcaggatgcagcctccatgagagcacttgaagcagctcttgtggtatgactcaccttccaaagttagcttttctagtgggtacactgttttctggcaggctgcacacttatcctgagttccagaaaacgctgaacatatcttgcttggggcccttgccagttccttgtctgtagatctgcaacctggcgcgaacttcttggagaagctccccgtctccttgaagagctgctcaaagtgggtcttgcagtagaggacgccgtccatggacgagtagctgcacatcgagagaatccctttgcagtggctgcacttgaagcaggtcttgtggtacgggacgccgtcggcggtgaggaggtcgatgaagtggacggtcttgtcgcacgccgtgcacttgtcctgcgtgccggtgaaagacatggtggcaagagacgactgtcgacgatcgacgacgcacgcacgcccgccccccggacgcgtgggtcgacccgggaattccg

SEQ ID NO: 99551 - DNA, 485 bp, Oryza sativa
  Clone ID: PAT_MRT4530_97351C.1
gccaccaagtggctctagtcgtctgcctaccgagggaaagagcttcagcaatggcccttctcgtcggttatcactcggcggagctgataatatgtctaaattgtctccaaatggtttattagcaaggagatctccatcttttcattcaagatcctctctttcttctagcagcagcttggtcctaaagcatgctaaaggcacttcaaagtcgtttgatggtggtacgaggtcattagacaggagcaagattaatgggaatggagctcatttacttaaccgttctactgatgctgtcagagattgtgaaactaatgatagttggaaaggaaatgcagatgagggaaccattgaaaatacaaatagcaacactgacgagagtaataaagaaactgcaaataacaagtcagctgagatggtatctggttttctttatgatatgttgcagaaggaggtaatttctttgagaaaggcatgccatgaaaaag

SEQ ID NO: 99552 - DNA, 447 bp, Oryza sativa
  Clone ID: PAT_MRT4530_97352C.1
gtccgcctcggcggcgtggtcgccgccggggggccactgctcgccaccgcccagctctccgaccacttgtactgctacacctgccccagctgacgagaaggtcgagtacaccgtcatcgagcgcaagttcaaggaggaccctaccacctacgagctactgctccgcctcctctgacacgactgcttcgacaatggatgcgacgcgtctatcttgatcgacccgctgccgaaccagagcgcggagcaggaggcggagccgaacatctaggggaagggctacgacatcatcgactagagcacgacggaactggagacggagtgcccgcaggtggtgtcgagcgcggacatagtggcgctcaacacgcgcgacagcgtgcgcctcgacgggggccccaactccgacgtgcccaccggccgacgtgactcgatctgctacaaccgcgagga

SEQ ID NO: 99553 - DNA, 180 bp, Oryza sativa
  Clone ID: PAT_MRT4530_97353C.1
atggagggtgagagtgcgcttggaagctttgctctgaatggtgtcttcgttgttgttcttccctcagctgggcaggcccctccttttatagagggttccggcaaggccaccatggtggcggagatcccgaggtttgccctaggaggagggggaggggagagcgactaccggcacaactga

SEQ ID NO: 99554 - DNA, 1393 bp, Oryza sativa
  Clone ID: PAT_MRT4530_97354C.1
ttttaatttttttttgaattaaagccatcgagacagcggtcttctctcgggtggctttctttgttttttctccttttttttgttcttatgagggaatgatggcattgggcattttcttttcgatttgaagttaaaagtgagcatcgtccagatcggaagactgaagaaatgcagcagcagcagaacagcagtggaagccgagtaacaattttttacagatacacccccacagagacacagaattacgatgaactaccatcacctaagttcatctgagataaactacctgccatttgatttgctaaccaagaaagaaaccagcagttccatccatcgatccatcctaaccggcgacgagatcgacggtcaccgtccggcgcactccggcggctggacggggaagcggtcggtgtcgacgcagtagtcgtagacgaggtggtgcgcgcgcgcccacacgagctggtggttctggtgcacggtgagctcctccatgtccttctccttccaccagtacctcccctccttgccccacgagctccccgtgcaccgcgccacctcgccggcgtccgagtccgtggcgttcgccgcccacgcgcaaccctcgacgcggacgtcgcggaacgtggccacgaacggcgcgtgcgaccagtccgtcttcacccgcccgccctgcgtcgcccagtcgtccgcgttccagatggagctgtacaccgacatcggctgcggcgacgggaacggcggcacggacgccgccgccgatgtggcgttgctggtgccattggcggcggcggcgtggcggtggtggcccttgacggcggcggtggcgttcttgttctcgtagacgcggatgggggtgtcgtcgacgaggaagacgacctggctggggttccagagcacggcgtaggtgtggaagtcggcggtggggtcgaaccacaggtcgatgcgctgctcccggttgccgacgccgtcgatgtacaggttggtctgcaccaggtacggctcgccggtgacgttgcccaggaactcgaagtcgaactcgttgtgcttgtccccgccggacgacagatagaaagcagtgacaactccggcggaatcccccgccacgagcttcaggtcggcggtcgccttgccgtacaggaacttgctcttcgacgcgaacccgccgccggacgagctgtcgaggcggagcttgaggaggtcgccctcgtacacgacgtggtcgttggcccagctcggctccaccacgtcgtcgaacttgcccgccgccgccacaccggcggcgcacaccaccgccaccaccaccaccacgacggccagagacgccattgtcactgctcacttgctgtgctgttcgatcgactcgacacctcgtgccgaattcctgcagcccggg

SEQ ID NO: 99555 - DNA, 1134 bp, Oryza sativa
  Clone ID: PAT_MRT4530_97355C.1
gtgagcacacttgcaggtccacctgggtatgtgccacttgagtactaccaaagcttcaggtgcacgacaaaaggcgacgtctacagctatggtgttgtgctcttgaagctcctctcaggtaagaagccaattgatccgactgagtttggagacaacaaccttgttggttgggtgaagcagatggttaaagagaacagaagcagtgagatctttgatcctacattgactgatagaaaatcaggggaagcagagctctatcagtacctgaagattgcatgcgagtgcttggatgatcgacccaaccgaaggccaaccatgattcaggtcatggcaatgttcaaagagctgcagcttgactcggacagtgatatcctcgatggcttttcgatcaattcgtcaactatagatgagtcaggagagaaatcaatcataaagaagttttcagttctgctgacactgtctgaaatggatcttgtggacatggcagtacactttcccaacagaaaaatgagaagattacatgaattttgctctcattctgtgtttgtgataatattaccagcttgggagatcagttctgtttttgaaactttagtagatgctacatatatatacttgcaacttgctattcttttaaagtcagtttatactgtcaacatggtcatacctgctgaagtttggaagcatctgtgtgcccaaaaagaaaaggaaaggattaggcaggaggattacgactttagggacaacgactaccctttagttttcatcttctttgggggtcccctgtatatatatatgggttcagatcctttgtggttatggtcttgtgttgtgtatccgcataatttcgatgagataatggacatcatcctggcctctacactccaaccggacactgtggtattgtatatggctctacatggtatctatattcacgcacataattattattctaaaaggaatttagtgaggttcttcgatttattgatgcctcaatctcttaaccatgtgttaataggaacactcacagacaaagaggagtgccatggaaggggaatgaattattgctacacaaggagtggctcaactggtgccaatgactgctgctctgcagcctggcaatcccatctgtag

SEQ ID NO: 99556 - DNA, 609 bp, Oryza sativa
  Clone ID: PAT_MRT4530_97356C.1
atgagccgcccgctcgcgcgcgcgcgtccgcccgctgataggtggggcccacctgtcagggccgtcgtcttcctcgcgccgtcgcccgcccgaaccctagcgccgcgtcgccgtcgtctccttccaaatccagccgcccctttccatttccgcctagcgccgccgtcgtcgctgttcgtccagccgtgcgtcgccgtcgctctggtcgtcgttgccgctcgggaaagtcaccgtcgtgatcgccaagtcatcgccgacctcgtccgcccctccgtcgtcaccgtaggccaccggaacaccgtcgccgttgtcaagctgaaggtcaccgccgtttcttcctcgacgccgtcgccgtccgttgatcttccgccgttgttttggtcaccggtgagttcgccgcgtcgccctctacgtgttggtgtcctccgttcgcatcgtcgcgccgtcgttcgccggcgagcttgcgcgcccgagccgccgcctgtggtgacgtcaccgctgacgtcgtcgtcgtcgtctcccgtgcatggttcattgcggagcaccagactgagaagtggcggagataagcccacgggggtcgctggggagtccatgccttgtttataa

SEQ ID NO: 99557 - DNA, 307 bp, Oryza sativa
  Clone ID: PAT_MRT4530_97357C.1
agtgaagcacacgcattttgctagttatataaaatataaaacaggaagggaagccttccttgataacattattacagtctcccaatcccaagacattaaagcaaacgccggaacacatgaatccaactatccaaatggtgccagaccattgatggtaacaaaactgaaaccgagtgcgattgctcacagctccaccggacatagtagacccgtcggtcacgccgctaaagaaaagcaaaatgcaatccgatccctgaccggaaaggaccgcagcgaactcatacgctgacgagcttcttgcctagga

SEQ ID NO: 99558 - DNA, 913 bp, Oryza sativa
  Clone ID: PAT_MRT4530_97358C.1
atagactccccaacgacccccgtgggcttatctccgccacttctcagtctggtgctccgcaatgaaccatgctatacaaaagggaaaagggaattattgcgtcagcgagtagggttcgcggtggaccgagtgcacggcggcagctcacggaaacgaacggccgagatcgatcctatccacaacgaacggccaagatctaacggtctacgaccggtctacgacggacggcaacgatgacgtcggcaatgacgtcatcaccggcggcggctcgggcggcaagctcgccggcgaacaacggcgcgacgacgcgaacggaggacaccaactcgtagagggcaacgtggcgaacttaccggtgaccaaaacaacggcggaagatcaacggacggcgacggcgtcgaggaagaagcggcggcaaccttcggcttgacaacgacggcggtgctccggcgacctacggcgacggcgaaggggtggacgagatcggcgacggcttggtgaccacgacggcgacctcctcgagcagcgacgacgaccggagcgacggcggcgcacggctggagctgcggcggcgacggcggcgctaggctacacgatgctagggctctaccggcgacgagaggcgaaggcgagggtggcggcgggtagcggcaggcttgggggtccttttataggagcaaggaggcggcggcgaaggcccacggcgaccggcgacacgaaggaaagtctagggttcggaggagagagatcgatctgactcgaactcgaatccacggatttccaaacgattttagccgacgattccaaaagagaaatggtagaggagatcccgaagatcatttcccctctattgatttcaccggagaaggaaaggcgcgagcgaatttggaaggagacggcggcgcggctcggc

SEQ ID NO: 99559 - DNA, 510 bp, Oryza sativa
  Clone ID: PAT_MRT4530_97359C.1
atgatgaatcaatctctcttcttagtcggagaaattggtggcaatgattacaaccatcctcttatgggcggggtatccattagaaagattcgcagcttcactccgagtatcattgccaaaatttcttccacaatcactgaattgatcgggctcggagccaagacgttagttgttcctggtaatctcccaattggatgtattccacattatctcatgatattcaagagtggaattgagaatcctttggtagcttgctgtggtggaggaggaccttatggtgtatctgaaactgcaagatgtggaaatggtgaatacaaggtgtgcgatgacccacaactgtatgggtcatgggatggctttcatccatcagaagcagtctataaggccattgcaactggcctgatatggggttcatacacacaacctccaatcgctaccaccaccatttcgtgcctgcaaattacagagctcagttcttctgttgaatacaaggtcctctatgatttgtaa

SEQ ID NO: 99560 - DNA, 608 bp, Oryza sativa
  Clone ID: PAT_MRT4530_9735C.1
tcacacttgttcaccttcctcagccgacaagaaaacagagacggtgagagagcgaagggaaacagagccagccgagctctgggcgtgctcgacacgtggcctcgacgcaaccgaggaggaggctctcaacttctccgtcgccctcatctccatcgccggccaccgagaagacgaaggtcgccaacgccatggagccacggtcgtttcctcttcttttgcgttcctcaattcactcttgatgccgtccccgttccatctaatttcgtcccattccatgcagcggttaaacgggaacgcgaccgcgcactccgacgctctggagcgcgcaccgagtgccaccgctgcatcaccatcgtcgcgccggcctccgtggaccaaatccgggccaacccgtggccatcatcatcaccacgacctcctcttggaaatccctcaagaatcccagccaatgccgcaacgtaagggagatcggcgtcgcctaccttaagtccagccgccggccatcgtcgtccattcctcgctctcgggtcgtcttctccactgtcaccgatgttcagaccaatccaagctgcgggtctagcttcaatgagtacccaagaacccagtag

SEQ ID NO: 99561 - DNA, 1690 bp, Oryza sativa
  Clone ID: PAT_MRT4530_97360C.1
atggctgtacctctactctataataaagagacctctgttgctgtgataatctgtcttcctgtgataccagcactgtttcctgggactgagagaaagaatggcttcctctacctccgggagaagaggagagctgcggcggtggtgctggcggccgtggctgtgctgctctcggcgtcacaggcactggcggcgccgtgctatccgcgcgtgttcagcttcggggactcgcttacagacaccggcaacatcgctttcctctacggcaacgactcccgccggcccacgctgtggccaccctacggcgagaccttcttccaccgcgccaccggccgcgcctccaacggccgcctcatcatcgacttcattgctgacgcgctggggctgccattcgtgcggccgtactggagcgggcggaccgcgggggacttcgcccacggggccaacttcgcggtgggcggcgccacggcgctcagcccggatttctaccgggagagaggcgtgcacgtgcgcgacaccgtgcacctcgacatggagatgaactggttccgcgatctgctcggcctgctctgcccagacgatcttgccggacataatctatttgagaatgaagagaatttcataaatcctaatagaacaattcatggcactagatcatccaattgcaacgacatgatgaatcaatctctgttcttagtcggagaaattggtggcaacgattacaaccatcctcttatctgtggggtatccattagaaagattcgcagcttcactccgagtgtcattgccgaaatttcttccacaatcactgaattgatcaggcttggagccaagacgttagttgttcctggtaatctcccaattggatgtattccatactatctcatgatattcaagagtggtaagaaggaagattatgagccagagacaggttgcctcaggtggatgaacgggttctcgcaataccacaacaaacttcttatggatgaactggaaaatttacggaagcttcatcctgatgtggccatcatctatgccgattactatggagctgctatggaaatcttcctttccctgaaccatttggaattgagaatcctttggtagcttctgtggtggaggaggaccttatggtgtatctgaaactgcaagatgtggaaatggtgaatacaaggtgtgcgatgacccacaactgtatgggtcatgggatggctttcatccatcagaagcacgtctataaggccattgcaactggcctgatatggggttcatacacacaacctcccatcgctaccaccaccatttcgtgcctgcaaattacagagctcagttgcttctgttgaatacaaggtcctctatgaattgtaattgtgtgactatattttgttattttcatagaatgtatgtgcggataaaaggttcatgtggaatcgtcgaaataagctggtattgtgctgaaatcgagttaaacttatgccatcgggtcttctaacggattagttctatgacttccatctcaagtgtgccacctcccacctccatgaatcaaagcacttaattttttttttctattttccttcataagttgtgttttgtttagttaaattttttccatgtactgttcatcttgtctttagttcttgatggcttagtcaaagactaatcatttatataaaaaaaaaaaaaaaaaaaa

SEQ ID NO: 99562 - DNA, 735 bp, Oryza sativa
  Clone ID: PAT_MRT4530_97361C.1
atggcgatggacgcggagcggcggcaggcggagctgatcgagcagttctccgcgcaggcggccgccctctcctcgtcggcgccgcagctggcggcgctcgtgctcgaggccacctcccacccggccctcttcgccttctccgagctcctctccctccccgccctctccaagctcactggaacgcagtatgcgtcgtctctggacgtgctccgcctcttcgcctatgggacattgaaggactacaagagtaattctggcaatctccctgcattgttacctgatcaagtccggaagctgaagcaactcagcgtgctaactttggctgagtcaaccaaggtgctaccatatgatcaactcatgcaagaattggatgtttccaatgtaagagaactcgaagatttcctcatcaatgagtgcatgtactcggtacaatttgcaactggaagggatcttacacctgatcagctgaacaatatgatagatacattatctgactggcgtgctggaacatcggataatttattgcatcagattcaggagaaaattaagtgggctgatacaatgagtgaagtgaacaagaagcaccagaaagagttcgaagacaaggtagaagaagccaaaaaatcaatcaaggaggcgacaaccaatggcatagtttcaatggcatacttacctgcctccccacttgtggaagtgctgacgccctaccttgagacattttggcaccagagctga

SEQ ID NO: 99563 - DNA, 327 bp, Oryza sativa
  Clone ID: PAT_MRT4530_97362C.1
atggcggcgaagagggaggaagacgacgactccatagaggcgctcagcgaggacgccgaccaccgtcagcgcaacccgagaggaggagccgagcgctgctgcgagtccgacctccgcctcgccgtgcttcgttgtccaccgcgagccggtgcaccggaggaggagccgagcatcgccgtgaatccgacctccgcctcaccgcgctccaccgtccaccgcgagccggcgcgccgccgccgctaccgccgggaggattcgctgccaggaaagagagggtcgtcggcgatgaaggggatggcggggctgaccggagagaagggaggttga

SEQ ID NO: 99564 - DNA, 354 bp, Oryza sativa
  unsure (1)..(354): unsure at all n locations
  Clone ID: PAT_MRT4530_97363C.1
accactgangcgcagagacattacgaagagagcgcgtgcaatggcggatcaggctaacacaatagaggttcccactgacgctgagctgctgcaangcaggccgatctgtggcgccacagcctctactacctcacctccacgggactccgctgcgccatcaagctgggcatccccaccgccatccaccgcctnggnggcgccgcggtccgtncccggtctcatgaccaagctgtccctcccggcgagtaagcagccgttcctccgccgcctcatgcgcgtactcgttacgaacggcgtgttcgcgcagaggacancgacgggcgaggtcgagcggtactgcctcaccccggttgt

SEQ ID NO: 99565 - DNA, 343 bp, Oryza sativa
  Clone ID: PAT_MRT4530_97365C.1
attgtgaggatgctggcattttgcttagcgccgtaggggtctcacataaagcagggaacgctggttacggcaacgagggttgtatgcccgttaagctccaaccattatttcagctcaggtatatggtttttctagctcgctcacggggggtggttgactcctgcctggcctagtttggcataggcagcctttatcacttgggctttagagacactgaagatctagggggccaacgacagacgagtcctttaggacttgctaacatattggcctttgttattctcgggggactaacagtgaagctcctcgtggaacttgtgcagcgctgggagatcctctcggg

SEQ ID NO: 99566 - DNA, 480 bp, Oryza sativa
  Clone ID: PAT_MRT4530_97366C.1
atgcccgcagcagcccttgccctctccaccgacccctcatcttcctccagactccggttcccctcactcgcctcgctcccctccctttcctccacgtacgctgctgccccggcctccgcctccgcccgcacaccgaacgctgtgcctccggtggctgctgccaccaccgccacggcgatctctttgccgtcgctgataagggcaccccgcttccggagctcatgctgcggcggcggcacaatcgtgcgactgtgcgagaggcttcaacaattcaggcacgctgttgctactgctagcgccaacttctgcacaccgtcgctcttggtcgccggcgctcggcgcaaggccctcggcaccgttcccatctctcttcgaccgttttttgcccctacgatcatgcgtcgagatcactgcgcgattctgcgtcgatgttgccgcgaggtggagatgaggcctcgtgggtcccacgtttgccgctag

SEQ ID NO: 99567 - DNA, 383 bp, Oryza sativa
  Clone ID: PAT_MRT4530_97367C.1
gccggccccgatggcgatgacttgcccaatgcccgcgcttaagcggcggcgatcgccgccgtcctctttctcctcccttccctcttcgtggccgtcgcggcgcactccaaggccaaggccttctgcatcagccagctctgccctcgccagccaggccgtgctccagtcctcccggcctagtccccccgacgagcacgtctacgacgacgacgacgacgacggcgacgatgttgacggcgacgaccacgacgccggtgatggccacgacggtgacgagcgaccacggtgtgggggggggcgacgacgaggtggtggcgggggctgtgcgcggggtgggggaccgccaccggctgctcgcgggcctcggttgccgggggcgcgcg

SEQ ID NO: 99568 - DNA, 307 bp, Oryza sativa
  unsure (1)..(307): unsure at all n locations
  Clone ID: PAT_MRT4530_97368C.1
attcaaaacaacataaatangcaactttatttacatttatntcacatcacgtcttaactgtcacgcatgatgatgcatgactttattcttaacatttgaaccattatactattacaattcaataccacacaccaccaacggtgggaatgctcctcgcaacaatgtactacttatgatagataccacatatggatggtaaatttaaagccagaaaacgttaaccttgaacttgagagtgatcaaagtaaacaacaccaacctgctgcaattgtaatttctatacaatcgactgaacgctactaatgga

SEQ ID NO: 99569 - DNA, 141 bp, Oryza sativa
  Clone ID: PAT_MRT4530_97369C.1
atggctcaagataagttggagacggctctgcagttgaagcgttccttcggaatacaccacaaatacactggtggatgtactgatggacacgacgagtacttcttctggggggccttccgtgaatcagtcggcgcgtgttag

SEQ ID NO: 99570 - DNA, 579 bp, Oryza sativa
  Clone ID: PAT_MRT4530_9736C.1
ccaacttatgaaaaattagatagagtgctaatgtccaggaaagaaacaaaaattttcactgtcatcgatatttgctcttaatatagacatatgagatcatgttcctttagtcttaaatataaattcatcttcggtttgtaatagtcatcaaaactttaagtttaagttagattggttattcatagatggtttgtagatatggttaaggaaatctggttaaatattgttgatggaaatactactttagagcattggtaggcaaaaattcgtagattacgactggaaaaattagatttgttagataaaaaagctaaattaactatgttgagtcaggatgagattgatactagaattttttttttggagaaataggttagcttgtttgcttaccgaagaggaaattaaatggtatcaacgagttaagactaaagatattttgaaaggtgactcaaataccaaatattttcatttggttgcaaatgggttttttggtcctcctgaagcttcttctttaactttggatgaaagccagataagtgatatccccaagtgtctcaattagaaaataatgctttagta

SEQ ID NO: 99571 - DNA, 2520 bp, Oryza sativa
  Clone ID: PAT_MRT4530_97370C.1
atgacggaggaccgcgcccccaaggtccccgacgagcccgccgccgccgcggccaagcagaggcacaaagcgacgtcggatcagcccgtggagtaagtcctcgccccggcggcggctgctgctaccgtggctgggttagccgcggtgaccataggtgccctctccgccgtgtcgatcccgggagcagccggtgaagtagagaaaagagtcgctaggccgtatactttgccgttgcctctggcgccgtcggtgctcctgagcggcgggtccgcgtggtagacatcggtgcacgctaagacgcgtcgagaccgggtagcaccggtcatttgtggaatatacgcgcatccgcctatactttaccagtgtaccagacggcttcgttgctccgggcctcccgcgggaacggtccatatcttcattactacgaaaatgccccatgagccaatagcaagaactaatgttatgaagcccccctattcgcatatgtcttctgggcctccgctaaaagatactgctgagcgtatcaaagcagttgatcgtgcggcttcaatgattgaggaaattttaaaacaaggcccaaacccagaaggcactatccagagcaacggacaggccgttcatccttttagtgcctcaatatttttgggttttcatgcagatccatcacttaacgttgcagcttgggttcgtggtccaaatgatcagtacataaatcacatcatgaatgaaacaggggtcactgttgtactcagaggaaaaggttcagggactccggtcaattgtcatgctgaagcatcacaacaacctctacacctctacatctcaagtatgcatgtgaagaacctagaagctgcaaaagttttagcagaaaaccttctagatactatagcagctgaatttggtgcttccagaatttcttcttcaaaagtatatggtgctgttccacctccgcagcaattattggatgttgtacaaacgtcaggaacaataccagatgtacaccctactttaggccctaatgtgttaaccggagcatcacattcctttgcatctactggagctaatgcttccttagttgctccttcagtgacatctcaatctggggccccgtcttattctgtggtttcaccacctagtaacctgatatgtcctagtcaaccagcaaatggtgggacattttatggtggctatgggggcatttatccccaggcaactccattgcagcaggttgcattaacactcaagcatgcttcatcatcatcaacccacgttgtttcagcgacgtctacatcaacaagcactgtggcaatggtgaacccttgttcacacgcagaagcagataaacgctcacaaaggaggaaattccaggaattaccagtttcacagggcgcaaccacagaagttcaggtattttctctgaccttgtctgaagctcacagggtgaactcacaacagaggtccaaatttgttaagacaggtttagacggtttaggtaacatgaccaattcatcgattgaacctccaattaaagttcagcctggatcaaatgggatgcttcttcaagatcaaccgcatgtttctgcacatccatctgcatccaagaacatgctgccgccaccaccaccaccacccaggaacatgctacccccacctcccaagagcatgcctccgccaccacctaagtttccttcaaatgagatgtcaagaaatgaggataggtgtgcagatttaaacaagccaatggcacctccgaagagcatgccacccccacctcccaagagcatgcctccgccaccgcctaagtttccttcaaatgagatgtcaagaaatgaggataggcgttcagatttaaacaagccaatggcacctccgagatccttggacgtgagttcagtctcaccaccaaatttgtattcagcacaattaccttcaaaggagcctagagtggtcaaacctggtggggcatctgtttctgatactctgctgaagcttatggattatggagatgacgatgaagaggacaacatcgatgagacgaatagcgtgcttggagggaacccaacttccatttctgggcagaaaccgttttgggctgtgtgaaaaattagtttgttctgtactccaatgcaagttgagtgcaggtagagaatgttgcctgacctgatgcatcagctcaatgccattacgctaacagttcatcgctcaatgttctcagtgtgagctatgtacaatatccagttccttttcttttggggtggttcaaatgtcgacgtgatggtcatttttcttttgacatataatcctgtagaagctagtgtgatcaggcagggcaagggcacttgtctgcacgacattcagagtgctgatgatgcttaagccaatttttgctagcttctcttggatgctgtatgttgctggttttgttagtttggtgaccttgacttgtaagatcaatgcaacaaaaccatgtgttgatacataaataagatcccattttgacttcgcaattatgtgcattaa

SEQ ID NO: 99572 - DNA, 1329 bp, Oryza sativa
  unsure (1)..(1329): unsure at all n locations
  Clone ID: PAT_MRT4530_97371C.1
ccggccgggtttaggccctaatgtgttaaccggagcatcacattcctttgcatctactggagctaatgcttccttagttgctccttcagtgacatctcaatctggggccccgtcttattctgtggtttcaccacctagtaacctgatatgtcctagtcaaccagcaaatggtgggacattttatggtggctatgggggcatttatccccaggcaactccattgcagcaggttgcattaacactcaagcatgcttcatcatcatcaacccaggttgtttcagcgacgtctacatcaacaagcactgtggcaatggtgaacccttgttcacacgcagaagcagataaacgctcacaaaggaggaaattccaggaattaccagtttcacagggcgcaaccacagaagttcaggtattttctctgaccttgtctgaagctcacagggtggtaatagaatgtgaatttttcacagggcttgttacaagctggagttttcaccaatggagtttaactgacgagagtcttctgcttctgaattgnattattgcttgtattttttgatactacatgagtttttcaacccgtaaattgaattagcaaggcacagtcttctgcttctaaagtggatgactgcttgtactatcttgttactaaccctttgtgttcaagctgttgatgcccacaagaagacttcgtaaaggactgcatttttaccattccttgaatttgaaatttggtagtttcttaataggtttaggtacaatttggtcaagttttttccttccttttcagttggagaaataggttcaaccattaaagttttgcacgttaaagagttctcactcagtgacattcacaagtagtcctagaaaagcagaaacttcttagcctaatgaaacaatagtattaatgcagtaccttttgctttatttctttgtagacactttttatgaagtttccgttatgctctttagttatatgaactttagaaagatgtaagttaatctctataactctgcatggttaactgatatccatgtatgatgcttaccagtcataatgctttcaatttatggatttgtgctgtttatgcacaaattttgttgatttcatcctttatttgtatttcattgtgtactatttactctaatgcaaaggaatttgatggagaagtctttttgtttcatttttccagaactcacaacagaggtccaaatttgttaagacaggtttagacggtttaggtaacatgaccaattcatcgattgaacctccaattaaagttcagccctggatcaaaggggatgcttcttcaagatcaaccgcatgtt

SEQ ID NO: 99573 - DNA, 231 bp, Oryza sativa
  Clone ID: PAT_MRT4530_97372C.1
atgccgccgtcgtccccgtgccggagcctctccgtcctcatgctgcagtacaacccgacgctcggcgacatccccagtggcttccttcttggacggccggcgagctcctgccccatgatgccccggcgccctcccgcctcctctgcgtgctcgagccgagccgctcccccgcgcgcggcgcggccagccgacgagctcgtcccccgtgcgccgtcgtcgccgccctgctga

SEQ ID NO: 99574 - DNA, 222 bp, Oryza sativa
  Clone ID: PAT_MRT4530_97373C.1
tttttgaccaaccatgtgtggctccagaccctgggaggtgcatactataggtacttacagtgacaagagccatttgatcaagaaggatgtcccctgtgagactgatcagctgactgatgagcacacttagatcatccatgctgatgctgcgtgcaccatacttattgacaatgttgagaagctatcttgcagcttctacctgcactgggattttcttgcctt

SEQ ID NO: 99575 - DNA, 261 bp, Oryza sativa
  Clone ID: PAT_MRT4530_97374C.1
aggaaaaatgacagggtttttatttctagaatccccggtttggcctttgcaccaacaggttcccaaaggggttttggccccaaagaacaaaaagaatttctatcccccccaaagcccaactaaaaaaaacccccatttgattccaccaaatttaaaagggaaccccacccggaatgaacagcaccccccttggaagaacccgggcgccccaaagaattgcaagttggagcccaagccccgggggtaacccggggaaactgg

SEQ ID NO: 99576 - DNA, 232 bp, Oryza sativa
  Clone ID: PAT_MRT4530_97375C.1
ggggggcatttcagcattcaattcgatgaggttctttttcacatatttttttcaacattttccaggaatgtgttatatcccagagggcccttaatccaatccaactttttgtagagaccctgaagcccttctgcttacaaagatgtgttttgttccctggcccccgggggtactcaatagacgcggtggagaataccaggatcgtgtcagtagtaggatatcccatccaccc

SEQ ID NO: 99577 - DNA, 279 bp, Oryza sativa
  Clone ID: PAT_MRT4530_97376C.1
atgcagtgtgcctacgaccaccaaggtccacacacctgctccgcctcgtgctcgccggatctagcggcgcgggccacaacggcggcggatttgccagcaagcggcaacacagccacaacggtggcggcggttcctctccccttcctctttcacgagcaatggcagatccccacggcgatggaggatctagccgcgagctcgccggcctctccccctcccttcttcgcgagcgtcgcatcggctggcctctcccctcccacccccttctcgcaacggtga

SEQ ID NO: 99578 - DNA, 2683 bp, Oryza sativa
  Clone ID: PAT_MRT4530_97377C.1
atgtcaagatcaccacctcttgatgtgctccctagaaatgcatcccccaagagagctctggagaggccaccactatcgcattctgttctaggacctgaccccagaagattgcctgatcgaaatggttggtttgaacggaagtgggcttttgaggatggtgcacaacggccttcgatgagcatacttgatgaagaatatagaaagcaaagtgcaagggaacttattgatgcttatggaaattctcaaggaaaagatgtcgatgaaaggcttcccaagatgcaacgtctagattcaaatggcatggcaggcagacctagtgcacaaaaatggctaacttcggaggaagaagagtatacttgggaagatatgagtcctactttaactgatcgaaacagaaccagcgtgccctctttacctccccttggaaccctgagagctggatttcttgggccaaacagtggactactggaatctgatattgtgaggcacagttggccaggccaggctcctcgaccagcaattgatgggccaccactaaatctcgaagatagaattcctactaacgggcccgttgacagaactaataacaggagatatccaggcaattttggtgttcagaatggtgcctttttagattaccagagttctgaacatactcttgatcctgggagaactaccatgccagttccaccttggcagcagactattggtcagccgttgcgggtacaagcgccccagcctgcatcaattctgaatagaatgccactgcctactgatagtgaagtgccagtcaagaggttggccactggtggtacatatgatgcgctgaatgtagatattccattgttggagaagcaaaggtcctcacctgctcatgctccaatggaatggcctcttaatacacagtcactaactatacaaccaattccacctgataccaaacatcctagaggcgcatcagatggtctagattctagaccatttattagccaagggtccagttcgtctgtttttgttccacagcatcatgccttggatcggagaacaatgaatgctgatgatttagctcaaccatcatatcagcatccagatttgttgtcattgagtcaaaaaatcagggcacagttttgggaaaccaaggtcaacctcatcacccgccgcaatttcatccccatcctcattctcaccttcaagagacaattagaagctttgcccccagtatgtctgttgcacctccacaaaatatattccatggacaaggaggtagcgcagctgcactcctgccaagttctttccctgtaccacctgcagtaccaccctatggcttgcagtctatgcctggatttcctttgccatcgttaccttcaggaccacctcctccatcgcagataggtccatcatcatcgcaagttgggggccctccacttgtctctggattgttaagtaaccttatgcagcatggtataatctcattgcaaccacccagccaacctcaggattctgtgggtgttgacttcaatgttgacctcaaggtacggaacgagtctgtcattaatgctctgtatcaggatcttccgaggcaatgcaaaacttgtggccttcgttttaaatgccaagaagaacatcgtgctcacatggattggcatgttacgaaaaacagaaattcaaagaatcgtaagcaaacttcacgtaaatattttgtcactgtgggtgaatggttaagagcagcagaaacagtaggaaacgatggtgttccttcttttgagcctgccgaaccagttgcagacgcaaaggaagagaaagaattggctgttcctgctgatgaggaccaaacaacatgtgctttatgtcaagagccatttgaagatttctacagtgatgaaactgaagagtggatgtacaaaggtgcagtttatatgaatgcaccagatggaaatattggtggtctagaaaggtcgcagttgggacctattgtccatgctaaatgtctatctgggccaaacaatacttaggccggcctagctgctggtactcttgcctcatttgtttcgtggctggggctgtagacaagacatgtaaactactggagagagcagattttggtatgcttagtatttaatcctcaattgacaaccatgggtttgcatagaatgttcatgtgatgatagtgtacaactgtaaaatgccttttgtaatatagtgattgagcatgagcatttttgctcgacagtcactatggtgcatgttcaatcgtttggtcccaccatctcacatgcagtgtgctgcttttccattattatagtatattttgaaatccccatgtctactaggtgataggcagccctagttcagaacggtgcaatcactccactgaacttgcgaaacaatatctttctttcttgtttcccttctttccttttgtgcaggacaatatcagtcggctacctggctggtaacttccaaaatcgaaaggacatgtaaggcgatcaaggatggaagcaaaatcatcagcttaatttccagaaaatgaaggagatgctctcttcttgaatttttcccccttttttcatactcttttgtatggcatggcgttctggtattaacacaacagttcattttggtcgcatgtatgactcatcttgctgatatgtttgcacatgtcaagttcagactagattgtttt

SEQ ID NO: 99579 - DNA, 350 bp, Oryza sativa
  Clone ID: PAT_MRT4530_97378C.1
ggttaggtataccctttacccttcgatatacgtcgcatatcggtatggcatacccacgcgcatacggatattctctgcatacattaaggaaatccttcacggaatttacggatggaaagagttctactcggacaagactgggtcgtcaatgtatcgtgtaaggtctgatgtctccgagttctacttggaaaccgcttgacctgcgatataaagggaccccccggggaggacctagggatcgaatctcagagccaacacaaccctcacagcctacgaagtcagagcctgcaaggagccaaatcgccggggatctagtcgaaccaactcgactacgaactcgccggatccgt

SEQ ID NO: 99580 - DNA, 402 bp, Oryza sativa
  Clone ID: PAT_MRT4530_97379C.1
ccggaataccggggccgcccaaggcgtccggttagtaaggcctacaccaacatggactgcataaatcgcccattggtttgcttacagttggctagttcctctcgtgcagggcctctttagcccacaagctattagcccaaacaactatttactggcagagttctcttctgcggaagtccaagagaatagcaggtactcatacggttcgcaagcattgtgacccaatagcgccaagtgagggctcacgctgccacaactgagttttccaatgcctctactgagcaatttcaacgtaccggagtatctgctgtccgccgagttattgatcctagaggccttgtactaccctatgacactaatggtgcatctgtagtatatgtcatccaagggagaggtataaca

SEQ ID NO: 99581 - DNA, 1033 bp, Oryza sativa
  Clone ID: PAT_MRT4530_9737C.1
gacccacgcgtccgcaatcacccacaagtcgaaaacccaacctgaagtcctgaacacagaacaccaagagaacccactaacgcaacacacatacacacaaacatcgacacatcgtgtccatcggaggcacaggagagatggccggcgccggacgcgacgagctgaagctgctcggcatgtgggccagcccgtatgtcagcagagccaagctcgcgctccaactcaagggcgtgagctacgagtacatcgaggaggatctcggcaacaagagcgacctcttcctccgctccaacccggtgcacaagacggtgccggtgctcatccacaacggcaaccccatctgcgagtcgagcatcatcgtgcagtacatcgacgagtccttcccctcctccgccgcctccctcctccccgccgacccctacgaccgcgccgtcgctcgcttctgggccgcctacatcgacgacaagctagcggcgccgtggagaatggtgtacagggtgaagacggaggaggagagggacgagctcatgaagcagacgctcgcggcggtggacgtgctggagggaggactgaaggagtgctccaaggggaagggatgcttcttcggcggcgacagcgtcggctacgtcgacgtcgtgctgggtggcctcgtgtcgtgggtgcacgccagcgacaagctctccggcgccaagctcttcgacgccgccaaggcgccgctgctggcggcgtggctggggcgcttcggcgagctggatgccgccaaggccgtcctgcaggacgtcgacaaggtggtcgagtacgccaagaagttccagccaagggattccggcacggctgcagatcgacaagcagtaaactaggccggcaattagcagacgtccaaagaaaaagaagtaagatctgctgcagattattaaattattcaatcccacttttgttgaactatgttaaactgattcctaacaaagaaacctgataccacgttactactacaaaagtaaaagatacgagagtaatgaaccaacacaaaaaa

SEQ ID NO: 99582 - DNA, 379 bp, Oryza sativa
  Clone ID: PAT_MRT4530_97380C.1
ttcgtggttctttatattgtcaaaaatgaatcaggtataccctttacccttcgatatacgtcacatatcggtatagcatgcccacgcgcatacggatactctttgcatacaggaaggaaacccttcacggagtttacggacgaaaagagtcctactcggacaagactgggtcgtcaatgtatcgtgtagggtctgatgtctccgagttctacttgaaaaccgcctgacttgtgatataaaagggaccctccggggaggacctagggcatcgaatctcagagccaacacaacccccacagcctacgaagtcggagcctgcaggagccaaaccgccagggatctagtcgaaccaactcgactacgatctcgccggatccct

SEQ ID NO: 99583 - DNA, 346 bp, Oryza sativa
  Clone ID: PAT_MRT4530_97381C.1
gtataccctttaccctttgatatacgtcacatatcggtatggcatgcccacgcgcatacggatactctctacatacactaaggaaatccttcacggagtttacggacgaaaagagtcctactcggacaagactgggtcgtcaatgtatcgtgtagggtctgatgtctccgagttctacttggaaaccgcctgacctgcgatataaaagggacccccctggggaggacataaggcatcgaatcttagagccaacacaacccccacagcctacgaagtcgaagcctgcaggagccaaatcgtcgaggatctagtcgaaccaactcgactacgatctcgccggatccat

SEQ ID NO: 99584 - DNA, 398 bp, Oryza sativa
  Clone ID: PAT_MRT4530_97382C.1
attgaccatagttttagcctatgtggctcatttgactaggtcttcgtcccacggtataccctttacccttcgatatacgtcacatatcggtatggcatgcccacgcgcatacggatactctctgcatacactaaggaaatccttcacggagtctacggacgaaaagagtcctactcggacaagactgggtcgtcaatgtatcgtgtagggtctgatgtctccgagttctacttggaaaccgcctgacctgcgatataaaagggacctcccggggaggacctaggacatcgaatctcaaagccaacacaacccccacagcctacgaagtcggagcctgcaggagccaaatcgccggggatctagtcgaaccaactcgactacgatctcgccggatccat

SEQ ID NO: 99585 - DNA, 354 bp, Oryza sativa
  Clone ID: PAT_MRT4530_97383C.1
atgccgaacgactccctcgtcggcgccgccacggagtgggacaggcggcgggcgagatccaacgggtggctccgccgcgcggtctacagctccgcccgtgacctcgacgacgcgcgggccagccccatggccgcgcacgcgccgctccgcttctctgttgcgccaacggcagccgccaagcccaaggatgcaattgaggttgcaggggttgctcttgttttaatcggaccaggtactgttgaaaaaacagtggcagtggcggcgacgacgacgacggcgaggaagagaaaggggcacattcagatcagtattgtgcacaaggacttctctgataatgagcacattcagatttaa

SEQ ID NO: 99586 - DNA, 254 bp, Oryza sativa
  Clone ID: PAT_MRT4530_97384C.1
caaggatgatacaacacaaatttacaacaactagtgtcctgcaacaatgacgatcattctccactttgctctccttgctattgctgtgtgcaacgccactgcgcagcttgatcatctacgtcaaaatattagccaatatgaggtgcagtacacgcttctgccacaggatcatgtgcttagtctagataaagcgatctataggctctaccataggatctatggaagacccttctcgatatcaactctggtccaag

SEQ ID NO: 99587 - DNA, 570 bp, Oryza sativa
  Clone ID: PAT_MRT4530_97385C.1
atgacgacgctgctgagcgatctgcccgacgacgtcctgctcctcatcctggacaagctggacacacgggacgccgtgcgatgcagcctcctctcgaggcggtggagccgcgtccccggcatgctcgccaacatcgagctggacgtcgactccttcgcacccgaccccgacgacgaccccgacgacggcttcacatccaccctatccgagtccgcgaggagcaaccacgcgatggtgcgcgcggtgcagagcatcctggcagcgcacgagagccggcacgccatccgccgcctgggcctgagcttcttctcgagggacgagtcggtcggcatcgtccgcgcggtcgacgacgccatggcccgcggccgcaggatccacgacctgtggttcaccgtctcgtcggagaagccggagcttctgtgcgcgggcagggacgtcgctaggcaaggggcgcgcctcgcgtcctaccgcgacaagtatccccgcgtgttcgcgggcctcacgcgcctgcacgtcgagtgcgttaagctaggcgcggcccgcgtgtccgccgtgtcagaaatgatatga

SEQ ID NO: 99588 - DNA, 870 bp, Oryza sativa
  Clone ID: PAT_MRT4530_97386C.1
ttatttttgaaaaggaaaagaaggtttattgcgtcagcggctagggtttcggtggaccgggcgcacgggcgacggttcacgcgaacggacggccgagatcgacttgatccaaaacggacggccgagatcgaacggtccacgaccggctcacggcagacggccacgatgacgtcagcggtgacgtcaccaccggcggcggctcggcggctcgggcgcgcaaactcgccggcgaacggcggcgcttcggcacgaacgaagggcaccaacgggtagcggacggcacggcgaacccaccggtgaccaaagaaacggcggcggcgaccttcggcttgacgacggcggcggtgctccggcggtcttcggcggcggcgaaggagcgaacgaggacggcgacgacttggcgaccacgatggcgatcttcccgagcgacgacgacgaccggaacggcggcggcgcacggctggagcgacggcggctcgaggttacacggcgctagggcgctacggacgacgagaggcgaaggcgagggtggcgacgggggctaggaggcggcggcaaaggcccacggcggccggcgacgagatggaaagatcggggttcgaaggaaagaggccgatccgaatcgaactcgattccacgaacttccaaaacgaattagccgatgtttccaaaggggaaaaggtagaggagatcccgaggatcatttcccctctatcaatttcaccggaaacggaaaggaacggtgggccccacctgtcagcgagcgcgggcggctacagactgggccggactgggccgaagagagagagaagggttttgggccgactttcggcccaaagccaaaagagacttttaaaaacctttttcaat

SEQ ID NO: 99589 - DNA, 902 bp, Oryza sativa
  Clone ID: PAT_MRT4530_97387C.1
ttatttttgaaaaggaaaaggaggattattgcgtcagcggctagggtttgcggtggaccgggtgcacggcaacggttcacggaaacgaacggccgagatcaaccctatccaaaacggacggccgagatcgatcggtccacgaccggctcacgggagacggggacgatgacgtcagcgatgacgtcaccaccggcggcgactcgggcgcgcatgctcgccggcgaacgacggcgcggcgacgcgaacggagggcaccaacgggtagagggcgacgcggcgaactcaccggtgaccaaagaagaagcggcggcggagatcgggtcaacggcggcgacggggctccggcggtcttcggcggcggcgaaggagcggacgaggacggcggcgacttgacgaccacgatgacgaccttcccgagcaacgacgacggctgaaacggcggcggcgcacggctggagcgacagcggcgacggcggcgctaggtctcatggcgctagggcgctacggacgacgagaggcgaaggcgaaggtggcgacggcgactaggaggcggcggcaaaggcccacggcggccggcgacgagatggaaacttcggggttcggaggaaagaggccgatccgaatcgaactcgattccacgaacttccaaaacaaattagccgatgtttccaaaagagaaaaggtagaggagatcccgaggatcatttcccctctatcaattcgaccggagaaggaaagacgcggtggggcccacctgtcagcggctgagagagagaggagagcagcggctcggcggactgggccgactgggccgactgggccggggagggagagagaaagagaggttttgggccggctttcggcccaaagccaaaagaagacttttaaaacctttttcaatt

SEQ ID NO: 99590 - DNA, 967 bp, Oryza sativa
  Clone ID: PAT_MRT4530_97388C.1
gggtgcacggcggcggctcacggaaacgaacggccgagatcaaccctatccaaaacggacggccgagatcgatcgggtccacggcggctcacgggagagggcgacgatgacgtcagcgatgacggcagcgatgacgtcagcaccggcggcgactcgggcggctcgggcgcgcatgctcgccggcgaacgacggcgcggcgacgcgaacggagggcaccaacgggtagagggcgacgcggcgaactcaccggtgaccaaaggaacggcggaagggcaacggacggcgccggcgacgaggaagaagcggcggcaaccttcgggtcgacggcggcaacggcgctccggcggtcttcggcggtggcgaaacggtagacggggacggcgacgaccttgcgaacccgacggcggtcttcccgagcgacggcgacgactggagcaacggcgaaggacgactggagcgacggcggcgacggcggcacgaagcggcacggcgctagggcgctacggacgacgagaggcgaaggcgaaggtggcgacttttttatgatacaccggggaaccttttaaaggggctaggaggcggcggcaaaggcccacggcggccggcgacgagatggaaagatcggggttcgaaggaaagaggccgatccgaatcgaactcgattccacgaacttccaaaacgaattagccgatgtttccaaaggggaaaaggtagaggagatcccgaggatcatttcccctctatcaatttcaccggaaacggaaaggaacggccgaatttggaaaggaacggcggcggcgcgaaactagggtttcgggcggcggcggccggaggtagacgacaggcctgacaggtgggccccacctgtcagcgagcgcgggcggctacggactgggccggactgggccgaagagagagagaagggttttgggccgactttcggcccaaagccaaaagagactttt

SEQ ID NO: 99591 - DNA, 951 bp, Oryza sativa
  Clone ID: PAT_MRT4530_97389C.1
tcaaagggttatttgggatctgtgtgacttgccttgttggccttggaactcttcaaactcttctccggcgaaaacggactctccggaaacgacggaatggcagacggccacgatgacgtcagcggtgacgtcaccaccggcggcggctcggcggctcgggcgcgcaaactcgccggcgaacggcggcgcttcggcacgaacgaagggcaccaacgggtagcggacggcacggcgaacccaccggtgaccaaagaaacggcggaggagcaacggacggcgacggcgacgaggaagaagcggcggcgaccttcggcttgacgacggcggcggtgctccggcggtcttcggcggcggcgaaggagcgaacgaggacggcgacgacttggcgaccacgatggcgatcttcccgagcgacgacgacgaccggaacggcggcggcgcacggctggagcgacggcggctcgaggttacacggcgctagggcgctacggacgacgagaggcgaaggcgagggtggcgacgggtagaggagacaccggggaaccttttaaaggggctaggagacggcggcaaaggcccacggcggccggcgacgagatggaaagatcggggttcgaaggaaagaggccgatccgaatcgaactcgattccacgaacttccaaaacgaattagccgatgtttccaaaggggaaaaggtagaggagatcccgaggatcatttcccctctatcaatttcaccggaaacggaaaggaacggccgaatttggaaaggaacggcggcggcgcgaaactagggtttcgggcggcggcggccggaggtagacgacaggcctgacaggtgggccccacctgtcagcgagcgcgggcggctacagactgggccggactgggccgaagagagagagaagggttttgggccgactttcggcccaaagccaaaagagactttt

SEQ ID NO: 99592 - DNA, 431 bp, Oryza sativa
  unsure (1)..(431): unsure at all n locations
  Clone ID: PAT_MRT4530_9738C.1
cttttcctcatcaagctcatctcatttctcctccccaaatcccatccaatagctcaagatcaatccctgcatgttagaccacaacaatccccatcatccaagctttccatccatcccaacataatgtgcaaggagagttgagagagatcgagaaggaataaaagagtggtggtttcagcctgcagggcagcagcagcattttgttttcctccatttgatctagtcgttctcgggtcgtcatcgtgtttgttgtgttgccgggcatctccaacgccatcgctgcttcctggacctctccgacccctttcagctgcacgattcggagattccggagagtaacgagccatatnccaaggaggatagttactaccctcagcagcaaggagaggatttcgggttatgagttatacttcttgtgtggtcattgctct

SEQ ID NO: 99593 - DNA, 480 bp, Oryza sativa
  Clone ID: PAT_MRT4530_97390C.1
atgcgggagaagagaaagagaaagaggaggaagaagaaggcaatggaggttgacatgggtcccttttttattttggagataaatggagaggaacgaattcgccggagatctctggttgttgtttccccggaccagctggtgcatttctccctgatgggaagagaagccagctcggttacaagccatggctccgcaccggcgcgtccggcttctacaccggagctcctcgcatcctcctccttcagtaacggcagcgacaaggcggtggcgtgcgacagaagcggccgcggcagcggccaggcggtggttgggatgcggcctggcggaggacagcagccgggtagcggaagaggccgcgacggcggccgggcggcagctaggcggcggcccggtggagggcggcggccaggcggtggctgggctgtggccgcggcggcgcaggcagcggcgtgcggaagaagcagccgtggcggcggctag

SEQ ID NO: 99594 - DNA, 202 bp, Oryza sativa
  unsure (1)..(202): unsure at all n locations
  Clone ID: PAT_MRT4530_97391C.1
cttggtagaggtagaattnatctcctttcttgtncttcttcgagttcttcttaattggagttcttggagcagcatcggtagtcgtcgtcttcgtcgatccagcatctcaaggaattcgaggaggagggggtgggcatnancgggatgaattcnctgagcatggtggaggcgaggctgccgccggggttcaggttccacccgc

SEQ ID NO: 99595 - DNA, 366 bp, Oryza sativa
  Clone ID: PAT_MRT4530_97392C.1
atggggactggagacgcgtgggcggtgtccccgaggtcgtaccccctcccgtcctcgcccagcagcagctgcgccaccgccatcggcgtgagggatggggccgggggcggataccggaggctcgactggcctccttcgccgcctcctcgcgctccaccgtggccttctccgctcggcttccttcgccgcctcctcactcgacctcctcgctcggccttctcacgccgcctcctcgtgctccgccacggcgtgccgctcccctcacttgcgcgccgccgccgctccgggacttacttgcacgccgccgtcgctcgctctcgccgcctgctgagtttgagggtcgagatatctggttttgtagtttag

SEQ ID NO: 99596 - DNA, 455 bp, Oryza sativa
  Clone ID: PAT_MRT4530_97393C.1
gctttttatagaggtagctgagcaattggcatggccatgcgttagagagagagagagagagagagtgcatgagcatgatgagctctccttctccctctccttaatttagacataaacttaattagctatgccgctcctctctctaatctcccctccaaagattatggttggtaggagatggatgagttcctgatcatcttcttgctctaaaatggaaggtttccaatggattccagcttctgaatcttgcagctagctaggtaggtaggtagctggtagcttagctaggcagtcaggcagatggtgtgttgttgcttctgctgtgatcgctcgcatacgtagataaggttagaggttgatcgctcggtagatggtactgatggccgggatgcttcccggagtggagtgcgcgcggcggcgacgtctccggcagggcggcggagaggcgccgtgcg

SEQ ID NO: 99597 - DNA, 296 bp, Oryza sativa
  unsure (1)..(296): unsure at all n locations
  Clone ID: PAT_MRT4530_97394C.1
gncgggcncccctcgaggtcgcccacgcgtccgcanaaanccaatcgaatccgcgccgcatcgtcctcgttagaacgatggccgcgtcgggctgcaccagaccaccagcttcctcggcaccgnccctcgccgggatgagctcgtccgccgcgtcgggactccggtggccgcatcaccatgcgncgcaccgtcaagagcgcgccccagagcatctggtatggacctgaccgtcccaagtaactgggcccgttatgggagcagacgccatcgtancttaccggagagttgnggggaga

SEQ ID NO: 99598 - DNA, 297 bp, Oryza sativa
  Clone ID: PAT_MRT4530_97395C.1
atggagcggggtggcacagaatgggacggcacggatctagtggtaagcatgggaggcggaggactcgaggaggccatcatcaagctgctgttgcggactggccaaggtggcttggagcggaggatgacgacgaggttgacggtacggaacgggaacgagaacgaggccgccgatgcccacgccatcgacgtcatcagatccggccaccgttgcgttgggagcgacgaagcacaggcccacgccctctcccaacgtgttatgcgcaccgttcctcgccagttcctcgcctcgctttga

SEQ ID NO: 99599 - DNA, 358 bp, Oryza sativa
  Clone ID: PAT_MRT4530_97396C.1
aatagccgttagtgccacgtgtcgccgtcccattggaccgccgcccgcctgccgcgcctgacgggccgccgccgtgccgtgccgggccgtgccgcgggccgtgccgtgccggcccgctacagtagccgggccgtgccgtgccggcccgcgtgctcggccagcggcccaagcacggcacggctaaacgggccgtgccggcacggcccgttactgtagcaggccgtgccgggccgtgcctgctacaggtccggccgtgccgcgcgcggcccgtttggcccggcccatttggccacctctacgtggacccattcggtggccaattcctcactttccacgcgtgcatcgtcgtctcgcgtct

SEQ ID NO: 99600 - DNA, 427 bp, Oryza sativa
  Clone ID: PAT_MRT4530_97397C.1
acgagaaactctggacatgaacatgtaagacgcctagtatcacagtatcttgatgcatgaaaaaacgattggtctaaactgcacaacaacgactggcatcagaccataacagaactgtaagcaaaatacactattacctgtgcataaagaaagacgatcaattagcggaccatcataaaaagatcaactatcatatgaactgaacactcttgatgattttatcaatgtaagaacaaaagttccgtaccgcgatgttactatcgagatggaacacagctacgatgaggagcgttgatcactgagagtgagcttcgacaccatgcaagttccgcacccgtgggccgagctcggcatcgcggacgaagacctggaagcatcccacctagtgctattgggagctggatctcagcttggaggcgaaatggac

SEQ ID NO: 99601 - DNA, 1764 bp, Oryza sativa
  Clone ID: PAT_MRT4530_97398C.1
atcgttccatacaatcacgtcggtcgacgagaagaagtgagtgatggcggcggcgggggcgtactcggcgagcctaccggcggtgccggactggctgaacaacggggacaacgcgtggcagctgacggcgtcgacgctggtggggatccagtcgatgcccgggctggtggtgctgtacggcagcatcgtgaagaagaagtgggcggtgaactcggcgttcatggcgctgtacgcctacgcgtcgtcgctgctggtgtgggtgctggtcggcttccgcatggcgttcggcgaccagctgctgccgttctgggggaaggccggcgtggcgctgacccagagctacctcgtcggccgcgccacgctgccggccaccgcgcacggcgccatcccgcgcaccgagcccttctacccggaggccacgctggtgctcttccagttcgagttcgccgccatcacgctcgtcctcctcgccggctccgtcctcggccgcatgaacatcaaggcctggatggccttcaccccgctctggctcctcctctcctacaccgtcggcgccttcagcctctggggcggcggcttcctctaccgctggggcgtcatcgactactccggcggctacgtcatccacctctcctccggcatcgccggcttcaccgccgcctactgggtggggccaaggctgaagagcgaccgtgagcggttctcaccgaacaacatcctgctgatgatcgcgggcggcgggctgctgtggatggggtgggccgggttcaacggcggcgcgccgtacgccgccaacatcgcggcgtcggtcgccgtgctcaacaccaacgtctgcgccgccaccagcctcctcatgtggacctgcctcgacgtcatcttcttccgcaagccgtccgtcatcggcgccgtgcagggcatgatgaccggcctcgtctgcatcacccccggcgcagggctggtgcagacctgggcggccgtggtaatgggcatcttcgccggcagcgtgccgtggttcaccatgatgatcctgcacaagaagtcagcgctgctgatgaaggtggacgacacgctcgccgtgttccacacccacgccgtggcggggctcctcggcggcatcctcacgggcctcctggccaccccggagctcttctccctcgagtccacggtgccgggactccgcggcgcgttctacggcggcggtatcaagcagatcggcaagcagctcggcggcgccgcgttcgtgatcgcgtggaacctcgtggtcaccacggccatcctcctcggcatcggcctgttcatcccgctgcggatgcccgacgagcagctcatgatcggcgacgacgcggcgcacggcgaggaggcctacgcgctgtggggcgacggcgagaagttcgacgcgacgcggcacgacctgtcgaggggcggcggaggcggcgacagggacggccccgccggcgagcgcctctccgccctaggcgccaggggcgtcaccatccagctctaggcgcgccacgccacgccacgccgcgccgcgccgcggcctggcctctaattacacgcgcgtttgtactgtttttggacgtgttattgtttaggagtagtgaagtgaaccaacgattgactgcaaggtgaagggtgagaacgcgagagaccagaccactatagtctatagtacatatggatgctgtaatgatgttgatccgagttcgtttttccaacacgataaaggccgacatgcctattaaatttaaaaaaaaaaaaaaa

SEQ ID NO: 99602 - DNA, 542 bp, Oryza sativa
  Clone ID: PAT_MRT4530_97399C.1
acgggggatgcccctgtcacacaccttttaatggacgaagacttaaggacgtgcgtgtatcggggacacaatcttgggcgtgtccggtgtagtcatgcatactccgattaggatgagtggctcagggccgttcatcatcacaatgggacaggccatacctgccacacgcctcctgacacacgttcaggggcgtggggcggcttgccgccgtcccatttgtcattcggcctgcgaccggttggcgaccggccgtaggcatgtcaggcatgcaccgcgccgtatttaatgcggcgtgacgtgctcgctccgcctgcattgaaagtggttaggtgggtgctgggccacgctcacctaaccccatccacgtggcgaccttggggaggggtcggggcaacccaacccatcgggcttacaggagatgacggccacctattcatgggcccgaccccctcaggggagcgccacgtgggcactaggggcggcctcttccttctaagcttggtacccctaggctcatatcaccgacaaggggtatcgacttt

SEQ ID NO: 99603 - DNA, 2039 bp, Oryza sativa
  Clone ID: PAT_MRT4530_9739C.1
tgaagatctccccttggagggaaccccgcccaagaatggcgggtctcggcggcggatggggcggcgggtacgacgacgacgacgactgggggctgagcgcggagcagctcgaccagctcgagcgggacgcctaccgcaagctcgccgagcgcaaggcctcctcctccgccgcctccaccgccacctcgccgctcccctccgcggcctactcgccggtcaagaacagccaccaccacccggcatccagggtttcccaggagtcttgcttcggcaaggtagaatcactttctccttctcggcttagtcaaccaaatgcatcgggaaatgcagttaataatagtcagggcaatatgtctaaggtatcagtacatcttttccttcattctactggtgtgatcgcagcgaagttccagtaccaccagaaacttgtgaatatacccaaggaagacatcatggtcaggttgccacgaactggaggattaaataaagccggacactgattggtataatcaaataataaaggggtttgtaatctggatggggtagtcaatgtgatatcataagatgttgtgctggttaaacaggaactaactccttctttatattccggagatcttctagatttggatggcaagattccaactgatgttgagtcaaagcttatgccgtttcagcgtgaaggtgtcaggtttgctttacagcatggtgccaggaccctgatagcagatgaaatgggtcttggcaagacattacaggcaattgctgttgcttcttgccttcatgatgcctggccagttcttgtaatctctccatcatccttgcgattacattgggcttctgtggtgctaccacaaactggaggatcaaataaagcaggatacagattggtatattcaaatactaaaggggattttaatctggatggggtgttcaatgtgatatcttatgatgttgttcccaagataaaggacatgcttctggacttggattttaagattgttatagctgatgaatcacactttctgaagaatgcccaagcaaagagaacaatgcattcacttcctgttctgcagaaagctaaatatgtggttttgctaagtggcacccctgcgttatctcgccctatcgagctgtttactcagctccaggcattgtatccaactgtatacaagaatgttaatgagtatggtaatagatattgcaaaggtggcttttttgggctttatcaaggtgctagcaatcatgaggagcttcataatttgatgaaagcaactgtcatgatccgcaggttgaagaaagatgtcctttcacagttgcctgttaaacgcagacaacagttggagactgtgaagatcaaaatccagtcctgtgactcccaggagacgatggactctctcaaatttgctcaaaagaatcttattaacaagatctacaatgattcagctgaagccaaaattccagcagtgctagattacctgggtactataattgaggccgagtgcaaatttttaatatttgcacatcatcaatccatgcttgaagctattcaccaacatctcttgaaaaagaaagttaagtgcataagaattgatggtcaaacacctgtacctgtaagacagactctagtcacagatttccagaataaggatgacatcaaggcagcagtgttatccataaaagctggaggtgttgggttaactttgacagcagcaagtacagtaatctttgctgagttatcatggactccaggtgaccttattcaagccgaagaccgtgcccatcgtattggtcaggtttcttcggtgaacatatattaccttcttgcaaatgacactgtggatgacattatatgggacgttgttcaaggcaaacttgagaatttgggacagatgctggatgggcaggagaaaacgctggatgtgtcccagagcgacactaggcccagcccttccaagcagaagacgctcgacgcctacctcaagcgatgcagcaattccacagaagctgatcagcccaagctcaagaaccctaggttctga

SEQ ID NO: 99604 - DNA, 736 bp, Oryza sativa
  Clone ID: PAT_MRT4530_973C.1
aggaattcggcacgaggatctagaggcgcgccgtggcgtgctgccgcacccgttcgccgccgcgtgcctcgttggccgcgccgccgcgttccaggccggtggccgccccgccgacgcccgcgcggactgcaaccgtgcgctcgcgctcgaccccgcctacatcccggcgctccgcgcccgtgccgaccttcttcagtccgtgggtgcgcttgccgattgtctccgtgaccttgaccatctcaagctactctatgacgccgcgctccgggacgggaagcttccaggccccaggtggcgaccacagggtggcgtccggtaccgcgagatcgccggcgcgcaccgcaagcttaccgcgcgcatccaagggctccgcagccgtgtcgccgccggcgaggcgtgtaacatcgattactacgcgcttctgggtgttcgacgcggatgcacgcgctctgagctggaacgcgcgcacttgctgttgactctgaagctcaagcctgaccgcgccgtggtgttcggcgaacggctggagctggtggacgagcaccgtgacctggaggcggtgcgcgaccaggcgcgcatgtcagcgctgctgttgtacaggatgctccagaagggttattctttcatcatgtccgcggtaattgacgaggaagctgccgagaggcagagggcgagggaggcggctgccgccgctgctgccgcagcagcagcagcagccgcggctgcagcggcggct

SEQ ID NO: 99605 - DNA, 1359 bp, Oryza sativa
  unsure (1)..(1359): unsure at all n locations
  Clone ID: PAT_MRT4530_97400C.1
gttgcggtggtggagtgtgcgcttttttttttttcgctccgaacttgtcggtgtacgtttttacgttggatcccgtgtctgctctggcttcaccatcaccactatgtgttttttaagtagtatagatagattagtaatccgaacacagcctccgagtcaccccaaggactctctctctctctttctctctctccctgacttgggtggcccactccagaccagagtcgagtcaggctggccatggccatggccatggatgccttcggctccatgttcggtgaggccaagccgccggtggcgatgcggatgcgccccatcctcttccacgcccacgcccatactaatgatgtctcccaactccgcctcctcgccaccgacctccactccctcgcctgggaccgctccctctccctctccgacatcgacgatctcagagacgacgtcgggatcggcggctcctgctccgacttcctggattacctcaaatcttgcctctcctctggggaagtcaacctcctcttccctcacaatggtcttgatcgcgttcatcttgttgctacaaaggcaaagggcctacctcgcatcaccatttccctcaacacccttactcactccgcgttgaatgatgccattgccaatttctcactatcactctatgccgcttttaggactacgcaggaccatgcatccagagaacaagagcgagcgtcaaagctgatggagactctatcatctgaaaaggaaaagaatgaaataatgcaaaagcaactccaagctctttcttttctagacaaaagaaaggcaacaaagccaaagctggtggccaatcaggttccaagtgtgtctgatgtgactcagggctctgatcaggttattgttccagcacagcagcaaacaccagccagaccagagtcgagtcaggctggccatggccatggccatggatgccttcggctccgtgttcggcgaggccaagccgccggtgacgatacggatgcgacccgtcctattgcacgcccacgcccacgcccatactgatgatgtctcccaactctgcctcctcgccaccgacctccactcccacgcctgggaccgctccctctccctctccgacatcgacgatctcagagacgacgtcgggatcggcggctcctgctccgacttcctggattacctcaaatcttgcctctcctctggggaagtcaacctcctctttcctcacaatgggcttgatcgcgttcatcttgttgctacaaaggcaaagnggtctacctcgcatcaccatttccctcaacacccttactcactccgcgctgaatgatgtcattgccaatttctcactatcactctatgccgctt

SEQ ID NO: 99606 - DNA, 340 bp, Oryza sativa
  Clone ID: PAT_MRT4530_97401C.1
cttcttaaaaggggagccaaggaaaagcaaggggggccccggtccccaaaggaacccccctcttagggggtaaaacccccccaccgggaaaaaacctttttaaccaggcccccccctggaaacaaagcccgaaggggcccaaccacgggaaaaaagggaccaagggggggaaaaggggtttttacgatttaaggggttaaaaaaagaacctcccttctgggggggcccaaaagaggccttcccccctggcctttgagaacccaagggccctcccccaaaaaatgggggggaaccccccccagggggtggccccgggcccgaaaaacaccctggggggggg

SEQ ID NO: 99607 - DNA, 340 bp, Oryza sativa
  Clone ID: PAT_MRT4530_97402C.1
gtttatttctggactctaaagcccggactatgtgttggttggagaccttgggccgaagaacccgaagttaattggggcatcacgcgacatacgcggtccccgtatgataggaacgcgagatagaacattgggcctggactaccctgggatctcggttatcaatgctcctacgacatggcagagcatgctggaacaggagctgatggcatagaacgtgtattccacttggtagaacgcggacccggatgcatactcgtggggtgagctccttgctggtggcagggatccgatgcacttgagggggatcacacctgccaacgtgtttgccacagaggctact

SEQ ID NO: 99608 - DNA, 145 bp, Oryza sativa
  Clone ID: PAT_MRT4530_97403C.1
gcctgaagtggatgggaaagtggtgattgagaagattgaggacagtgagtgggaagtcggttacaatgcgatgaacaacaagtatgggcactcaattgaggcaggtgttatcgacccagctaagatgagaagatgcatgctctag

SEQ ID NO: 99609 - DNA, 377 bp, Oryza sativa
  unsure (1)..(377): unsure at all n locations
  Clone ID: PAT_MRT4530_97404C.1
aancctgtttaattagttggtttattaacttgattactgtcaaaggtttgggttaactaggagatgatgatgatggagtttgtggtgatgcgagagagagagagattaggtcgcgctgatctggtctgatcaaggtgtgcagagcagatggagcggactaattcattaattagcttaatcaaattagttatataggtttgtttgtcttaattctgtatgtatatagttatctgattggggataatacatagagattactagctagctagctagtttggtgattaggggggtgatgagctagctagagagagatatctcatcaaaattaaggtctcggttggttgattaaaaaaaaaaaaaaaaaaaaaaaaaaaaaa

SEQ ID NO: 99610 - DNA, 275 bp, Oryza sativa
  unsure (1)..(275): unsure at all n locations
  Clone ID: PAT_MRT4530_97405C.1
gcatgcacgcgtacgtgaagctctctacaccgtacgccctcttcctatttttttttttttgngaaaaccgnnccacgacaaaaacgggggggggcttaaatggacaggggtcttctccttccttctnaggcaanaccccctgcccatggccttatcaacattctgtacaatgctctagagattatctccaggccttgtttaaattcccctgacatcaccacaaagtttaatcatctgatggccacgtccactccttaccccaaaatctgtcccgg

SEQ ID NO: 99611 - DNA, 177 bp, Oryza sativa
  Clone ID: PAT_MRT4530_97406C.1
atggtcaggcacatggccgggacggagatgatcgagagatgcttttctcggcgtggagcaacttcgcccggcctcctccttgccgcgcgcaccggcgtcgcacggccacgatccccttgccggctggctgccgagctctcatcagctgtacgaatatgcgtggcgcccgctcggtag

SEQ ID NO: 99612 - DNA, 265 bp, Oryza sativa
  unsure (1)..(265): unsure at all n locations
  Clone ID: PAT_MRT4530_97407C.1
aacccattacaacgagaattgcagattttntttcacgaacaaaatcaagataactcatcccttgtgtcttgatgcaggtattcggtcacacatctcatgaacagaatttgcatatggtacacgcagccagattctctcagaacatggctaaagaaagattgattaatcaagtattccccatcgctaacattttcagtttttcagactttcagttaattttatttgacaaggccttgcaagtgactattcacggcagggatgttct

SEQ ID NO: 99613 - DNA, 418 bp, Oryza sativa
  Clone ID: PAT_MRT4530_97408C.1
ggtaaaacgaaacgcaatgctaatgcgattagcccataacgaacttgaacttagagttacacaggccgcggttcaaacacggtggggaagaacagtctcgggcagaagtgtagaaatccggcaaatttctcaatcatcctaaattgggaaatcttattaagtcaccacgagctgacgaccagctcattaactatcagggccagcaatatgtacttaatgaaggacgggaaaagcacactagaggagttcgaatcaggaggcctgaggtggctgatccccgagcagcagcgacttgacgatggtgtcggccatcccgtcggcgagagggaacatgtggccggacttggggagctcgtggtagacgacccaagggagtttctcgctgaggtacctggacaggctgaccggcacgatcaga

SEQ ID NO: 99614 - DNA, 1455 bp, Oryza sativa
  unsure (1)..(1455): unsure at all n locations
  Clone ID: PAT_MRT4530_97409C.1
gcacgaggaaagaaaccaaacgaatcccgaccccttctccgcctcttcttcctcctcccctcccctcccctccttccctttcctttctctcctctccaatcgccatacttcccgcttcccggnctttgggaccgcctccccttcccccatatcatctccccttcctctcctccacttcccgccggcgcgattcacccaagagagatgtcaatgtggcgcttctcccgctccctcctccgcgccgccgccaccaccaccaccgccaccgcggcgtgtgcctccgcgtccacggcggggaagcatgccgcgtcgcggaggtgggtgacgccgcgtgagctccagaggtgctggtacgcgtcgctcccggcggcggcggcggcggtgccggggaaggacggggaggcggaggtgacggcggaggaggcgaggaggctgatgcggctggcgaacgtggaggccctgaagcggaagctcggggacggcgaggtgatcccgtacgcggagctgctgcgcgcgtgcgaggaggccggagccgccaggacgcgcgccgaggccgcggcgctcgccggcgcgctcgacgaggccggcgtcgtgctgctcttccgcgacaaggtctacctccagcccgacaagatcgtggatcttgtaagaaaagctatgccactcgcgctgacacctgaggatgatccaagaaaggaagaactcaagaagctgcagacacagttggaagatataaacaagctcgcacacaagcaagttcgtagaatcctctggtctgggctagggttcttgatcacacaggttgggctctttttcaggctcaccttctgggagttctcgtgggatgtcatggaacccatcaccttcttcaccaccacgacaggcctggttgtagggtatgcctacttcctcatcacatcaagggatccaacttaccgagacttcatggagaggctgtttgagtctcggcagaagaagctgattcagaggcagaacttcaacctggataggtacctggagctccagaggcgctgtaaaggtcctttggagaagatgtgtggcacaaaccaaactcccaaccctgacatggctcaccttcacgagttgtccgttaacaaatgacaaccttcgctcaaacactaatctaccattgcttcttttcttgttcaattttcttggagtaatgatcaagaaaatactagcaaagctgatattttgcattgccgaggtggacatatttcttttgcgaccctttttatggtcttccattatgcaaatgtgtaggtttaatagctactataatccttttttgtaacaatgctgaagcacaagcacatgatagttggaaggaaagctttacatgtatgatcatatgaccagaagctttaccgagagctgtgtatctctgcagccactgctaatctcctgtgcaatgtggacagattcattagcttt

SEQ ID NO: 99615 - DNA, 395 bp, Oryza sativa
  Clone ID: PAT_MRT4530_9740C.1
ctgggcctccactggccaatgccaggggattcctggtgagttggcgttatgattatgggtggagtcggtgtgtattcctcccgctccccttgaggagagtagtatactgccacgcacttgggatctgtcagcaaagtgaaccttgctgccacgtggctttgtttgacccccgtgtttgatgtgaataagagagttgggtcggaaatgagatatttccacggagataagattataaattaggcttcactgggaaaattttcccagaaaaaaaaacactttgtgttgtttaagatggtgctggagttgtggaacccccggcccagagtaattgccaaattggcatggttctacgggttgtaacattggaactctgtaaaccaaagaaaaacccccct

SEQ ID NO: 99616 - DNA, 141 bp, Oryza sativa
  Clone ID: PAT_MRT4530_97410C.1
atggctgtcgacggtgtccgacggaagtttgttgtacctctgatacgctgccacggccaaacaatatctgccgcctccactgaagtagccgaggcccaacaatatttcccgccacattactggagctcccccaccatgtga

SEQ ID NO: 99617 - DNA, 117 bp, Oryza sativa
  Clone ID: PAT_MRT4530_97411C.1
atggcgcttggccgcccttcagtaagcaccgctcacccactgttcagcaccgccgtccccgtgccattccaacccgtcgccattgccgagccggacccgcccttagcattgcgttag

SEQ ID NO: 99618 - DNA, 852 bp, Oryza sativa
  Clone ID: PAT_MRT4530_97412C.1
atggcgagtggattcttccaccagctggaggtgatcatcatcatcctttgcttcttccctacttttccatccttcgcctccgggaggtactcgccacacgacggcgcgacggcgacgtgggcggggcatcatcatcagctgcaggtggcgcgcgaccaccctcgtggctgcggcggcggcggcggcctcgccgaatactgttgggttgcgcggccgcaggcgagcgtggcctccgttgcaacctttgtctctactgccggcgcggcgtcaccccatcaggctgttagcaactgtcgcacatgggggccgatgtggtatatttcgttttttgtgagtaagagtataataaaagggaatgtgcacgtggattacctaggatccagcgctatagatggccatattatcctaggcccagcgacccggcccatggcacggtactttggccccacccaggcatctttgcagcccggtgatttcaactgctccgtgctgtccgggttcgtgacacgtcctggttgctctccgctgccggcgttcgccgcggcggccggcaagtcgtcgtcccaccgcactgtcaccggcggcctaccggagctcgactccgagctggcgctactggccatgatcatcgtgctagctgatcgagcgacggaccggaggaagaagaagagcggaagggcgagatactccgtggcggcgataggcgcccttctggtcatgctgctgcggcaggttccgcatctgcagcaccggtggcagatgcaacacgctcaaactgcaccaatgatcccaacatgcccaagcattttcggtgcaacccccatcgtaattaagccccgtgctgcacagtga

SEQ ID NO: 99619 - DNA, 339 bp, Oryza sativa
  Clone ID: PAT_MRT4530_97413C.1
atggtcgttgctgaggtgctccttgaggttgctgtggcatgggctcaaattgattgtattgaggaacaaactgaggttgagccgatcctccctgctgatattgaacttgtggtgatggaggctgatactgataattcaaattgcccccctgaacctgccgtcttggtgacatctgctgaattggctgcacgacctgttggattgggggtgtttgttgaatcggctgcacaatctgctgccttggtggcgtttgctgaatcggctgctgctgggttggatcaacagtatgttgaggaggagctgatactggcgccatcggctgagccgatggtgcattaa

SEQ ID NO: 99620 - DNA, 643 bp, Oryza sativa
  unsure (1)..(643): unsure at all n locations
  Clone ID: PAT_MRT4530_97414C.1
gcacgaggcaccaccaacactgcccatgctgcagacttctttctactcctacattccacatatctccatggacagtaacccacgcgtccgtaccacttcaaccctaatcccctctctctctcttccgcagaggtagagtgagagagatggtcagatagctagattgatatccctctctctctctcacacacatctctttttgcaagatctcttcttgttcatcatcttcttctttttttctcccccttttgcttcaccaatccatcttttgtcacgagatgtggccgagctgaagctagtagtagtggagcagcgaaagcaagtacgccaagaaaaaaaaaaggaagaagaaagaagaaagaaagaaagaaaaaaacgccagcttgagggcagagggcaaaagcggcgacgaggagcagtggccaaagctcagattcttcccgtgggctatttttaccacccgcatcccctctctttgagccccttggccgattcattcaccgacgcaaagatccaacccctcttcaggtgtcggcagatgccgcctttgtgaggtttccagtggggggatttctcgtcgtttcttgcgtgcggttgcgttcttgatccagtgagcgcacggatatatccgncctggtttagt

SEQ ID NO: 99621 - DNA, 544 bp, Oryza sativa
  Clone ID: PAT_MRT4530_97415C.1
cccacgcgtacgctcacacatccggatacacgttttatcctaccctaccatatcaacattgccgccatggcgaactagaagcacaaggtgtaccgccagcacatccccttctacagtgaggacctctacatgcgcactcctatccacaaggctcgcacgatgcaagatctcgaccagatgaaacggaggctcaaggatatggaggtggaggctaacgcactccgacagatgctacccacggtcgtcctagacatgaaaagtctgcatcctaatgcgtcttcatgtgaatcataagaggaaatgaacgctcggtcggtctatgtcgaaaacgtttactatacatgcaccctataggaactccagatgcatcttaatacctgtggtacgacccacgggatgacaatcctgacacacaagtttgtgcaaccagaaagttgccattatcatgaattcctcggagtataagctgatcatgaagctgttaagtataacgaatcataactggatggtcgtcaaatcatggtggcaccaaagaggactaacg

SEQ ID NO: 99622 - DNA, 1224 bp, Oryza sativa
  unsure (1)..(1224): unsure at all n locations
  Clone ID: PAT_MRT4530_97416C.1
cttaagtntagtagtcttcatgtttcactccggcttattagcatgttgatccttcatccttacggaagattttnnaaattttnccttgaaagaagaacccgaagaaggagataaagttcatgacgtacaacgtttggtctcgcgaggacgttgcggtgtacaagaggatgaaggccatcggcagcctcgtggagaagcacaagccggacgtgatcttcttccaggaaatcacgccatacattctcaggatcttcaagagctttgcgtggtggaaggagtaccactgctcagaagtaaaacctgaagaacaggcaaccaaactgcacttctgcatgatgctgagcaagattcccatggagaagcccgcgagctggaagttcaccaacacgtccaccggcagaggctacgtggaggccgacatcaacccggggacgtcgtcgcctgccatccacatcgccacgacccagctggagagcccctcctccggcccgccggcggcgcagccgcagacgcgctccttggagcggtacgcgcaggccgagcacgccgtcgccgcgctgggcagcgccaggaacgtcgtgctcggcggcgacatgagctgggacgacgccgtcgacatgccgttccctctcccggccggcggcggcggcggcggtggcgactgggtcgacgcctggactgtgctgaggccggagcacgagagagccagtgctcgacgtacgacggcatctggaacgaggatctcgccgtgttcaacggcttcacggcgaatgctggcctcgtcgctgaagaagagatcggaccggttcgtgtgcaagctgcaggattacaagctgggaggcatcgagttgatcgggagtacggaaaacctcgggattgattacctgaagaaacgcagggactaaacttcacctgaggccgagctgccacctcggngtggtcctgaccgtcgtcgtcacgggcgatccnccgccggtgcatggcgcattggcgccacgtcggaanctgcgggacagcactggttttacggcgccttccgagtagtttgcggttgactgcacgatttggtgtgcgcattgcaccggtgcagccacactcactgctcccatcagatggcctaataatccaaanaacttaatttaaattttaaattttaaattttcaaacttaatttgagattgattttgagataaaaaaaaaaaaaaaaaaaaaaaaaaaaaaaaa

SEQ ID NO: 99623 - DNA, 289 bp, Oryza sativa
  Clone ID: PAT_MRT4530_97417C.1
tagtatatgcatttaagaggcaattgaaatgagggctacaagaagtgataatgtaaaatttgtatgaagcctaccaaaatggaaatcacaaattcgcacatacttattggagaactacatttcatagttcagatactgcctaaatgaatatgttgtactacatggtagcatgaatgtcaagagatatctgttctctagttgattcctaatagtaaggtctatatatttcttactttctaaaaaatgatatatgatgtaacatgccaccacatagcagcaatcagcaggg

SEQ ID NO: 99624 - DNA, 158 bp, Oryza sativa
  unsure (1)..(158): unsure at all n locations
  Clone ID: PAT_MRT4530_97418C.1
caccactccagccatgtggcgccgcgcctcccacctcctccgcgccaccgccaccgtcaccgncaccgcggtctcccgccgngtccctcacccacattccgnccncgaaanngcaatctccaccgttttgnccgncccaaagnttgantnatacttat

SEQ ID NO: 99625 - DNA, 249 bp, Oryza sativa
  Clone ID: PAT_MRT4530_97419C.1
atgggatattaattattgaattttgatagtaaatggaaatttttattattgtaaaaaaaaaagccaggggttttgaaaatatataaaaacggatgtggggaaattaggatgatcttacctggcggaaaaggaaattgggtttaacagctgatatttaaaacaggggccccaaaagtgcccctgggcggacggggcagacttgtaaaaaaagcgaacgggccttgtcccccccacgattcggcccccccc

SEQ ID NO: 99626 - DNA, 304 bp, Oryza sativa
  Clone ID: PAT_MRT4530_9741C.1
gttgctgctccatgccctgctttcccagtctgtgtgcacacactgtctgtgcccagctgccattcattgcacatctggcccaactgctgctggggcagcagtgctgtgttatgctgtcatatgtgtgctgctcattcctgcattcactctgctcaccttgacctctgcttgctgctcgtgtctgttctgtgacttgctgtgctgacgctggtactcactgctcacctcacacactgtgctgtgtacacctacctgtgttactccaccacgacactcacgtggtgatcacactgccatgtgcaaa

SEQ ID NO: 99627 - DNA, 675 bp, Oryza sativa
  Clone ID: PAT_MRT4530_97420C.1
atggcctccttggctatggcggtccccatgaggccacaaacgacgatgactagaagggtagaacctgggaggaggtcgagcgcgggtctcctcaagcgatggcggcaggggctcctctctctctctcttcctctcgttcccttcaagcccatgacttcctcggcaagctcctccagccaccagccctcgacgggcacggcagcggtctcaatgggtggactcggcggagggtgtggtgtggacactgctcactctcctccagcggacggggattgtggcggcgagcggggtggaattgaaggcccttcaaagcttgtttgccaaaagcgtccagctgcggatgctgttgcggagtggtgcgagctagctgctgccagcgtgctcgccggccggaacggcgagccatcttgtgccgacgtcgatggggaggatgattccatggcgagctgcaaaggagagagccgaggagcaaacccagtcggggcctccgcagtggaggttgaagctaccttggccaaacaagaaaaccacagctgcccccagaagacgaaaaaccgaataccaaggaaagaacaccgttcttctgtgttggtcaccagagaaaagttggacggccgacataacctctttgcatgcaaatctggtgaacttgaagccgcagacaccgaagagtag

SEQ ID NO: 99628 - DNA, 1089 bp, Oryza sativa
  Clone ID: PAT_MRT4530_97421C.1
gcacggcgtgggatcagaaataagttcacacagcctaataaacccctcgagaagacaagtgtaatcgccaggggaagcgcgcgagatggacgcagctggcgtcgccgcaaagccgtcgctgtcgaggaagccctcgccgtcgttccgcctccggaacggcagcctgaacgcgctgcggctgcgcagggtgttcgacctgttcgaccgcaacggcgacggcgagatcacgctcgacgagatggcgtccgcgctcgacgcgctcggcctcggcgccgaccgcgcggggctggaggccacggtcgggggctacatccccgcgggcgccgcggggctccgcttcggcgacttcgaggcactccaccgcgcgctcggcgacgcgctcttcggccccgtcgaggaggaggagcccgggaagcaaggggaggacgacgacgagggcgacatgaaggaggcgttccgggtgttcgacgaggacggcgacggcttcatctccgccgccgagctgcaggccgtgctcaagaagctcggcctccccgaggcccggaacctcgccacggtgcaggagatgatctgcaacgtcgaccgcgactgcgacggccgcgtcgacttcggcgagttcaagtgcatgatgcaggggatcaccgtgtggggcgcttgacggcggcgagcgaggccgccgtccttcgtcctctccccgtgtgtcatattctgaagcatctgaagattgatctaggagctataacattacccttggattgtttcagtcaatactgattcagtgtttgttgtatgttggtcataatgcaggtaatgatgactgtaatttcagtactgtttgtttaactcttggttttacccttcactaatctaggcatgtagccagataggtcttgtgcgcatctgtgtcattgtgttcctcctaatccaataagctttctgtatgtaagaagaacaatgtgacctatatcagaacaatggtctttttgttaattaaaattgtaataagcgtgtgcttggttactggtggaatgttttttttccctttgtatctataacatgttttgaacaggtatcattggtttgcccggg

SEQ ID NO: 99629 - DNA, 259 bp, Oryza sativa
  unsure (1)..(259): unsure at all n locations
  Clone ID: PAT_MRT4530_97422C.1
aaaaccaatcaactcatgtcntcatcccatccacctcgcttgagctgctgaggntgcngctgtgaaatanactactctattnctttttnacttcctttttctctcttgctantgtgtctgnaaattctgtganagcacgnaaaaaaaaaggaaaaaagatcganccgactcgancgatgtaattgttaancgctcgagatacacaagaantcaantcagcgatgccaaaagtacaancagagtaaaaaaaaaaaaaaaa

SEQ ID NO: 99630 - DNA, 464 bp, Oryza sativa
  Clone ID: PAT_MRT4530_97423C.1
gcttgcccctgctcctccggtgctttgtgtcacattcgggagcccgctgcttggcaatcaggccctgtctagggctatcctgcgtgagcggtgggccggcaacttctgccatgtggtctcacagcatgatgttgtcccaaggctcctcttctgcccactcaatgtcatccctgtgcacattgttgttggtatgcagctgcaccagttgccggtgcgcgcgcgccgtgcagccggtgtggtggccacggtcactgcccgcatggctgacaccaaccaggagtcgctgcggcagctgatccaagagcacgccggtgaggcagcaattgagcagaagcttgctgctccggaaatacccagtgggagcccataccggcctttttgggggcgtatgtcctgtgctcgccggatggtgcggcgtgtgtcgacaatccaacagcagcagttcagatgctatatgcaacatt

SEQ ID NO: 99631 - DNA, 388 bp, Oryza sativa
  unsure (1)..(388): unsure at all n locations
  Clone ID: PAT_MRT4530_97424C.1
cacgcgtccgataaatgttggttttttttaaaaaaacaaagatgtcagagaagccttaccagttgaaattgaagtatccatacagttatctaggaggagttattgggctgttaaccactttactatacattctttaatgccttgggccctatttatttttccacctcccatgtatattatttttttaatgcagtaaggtctagagttaggaagatttttaggggtactatatatatggctggatcggttattctcttgttccttttatgaggncctatgtgtgggaatgtcattaaagtcttgttgtgctaaacttacatccttttttaatttcactcctttcagatgagtatgtcatatgcaatgggtgcaagagtcctgataccat

SEQ ID NO: 99632 - DNA, 394 bp, Oryza sativa
  unsure (1)..(394): unsure at all n locations
  Clone ID: PAT_MRT4530_97425C.1
gttttgggtttttttttttttttttttttttttttacaagaatagaaacttggttttttacaaataacacagtgacgttctttgactggtaaacttacacaacaaataaataagcttaaatttttttttgaaataggaccaaacatttggcaacagggagaatacacagaagcatngttattttttggttagaataagatatgtattctttggggtgttaaaaataactttaaagttgaccaagataggtttaccagtatattggggcaagcaagtttgaggtgttggatgtaataataatattcatgtgttttaggtttgaagggaaaaaatggaggaacatgatctgaggaattttttttgtaaattttgaagattaaaatgaagggagtat

SEQ ID NO: 99633 - DNA, 301 bp, Oryza sativa
  unsure (1)..(301): unsure at all n locations
  Clone ID: PAT_MRT4530_97426C.1
gtgtgcaagccccagacccgggcngatgaccataggataggtgggttgagctgggctgctngacaaactgtgcggacaacccatgcaggcaagatgcaatggacatgtgtggagcctgcaatgtntggctgaacatgcggatgactgtggtggcagaactggagcagttgctggtggatggcagaaattgggagtaatctcatgtaaattcagtcattacagtaaccggagatggaaaccaggcactggaaaatctattgatattattaaaggaatagaaaaaaggacctcaaaaaaaaaa

SEQ ID NO: 99634 - DNA, 256 bp, Oryza sativa
  Clone ID: PAT_MRT4530_97427C.1
agaatgggcggccacagtggaatataggctgaagagagaacctattacattcccatgggcctgagacgatccaaaaactttattgggatgcgcagatttggtctaccgctcaagaaaccactgcggtggggcaatgcgacaagctacattgtggtgctgctatgtacacatggataagagtgattcatcatattgaagagacatgatgtacatcttgggagacgtatagatatctgtgctttagcatattcacaac

SEQ ID NO: 99635 - DNA, 754 bp, Oryza sativa
  Clone ID: PAT_MRT4530_97428C.1
attttacctagtataataccctcttcttcttctctctcgccgcctctgctgctgctttgggatttcgacgcctcgggtttcgtgcgcgatgaagggaggagcactagctgctactgcgcgtgtgctgtggattctttgggggggtccagcggatcgcactgcaggtcaggagctgtgatccatggccgctacagctaaacatcatgtgtgggtgtgtgtgtggcttgcctatgccctcttccctttgctgctgttgctgttgcttgtggtggtggtgaaaagattgcatcggcggtcgtgccgtaggtcgccgtggtccacgcatgctgccactcgcggatcagggattcagaggtcggggagatacgcccgctggcatttctctatctatcgatctctctctctcctcttcggttccagctcttcttgttgtttgtttgatggccatcaggccaagctaccaccaccagcacctccagcaggagcagtagcaggctagcagctagctcggtcgtgtagcaatcactagtacaagcagtacaacacctcgtagtacaagttgctgcctttttgcaaccacgtgaggaggaccatactgttttctttctttttttttctctctctctctctggataagaagagtagaagactgagctatgcttgtcggcatacatgtctgatattaattccatctctctcaagaaaatgaaaagatgtttgatattgactgtttatcaaaacaaggcttcttttt

SEQ ID NO: 99636 - DNA, 156 bp, Oryza sativa
  Clone ID: PAT_MRT4530_97429C.1
atgccaaatggtggtggaggtggcctggaagcagtgagcgacgatgggtggtgcggctgccgggagggtgtagagatcgccacgactattgcaacaaagaatcacgcgtcgggtctggaggtagaaaggaagaaccacgacatgtacccggaatag

SEQ ID NO: 99637 - DNA, 1290 bp, Oryza sativa
  Clone ID: PAT_MRT4530_9742C.1
atggggtgtggagctctgggtggacaacaagcggtggccggtgaggccaaaacagcaagggtggcagagcttggggaatcctacatcgactctgacttcccaccttgccgccccgccactgccgttatggagaagagggatgataaacggaggagcttatacttggtggcgcggtgctgcctgaagcagatggctatctacacacctactgtctgtttacaacgctgtacttatagcttgtattctcagtcttgtcagttacaaggagggctgacacagggcatggcattatggaagtattctcgttcacaagcagtcggttatcatgtaaagatcagattagttggtttgcctcctaagatgaacataaaatcactgcgaacatgttttgccagttcggggaaacagttgtgtggcagacaacctgcgagggataatattctaaagctaaagcttgatgagccctcacgtcagaagttgtatagtattctctgggattcaagaagcataggacacaaagttggagctacaggcactggacttttcctaagttttgcagttcctgcgaaggcaaatgctgagggtcctgtggacaataatactgatagcccccaaactactgaatcgtccactagttatgctcatgggaaaaaagtttgcacggattattctgttactgcatgcatcgtctgctcacttgtgtttgattcacatggtaaccctcaggcattcctggagatggaaggtgcttgttccgatctgtggctcatggtgcatgtattaggtcagatactaaatgttgctctggaagcaacgcaaccatttctggtcgccgatgaatttatcaagagacgggcagagactgaatggtttgttgagggggacttcgatgcatatgtctctcggattaggaagccacatgtgtggggaggtgaaccagaactgttaatggcttcgcatgttcttcggatgccaattactgtgtacatgcatgataaggaagctggtggtttaatagcaattgcagaatatggtcaggagtacgggaaagaagatccaattcaagttctttttcatggttttggccattatgacgctctacagataccaggaaagggtggtccaaggtcaaggctgtaacatttggagctcagattccaacagtaagttttgaaccaacctttgtttccctttcttttcccagtacgcttgctgtccaaatgtaaccagaatctaccctcaacaaatttaaaatgctgcgatgttccaagttccaaaaaaaaaaaaaaa

SEQ ID NO: 99638 - DNA, 222 bp, Oryza sativa
  Clone ID: PAT_MRT4530_97430C.1
atggagttggttcagccggggtgtccggttgatcggcttccggattcaccacggcatgaaaggggggctgcccgttgcctgctggggacgggggcgaaccctaagcaagagggatctagcaccatctctgatctcgatgagttcatattcgaggaggaagactaccccgtcatcgactacgagttggttatccatgctgccaagtcgacgacagctagatag

SEQ ID NO: 99639 - DNA, 240 bp, Oryza sativa
  Clone ID: PAT_MRT4530_97431C.1
tcagtaaatagcacaattgccctgctcggcataagtttgcctcctgttcatttgacataagtacttggtgataattatatcgaccaggacagtactagccacccggaaatcaaccaattccgctatacgtattgaggcgtggggtgccaggagcagcacttcgaccttaggtttggttttgccgggctttacaactaacggtccgacgtcggggtcagtagaccgcaggaatgtccccat

SEQ ID NO: 99640 - DNA, 297 bp, Oryza sativa
  Clone ID: PAT_MRT4530_97432C.1
atgcaacagcagggatggagctacgccgaagacgaagaggaagaagagcaggaggtagcttcagcggccgccattggcgagagggcaggagggttttattctggcgggcatcgcatatgtgcgagattgcgagagtggaggaggaggacgagtggaggtggaggtggcgcgcggctgcgcgccgccgcaaccaaaggagacaagcaaaggaagcaagcaaaagaaaaaaagcccgggaatttacctggcgggaatgccctacttggcagcgccgcccgtctctctccacaaacgccc

SEQ ID NO: 99641 - DNA, 414 bp, Oryza sativa
  Clone ID: PAT_MRT4530_97433C.1
atgcggcagcttcaatctttcactaacaacaaaaatcagaaaaaatcaaaggagggcgccaccactgctggtcaccactgccgccgccgggccaccaccacctcctgctgccggaccaccgccgcatgcaccccctccagattcgacggagggagggcgccaccactgccggtcaacaccgccgccgtcgggccaccaccacctcctgccgccggaccgccgccgcatgcccccctccagatccgacggagggagggcgccgccgcctctcatcccgccgtcgggccgtgccgcctcccctccgccaccggatctagcgaacgggagggcgccgcgcccggccggccgcccctcccgcccccgccgggccacagccgcctccacgccaccggatctggcggaggcgaggcctag

SEQ ID NO: 99642 - DNA, 270 bp, Oryza sativa
  Clone ID: PAT_MRT4530_97434C.1
aacacatcaaacagtcgaaggagtccaatcacataggcagcaccatccgagcacagggggaggcaaagtggcctatccaactatcccactatcaaaagagaggactatgtgaaccgagaagaccgagcatgccacactgcagaacaaaacaagcacaacacacggcacattatacggtttagcaacagttacccgggaagccatccaaatgggatgacgatacaggctgaaagatcatgaaaaccactgagaaaagtgctggattatgaa

SEQ ID NO: 99643 - DNA, 559 bp, Oryza sativa
  Clone ID: PAT_MRT4530_97435C.1
actagtggatccccgggctgcaggttgaatttaccttgcaatcaatccaaatgacaatattgccgaatattccaactttgaaatctgggccagcgatcctgcatttccctcaaacgtgtttgttgctaaagttgcacaatccctctgtgtcttggcatctggaccttcgacttacttgattgttcagtttgtcattccttgcagttggaatgctgcaggattgacaacgtttacgttgacttacagtcaaacattggatagcgatgaaaaggtccttcaatttttgtcaaaatcaattacgattggctcaaatgttgcttgcaacttgtcattggtgctgaattatccaggaacttgtccacttccttacaatcccagtgactgtggttgcctcagccaaggaaacggtgcctctcttgctccgtgcggtaattgtgcagcatgtccctcgcttgcatttcagggaactggctcgtttgttcctggagacaccctcaatttctacgctcataatggaagtatttcttcgtttaattcggtatttgggacaatatctgat

SEQ ID NO: 99644 - DNA, 579 bp, Oryza sativa
  Clone ID: PAT_MRT4530_97436C.1
atgatgctgccgccgacgccgacgccgccgccgcacctccccctcgccgcctccacggccgttagcttcaccccgcgcgccgccgcccagcgcggccgcggccgccgatcgaagcccaagcccaagcccgtcgcgttcccgccgccgccgctgcgccgcctcgtctcgtcctccctccgccgcctcctcccgcggccgcgccccctcaccgtcctcttcctcggcggcggcggcggcggtgggggatggttcgggatggggggaagggggaggaggagggcaacaccggcggaagagctcgcggcgctggcgctctccctggcgctcggcgacaagctggccgtcctcgccgactactggaacgcgtcgggcctcggcgaggcgctcggcgtgtgggcggcggtgtggaggagaggaggagggaggaggaggcgaggcggcgggctccggcggctcgcggcgctgctgctcgggatcgccttctgcgccctcgtctgccatttgaggggcgccgcgctcgtcgacggcctcgcgaggacggccggtggccggaaactagcgcggattttcctgcattga

SEQ ID NO: 99645 - DNA, 213 bp, Oryza sativa
  Clone ID: PAT_MRT4530_97437C.1
atgcacgtatttgtccagttgaccttgcatttctctctgatgatgttccaagtgccagcccgcaggaagcgctgccgctacttgtgcaggtgctccaaggcgtcctttgacatttttagccttcttcattctatcgaggataagagggagtcccagatacttaagcaggaagtgcgctctcacatctgggacgccctgaaggactccctctag

SEQ ID NO: 99646 - DNA, 2302 bp, Oryza sativa
  Clone ID: PAT_MRT4530_97438C.1
cgtcaacaccctccttgaaagatctcgtctttgcgcaagctaaaatcacagatgctttaagtaaaaagctagctgctaatgacaaggtcttagagaacataaatgtcaagctagatggctttgcttctgtatttcaaaaccaactaagctttaacaagatgattgaaacccagctggctcaattagttgcattagtacctgcaactgaatttgggaggattccagagcagcccgaatcctccattaaaaatgtcaaggcgatcacaacgaggggaggtaaatccactcatgctccgccatatcctaaccctgcagggactagcagtatcactaaggaagcgccatttggtaattcggctgatgaagaggttcagccagagaaaactatgccgcaggagtattgcgacacacgcttgctgccatttcctcaacggagtaggaaaccgtcagtggatgagtagttcgctcgttttgttgaagtgatctagaaaatccacatcaacgtgccgttgtggatgctatgcaagtgccaacatatgcatgatatctcaaggatatccttaacaacaagagaccgctcccaacaacggaggtggtcaagctgacggagcagtgcagcaacgtcacactccacaagctctcggacaagaagaaagatccggggtgtcctacgatcacctgctcaatcgggacagaacagttcgagcaagccctgtgtgatcttagagcaagtgtcaggtcatcccaaaggacgtctttgacaaacttaacttcaaggaagaaaagtttgagtgtcagccaaggactgaacagtgctccatggtcagaatcaaaatttcctagtgaagaaaacaatgtttcccagcaactgtcattggaagacgctggtaaaatctagtataccggccaaaaagttagagcagccggctcagaagaagccgtcttccacaccaaaaccaaagaaggtgtggaagtaaaaaccaaagacacccactccatcacctccggagatgggtggaaaattcgcgaactgaaccgaaagaagtttgctctttaattcattcagctttgatagtttccctcaaaattcaaatacttagttgcatacatacaagttgctttggtgaaactaaccggcggaacgaggaggcgattgtctcgtctgttcaagggatccggctcttcatcaagtcatcatgacgagtcaagtgctcgttcatcagccgatgtctcgatggaggacgccgacgttccgcaatgtctcttgagcgacgccgaccttgaccttgtcgacgattgggaaagacaagcctactacatgctgagagaccgggagtatgctcacacgcgagaatactctccggagctgctgaaaaacataggtatggatactgactttcatgctatatggaaagctgttggttggcagagatttgttgtggtaaatgagcatggttctcgtttacttactttgcaatttctgttcaccttgaaagaaacaacagaagatggtatttcctttcgctttttccataaggaacacacaatttcatagaaaggattaagtacacttcttggttttcacgattcctgtaaaatcgatctccagaaaggaatttccgggttcgagaaaaataggttttgggaagacatttctggtgcttcaatttacaagaaacctaggacgaataatatccataatcctacacttaggcttatgcacatatggattgctatgactctgtttcctagaggtaatcttagacccattaggggggattaattaattatcatgtttaccatgaccatagaagaatctcgtgcaggtggaacatacagggagacacgcaacatggcaaggaatgaacaagaaggttcatcatcctcaacacccatgcagatgtatgaggcaggttgggagccaactggggatgcacccggatggacccaggctccacgccacagcatcggagtctcaagctgggcaagtgctagtgaggaccgacggcatgcccctcataatatacagtggggagacatgagcaatcaaccccccagatcgagtggtatgactccatctctaggtgaatggcgctcaagttcctctcgttgggacttgggtgaaatcaccaggagaatgaatacccttgatatgcagacgggagagatcaggggttcaattcttaccaaggaccctgagcgaaagccaagcttggggggagacatctttcccccactaatagttgttgcgagatatgagatagtaaataagagttgttatgatcctagtctaagtttgact

SEQ ID NO: 99647 - DNA, 533 bp, Oryza sativa
  Clone ID: PAT_MRT4530_97439C.1
atgggcaacgcacacggcgaggacaagcgcggggaagggcggtcggcgaggacagcgcagtcatcggtgctcaggaccgcgcggggaaggagccagttgtgggtggcggagggggcccgaggacgacggcggccggcgacggaggcggaggctaaccgggcgcgcggggacgcgcggtgggcggcgggctcctcctcctcgtcgtgggcgcgcggggatgcgcagtgggcggcgggctcttccacggcggtggcgcgcagggacacgcggtgggacaccgccgccacgcgcgtgctcctcctctgagccgtcgcgccgcaccccgtcccacctccccgtgccaggatcagcgacggagactggcagatgcggttccacccgaggacgtaggcgtggatggtgaccgggaatcccgctccaccagccccttccactcgccaatcccgctccaccaccccagatccaaacacgagctcggtgatgcctggaaggaggagacaagcggcggcaagctcagcgcggcggcatcgtag

SEQ ID NO: 99648 - DNA, 1302 bp, Oryza sativa
  Clone ID: PAT_MRT4530_9743C.1
ctcgcctctcgtcttctcccccacaaaacccacacactcgcgcttggctcatcggctgcctccgcgagccgcggccatggagctcgccaccgccaccgccgccgccgccgcctcctccaccacccgtgctcaccgaccccgcagctccaggctcgcagtcccgacgagggacagctgctccctcctcccctcctcttcctcccgccagttcgccgcgctctccacgtacggcggcctccaccgcctacgcggtacacggcgcgcagcggcggcggctccccgtacgcctccggccgccgtcgagctccgggaggcctacgtcgcagggcggagactccgtccgcgtcaccgagacgctgcagcccggctccagtgtcaagttcagtgtggaggtgcctccttccatatgccagcaatgctatgaaactactctacaagagtacgcaaagcgcttcaagattcctggatttcgtcccgggaaagtagttccagagaacgtacttataaactatgtaggaccaaaacacgtacaggatgctacagttgaagctatcttgaggcatacacttcctcaagcattgtcctcggtagaggacagggcattagaagattctgtacgcattctaacaaagtttgaagatatggcaaattcattctctcttgataatgtgtttagatatgatgtttctgtggatgttgcccctgaagtgagatggttatctgaagataaatataagaacctcaaagtggtcgttgaaatagatgaaattgttgatgctgaaaaggcagctgagatagaacttaaacgtcgtcataaagctctaggattactccgaatagttgctgacagaggactgcaggtaggtgatctggtggtactagatatatttgcagaaagtattaccagtgatggctctaaaggtgaaaaaattccatcagctgtcgctgccgctttccacttggacactgaggaaaacaataaccttgttcctggttttcttggttcgttaattggtattcgtcctggtgagactagatcatttcctcttcaattccctgagtcctttgaacaagaaagtctgcaaggtgtccgtgctcaatttactgtggtgtgcaaagagctcttctacagagagttgccagaattggatgactcacttgctggaaagctccttccaggctgcactaccatggatcaggttcgagaacgcattttgcaaagatgtaaagcaggggtgaaacccgctcttgtacacgcgccacagtgtgcgccctcgttctccgtggccagcgagttgaagc

SEQ ID NO: 99649 - DNA, 626 bp, Oryza sativa
  Clone ID: PAT_MRT4530_97440C.1
aaaccttacaacatcacggttaattaaaggaaaacgggcaaaaacctcgacattgacaaactgaacctaagtacagctatccaataagagataaactcctagaacgaagccttcaagaaggtcacgccgacagaacggcgacatcgtccgatcctaacgaatctaggtttttacccggagaaaactcttgaagtggagttgaacgagggctccagtagcaaacgccttcaagaaagtgaacggcgcccaagggcgtcgccgttgctagcaccgagagcggagcaagactttcgccttggagcacccatcaactatagcatccacgacgggagctaccaaatgtcacctacacaccgagggtacctgcaatatgcacatcacctgcacgacggccggacgccaaaccaccccgtccccactcgaggacacgccggatctgggcaagggagccagatccggccgtccccctcaccaccaacgccggccgacgcctagaggggcgccggaggacgccagtggccgccgcggggtgcctgcgtgctcacgccaccgccgggcgccgcgccgccgccggatccgcggcctccaccaccgccgtcccaatgccgtcgccaccggacgcgtgg

SEQ ID NO: 99650 - DNA, 261 bp, Oryza sativa
  Clone ID: PAT_MRT4530_97441C.1
atgccgccaaggtgcttgttagtcagttgcaccaccacaaggaaggtgatggtcgtctttttcgccggtgaagagataaatggaggtggcggctgcaacaaaaatgggatggagaagatccgaagccagcaagctcgaaggcattgggacctcaactggaggcttgtagtgctcaacaacagtgatggtgaccgcaatgacatggcctcaaaagcgtggatccacctccgtcaagcctcaggagcatggatcaggatctag

SEQ ID NO: 99651 - DNA, 333 bp, Oryza sativa
  Clone ID: PAT_MRT4530_97442C.1
atgacttcaggcctccgcatgtttgaggaactccaagatgttgattaccttgtaagttgttcataattataggtatgaacaggtagtttgaatatttggctacattcttttgttgcttgatgctttgtgtaattttggcaggcaagaagctgtagcagagccatgaaggctgttggtgttgttgaggcatcctgtgaggctatatttcaacttgtgatgagcatggataccacccgttatgagtgggactgcagcttccagtatggtagtctagtggaggaggtagatggtcacactgcaattctgtaccataggctacagctggattggttc

SEQ ID NO: 99652 - DNA, 1296 bp, Oryza sativa
  Clone ID: PAT_MRT4530_97443C.1
atggggcctcctcttctgccgtcgacgtcgtgggtgatcctgagccgggaggtgtacgcgtgcggcgacggcgacggcggcggcggcgggatccccctaccggagggcgccgacctcgccctcgagctcgccgcgccgccgcgcgtctcgaagctcgccgtgtcccggcgcatcacgccggccaaggtgagcccctttgccaagtggaagtccttcgtcatcgcgatcgacccctctgcggggctcgtcctcctcctcgcgccgccgcccccaggacctggtcccggtgagctgcggtccttcaccgacgccgacggcaaggtgcacacgtaccacgtcaccaccatgccgacccagcgctacttcgtctgcgacatcgccgcccgcaccgcctactacctccccgaccctgagggatgcgtcttcaacaacgatctgagcatcatcgccgcgccaggaggtgggggaaagtacctggtcgtcgagttcaagttcatcgttggcggcgacaaggccaccctcctctgcttctcgtccgagaccggcctgtgggagaagaagcccgtcaacaaccccctgccccgctggatctggagatgcttcgacgtcggttcctacgccggcaagctctactgggtggacaccgcggcgggcctcctcttctgcgacccgttcgtcgacgagccgcacatggagtacgtcccgctccccagggtcgagctcccgccagaacacgacgaggactgccacggctgcgactactgcgccgagagagcgttcgtctcccgccgctgcgtgcggctgagcgacggcaagttcagggaggcagggaccaaggtgtggacgcttgagtacgccgtgagcttcgccgacctctgggccagcgagagctacaaggcggctgggctgccggagaaggccccggtgctcgcgctcgtccaccccaagaaccccgacgtggtgtacttcttcgtggaggaccagctcgtcggggaagaaaatttgagattaagtttttcgcgggagcgtaagacttcagtctcaccaaattttcttccgctcgtcggcgtcgacctgcgcgcgaaggaggtcctggagtatgagacccacaagatgaccgtgccggagaacgcccgtgtgtttccttacggccttcttccaatggtgctcccgcccgcgctctccgcaggtttgtctaaggagggtgctacctctgcgtgtgataaccagttggatgtaggcattttggatctttcaaatgttcgcattttggagttctcttcgcctgcctcttga

SEQ ID NO: 99653 - DNA, 642 bp, Oryza sativa
  Clone ID: PAT_MRT4530_97444C.1
atgaagttgagcacgtttgcgacagcggcaggagcagcagccgaccgcagccgtggcggcggcggcaagcatggcgtccgcgcggcttcacgcgtcggcgcaaccggcggcgtcgtcgccggagacatggctgagctacagctgcgacgagcacagccggcggtgggcggaggagagacggtgtaccaggagtgccccaagaaccacgcagcgagcctgggcggacacggcgctggacggctgcgaggagttcatgccgtcgtcggcggtgaacccaccgacccgacgtcgctcatgtgcgccgcgtgcggctgccactgcaacttccactgctggctgctggaggggtccccgccgccgcctccgccgctggcgctgcccgcgccgcccatgccggcgaacgtgctccacggccagctgcaccgcgaggaggagacgcccgaggtccggctccctggggttgatggcgacgagtctgacaacaactcggatggctcggaatactacgacgagcggtctgtgtccccgccgtcgccaccgcacctgccggcgccggtggtgcaccagccgtattacccttcggcgcagcacatgctactctcgctgggctcgagcgggcaggcgcaaaggctcccgctgtag

SEQ ID NO: 99654 - DNA, 1146 bp, Oryza sativa
  Clone ID: PAT_MRT4530_97445C.1
atggcgcctccgtcgtgggtgatcctgagctgcgagccgcgggtgtgcggcgacgacaccgtcctgccgcagggcgccgacgtcgccctctccctcgccgcgccgccgcgtgtcgcggtgctctcggtgtcccggcgcgtctcgccggccgaggtggacccctgcgccaggtgcaagtcccccttcgtcctcgcgctcgacccctccgcggggctcgtcctcctcgtcgcgccgccgccaccgtcccccgacgactccggcgacctgcggtcctggacagaccgcgacggcaacgagcgcacgttccgtgtcagcctcatcccgcgcccgctctacttcgtctgcgacgtcgccgccgccaccgcctcccacgtccccgacccggagcgcctcatcttcaacaacgacctcggcgtcatcgccgcgccaggaggaggccgggggagctacatggtcgtcgagttccagttcatcgttagcggcgacgaggccaccctcctccgcttctcgtccgagaccggcctgtgggagaagaagcgcgtcaacaaccccctgccgcgctggatctggagattcttcgacgtcgtttcccacgccggcaagctctgctgggtggacaccgcggcgggcctcctcttctgcgacccattcgtcgacgagccgcacatggagtacgtcccgctccccagggtcgacctcccgccagaacacaatggagactgccgcggctgcggctactgcgccgagagagcgcttgcctcccgccgctacgtgcagctgagcgacggcaagttcaggtgcgtggacatgggctcctgcaagcgacgcgagagctacaaggcggctgggctgccggagaaggccccggtgctcgcgctcgtccaccccaagaaccccgacatggtgtacttcttcgtgaaggaccagctcgtcggcgtcgacctgcgcgcgaaggaggtcctggagtacgagacacacaagatgaccgtgccggagaacgcccgtgtgttttcttacggccttcttccaatggagctcccgcccgcgctctccgcaggtttgtctaaggagggtgctgccaataattcgagtggtgtgagatctgcgtcactggcttccccgccatctgatcccaatggatcctag

SEQ ID NO: 99655 - DNA, 793 bp, Oryza sativa
  Clone ID: PAT_MRT4530_97446C.1
ggcctgtcagggagggcgggggttggggggacccccttacgggggccccgttacactcccaccccagggtttcaaaagactggaggactcccacccgcgggttgggcggccgtctaaactatggatccccggctgcaggctgcccatgcatgggggatcacagcctggacatcctcctccccggggcccttttggatcctggggtgagtttttcatggggccctccctaccccggttcaactcccgaaaaaaagggggtgggttcccaaaacccccctaaacgggtgtggggcccctttccctaaagggggggggggggggccctcttccccccccgaagaaaaaaaaaaaccccccgttttttaaaaaaccgggggttttttaacccccgggggggggggggggattttttccccctcgcgcacaaaaaaccaggtgttttttttgtttttaccacggcgcgggcaaaaaagggggccgcccccctcttttgtttttagtgttggggcggaagaaaaaattttttcccgccccacatcataaaaatagaaagcaagggcaactaagatgaagtgagttctcttcctcgggggggagggggggcggccgcaggcccaacgcccagcttctccttaaagtggcggcgcgtggtattatgttatgcgccccgcctcctgcggtgggggtttgtttagtacaataaacagcagtggtatggaggtgagaaacagagaaggaggtgagctcgatagttctctgttctagctgtttgtttggagtacatagtagcttc

SEQ ID NO: 99656 - DNA, 860 bp, Oryza sativa
  unsure (1)..(860): unsure at all n locations
  Clone ID: PAT_MRT4530_97447C.1
attacacgattgtacacacacacacactggaacacgacacacgtgttacacccggncgaccgncttccgcccgncggacacnngcctggcttaacttactaccncccaccaccctactgnncggttggtaacacgaacnggncccaaacgancaaccggactgttgccttaccactttggcacttacanacgancccacacttccctaacacctactancttggggtanaccgcccaccacctttgggcacggaacacngaacgcttnccacctnctttccccggtgncctcctccccnaacctgactgttncctangcacacacctggcctaacttcgnaactactccaaaagaccganccgaacgaggcctacacgaacgaggcctccacacaggccactaacactaacgaacgcgaacgaactcgaacgctttcccggggtggccacttttacacccctcccaancattccaaactaacacaacgaacgccnaaccccacccgaaccgttnttactaaaccttgccggggcaacgaaccctcccctccctttaacgaggtttccggggccctttggcccgagaaactaaacaaaagaaaccctaaaccccctaaacaaaactaacaacactaaaaaaactttggcccccacgcccacacctttgggtttttttggccctgggcctaacttgttaaccctggttcccacgtttcctttttccgaaccctaacccttgaacttgaactataaacagccccctccctccctttataccttcccctttaacaaaaaaaacaaaaaaacaaaaaaaaaaaaaacacaccnggggttccccgcccgggggccccgccccaccc

SEQ ID NO: 99657 - DNA, 262 bp, Oryza sativa
  unsure (1)..(262): unsure at all n locations
  Clone ID: PAT_MRT4530_97448C.1
tatactagtcagacgcccttcctttttttttttttttttgntntaataatttacaactttattatattaaacattttttttttttaggggggggcggttttccatgtgattttttaaaaccccgtacatttccatttaccaggggttttccgttccataccgccaggcaaatttttttcccaggaaccaattagctaaaaatttttttacacaatcaggtccattgtacttttttcataaaccaaccaaattatattttttt

SEQ ID NO: 99658 - DNA, 368 bp, Oryza sativa
  Clone ID: PAT_MRT4530_97449C.1
gggggggcggatcatccgtacggcggaagcggctcgttcgaggaccgtggtgacggcggcgtcgccgatccagtctgtatcggcggtgatggtgtcgacgccgactgcggagacagtggcagaacaagggctgtatactacgtcgctgctttcagatgctttaatttgtgacgttgcttaatggttcacgccatgtctttctcagccatatccatcatgtcagcacgacagaacctgattcgcagacattcaagtactcttttcttgaaagttggctgttcttcacattcatctatgctgttgctacctaacagaagaaaccatgtagattatgtcattcagattgagctcggaccacctgatgagcc

SEQ ID NO: 99659 - DNA, 5867 bp, Oryza sativa
  Clone ID: PAT_MRT4530_9744C.1
ttaaacagaatctcgtcctcgagattcggaagcactggcgatcagatgcggatgagctgacttcaattcatcttctcgttcccaagttgattcttcttccgagtgattactccattggactttgcaaaaacggataactcgatttctggttcttctctcatctatttccaagatatggattggtctctcaacataggtcagatcctcttggacttctatatgttcaagattagcttcttcggtaggtacccttaaacactttttcaactgcgacacatggaacacattatggactcctgccaaagattgaggtaactccaactgataagcaacctctcctcttctactgataatcttataaggtcccacaaaacgcggtgccaattttcctttggtatgaaaacgatgaacccctcgaagaggcgtgacacgaaggtacacataatctcctgcgtcaaaacttagatctctacgacgattgtcggcataactcttatggcgagactgggccacacgcaatctttcttgaatgattttcaccttttcttctgcttccctcaagatatccgtcccgaaaacctgacgttctcccgtttgatcccacaaaagcggagtgcggcacttccgaccatacagtgcttcgtaaggagccatctgaagactagcttgataactgttgttgtacgaaaattccgcataaggtagattcttatcccaacttccaccgaagtctaaagcacaagctctcaacatatcttccaaaatctgattcaccctttcggtttgtccgtctgtctgtggatgataagcagtactaaagttcagcttagaacccatctcttcctgaagcttcttccaaaattttgaagtaaactgactgcctcgatcagacactattttcttagggacgccatgcaaacacacaatccttgccatatacaattccgccaaccgacttccagaatatgttgtctttactgggatgaaatgagccactttggtaagtctgtcgactatcacccaaatagagtcatgacctgatgacgttctgggtaaaccagtgatgaaatccataccgatttcctcccatttccattcaggaatcttcaaaggctgcaacaaaccggcgggtttttgatgttctgccttgactcgctgacaaacatcacatactgctacgtattctgcaatttcacgcttcatacttgcccaccaaaatctttccttgagatcctggtacattttggtactaccagggtgaatggagtataaagtatcatgggcttctttcagaattgcatcttttaaatctttgttgtcggggacgcagattctctcacccaaccatacagttccttgctcatcttccaagaaaccgatagcttttcctcttctcatattcttcttaatttcttgaatatcaggattattaatttgggcttctctaacttgatcaattagagtgggcttcgcttctaaggctgcaacgaaacctgtactgacaattcccaaatttaatctttcaaattccttgcataattccaatggcaactgtcgtccttccgtagcattgcaatagcctttcctgctaagagcgtctgctacaacattagcctttcccgggtgataatgaattcccatgtcatagtccttaattaattccaaccatctccgttgtctcatgttcaaatccggctgagtaaagatatactttaaactcttgtgatcggtatacacctctgtacgagtaccaaaaagataatgacgccaaattttcaacgcatgaactactgcagctaattcaagatcatgagtagggtagttcttctcatgcggacgtaactgacgagatgcataggcaaccaccttcccatcttgcatcagaacacaacctaaccccagtttggatgcatcgcaatacacttggaaacccttctttggatcaggtaaaatcaaaataggagctgatattaagcgattcttcaactcttgaaaactctgctcacattcttctgaccacttgtacttcacatctttctgaagcaatcgtgtcatgggcttagcaatcttggaaaaattttctataaacctccgataatatcccgcgaggcctaggaaactgcgaatctctgaaactgtctttggttgtttccagttggttacggattccacattactaggatcgacggcaactcctcctgctgagatgacgtgaccaaggaacttcacttcagacaaccaaaattcacacttactaaacttagcatacagttgatgttctcgtagcttttctagtgcaaggcgaagatgttctatatgctcttctttggttcgggagtagataagaatgtcatcaataaagactaccacgaacttgtctaggtattccataaacaccttattcatcaagttcatgaagaaagtgggggcattggtaagtccaaaagacataacagtacattcaaacaatccatacctagtggtaaaagctgtcttaggtatatcttcctctttgattctcaactgatgataccctgatcgaagatctatcttggagaaaacggtggcacctttaagctgatcgaacaaatcatcaattctgggcagcggatacttattcttgatagtcatatcatttagtgcacgatagtccacacacatcctctgggtatggtctttcttttccacaaaaattactggagctccccatggggatgaactcggtctgatgtatcctttctgaagcaaatcgtctacttgcctcttgacttctgctaattcattggctgccattctataaggtctcttatggatcggagttgttcctggtaccaaatctattctgaactctatatcccttttaggcggcataccaggtaaatcatctgggaacacatcgggatactcccgaactataggaatctcttccaaagttatttggttcagtcttgaccttaaaaactcaggagacaatgcatgcacagttacaactcgaccatcattgctggtgagagttatttttctgttagcacagtctatcacacctttatgtctggctaaccagtccatccctaggatgacatcaaggtctttggattctaacaggataagattggccagaaatggtactccttgaatttctattctgatagaaggggccaaaatcacatctggagcaccttgagtttctgcagcagcaacatgattgacacgggcctttgatgctggtgcggtagagttgctctgggcagggacaaccttcgcgcgtcggggcttcggacacttgtcagcgtaatgtcctggttctccacagttgaaacacaccacgggcttgctgccttgctccttcttggcaggttgttgctgtgtcaaagctgcaacagggcgtggagcttgattgcggatgttgttgccagcattgttgttgaagaactgacgctgcggacgaacaacagacgaagaacctccctgtggcatggactggggtcctaaagtaagacgcggcctctgattattcccctgttgcgtcatgaaatgagcaatccggcgtttcttctgctccatgcgattgtatttgtcctcctgacgaatagccttatccactaacttatcttccggagcataacgagccagacgattgaactcgtgcagatactcggtaacagagcgagatccctgggtaagcgacctgaattccttcttcttgagagacaccactcccgatggtatatgcgtcttccggaaagcagcggtgaactcaagccaagtgataggttcagcagtaatcctattaaggcggaagtgatcccaccattcagaggcagggccatgcagctggtgtgatgcaaatgagaccttctcctgatcggtgcactgaagcaaatccaacttcttctctatggcatgcagccaatcaccagcttcaacaggattagcggtactagagaaaataggcggcctcacacgaagaaattctgctaacttgttctggggaggtgcatggttatttccctggttctgctggttctggagttgctgcatcatcatgttcataagctgtgtctgttgagcaagaacttgggcaagagttgggttcccttcattgttattgttattgttactattggggccattcccgttgctgcgagtgagcaccatattgacgaccggaggatctgctagggctggggtaacttctttctccaccacacggacctttggcaccaattggtagcgagggacaaatagagctctcttcctcgcggtgagacgaaccctggccttctgcggtggtgcttctcccttcaatacggctagttccttctccaaacgatccaccttgtcctctaacttgcaaatcttaccacgattccgatcttcacgatcttgagccgctaacacagtctccgcacgggtttcatccatagcccacagcatctcaaccaaatgccttgtggtagcatcattctcaattccctcagtctcaaggtagctgccacggtcacttccctggggttggcgaggatggtagcgatactcagtgtcggccaactgatcactgtagcgatcgcggagctctcctatggcgatccttgccacctcctgacatgtatggatgtagtttcttcctccggcttcgaacatcactgaggggatatcttcactattactgttcaaggtgactttgactcggcacttttcttcgtgacgatcatgaggaatttgggcataaaaaggggcagtcccaaatcctatggcaaaggacatcgtacgcaactcctggacaaatccctcaacaccaaacaagtactcaggcttgtagcgcggcatcctgttgtataggcccaaccattctgaacaaccatcccggctgcacagtcctatctccaaaccaggaatataccattccaaaccaggagttgccttgctggccttggaactcttcaaactcttctcctgcgaaaacggactctccggaaacgacggaatgggagagggcgacgatgacgtcggcgatgacgtcaccaccggcggcggcggctcggcggctcggacggctcgaacggcacacgctcaccggcgaacggcggcgcggcggcgcgaacggaaggcaccaacgggtagcggacggcacggcgaactcaccggcgaccaaagcgacggcggaagaccaacggacggcgacggcgacgaggttgaaacggcggcgctcttcggcttgacgacggcgacgatgctccggcggtctccgacggtggcgaagtggcggacgaggacggcgacgacttggcgaccacgacggcggtcttcccgagcgacgacgacgacctagacggcggcggcgcacggctggagcgacggcggcgacggcggcgctagggcacacggcgctagggcgctacgggcgacgagaggcgaaggcgaaggtggcggcgggtagaggagacaccggggaagcttataaaggggctaggaggcggcggcgaaggcccacggcggccggcgacgagaaggaaagttcgggaaaaatcgaatccgaaacaaactcgaatccacgaacttccaaaacgaattagccgatgtttccaaaggagaaaaggtagaggagatcccgaggatcatttcccctctatcaattcggccgaagacggaagggagcggccggattttggaaggagacggcggcggcgctcggctagggtttcgggcggcggccgacgcgaggaagacgacgactgacaagcgggccccacctgtcagcgacagcgagggcgcgcgcgcggctgcggactgggccggactgggccgaggagagagagaagagaggttttgggccgactttcggcccaaagccaaaagaagacttt

SEQ ID NO: 99660 - DNA, 258 bp, Oryza sativa
  Clone ID: PAT_MRT4530_97450C.1
gggggggaaaaaaatagaaccccctgtaaactttattaaatttttttcatgggtgaacagttttttttaaggaaccgcgatttgctatcatcctgtttctttgggaggaaacttttttcgatctttggccttcttgtgaatgctgggctttccaggggaaaaaaaaaatgggcaaaaattgaaagaatggtcctttttgaccggaataaagtcaatacatccaaagctaggatgcttctacctggattgaagaatttt

SEQ ID NO: 99661 - DNA, 693 bp, Oryza sativa
  Clone ID: PAT_MRT4530_97451C.1
ccacttcctcctctcatcgaagctagctgatctgccatggacgctctctcctgcctggcgccgcacgccgcgctgctgccgtgcgcggccttcaccgacgccgacatcacgcgcgcgctccacttctcctcctccatgcccgacacctcctcctcaccctcctcatcctcctccgcggccttcctcgccgacttctgcggtggtggcgccggaggagggttcgtggtgtcggcgccgccaccgacgatgccggcgatcacctgcgagtccgttctcgtggccgacagcgcgcgcccgtcgccggccgggcctgcgcggcggcaccagcagcagcagctggggctgggccccgcgggtgggcgcgccgggaagcggcggtcgcgggcgtcgaagcgcgcgccgaccacctacatcagcaccgacccggccaacttccgcctcatggtgcagcacgtcaccggcgtccaggccgaccccgcctccctcgccgacggcgccgccggcatccttcccaccaccaccaccactgcgccgttcgacgcctcctccggcctccacatgctcgacaccttcgccgccgccaacccgctgctgcaagccgagcaagcggcggcgcttcagcagcagccgtgcttccccacgctggactcgtcgtggagcgccgtcatgtacgatggcagcgacctcctctga

SEQ ID NO: 99662 - DNA, 334 bp, Oryza sativa
  unsure (1)..(334): unsure at all n locations
  Clone ID: PAT_MRT4530_97452C.1
tgtttgccctgggnatcgagccgacgnacaccggggcnatgatcagggcgcgnatcgaggaggaggacaggnaaatagggcagctnatctacaaaggggtgctggtnaccgacgacaaggcggcccacgagtacaatatcgaggccggatccgtgctccacctnacacttaatctcagggcctagggatggttcgcatgaactctcattggagcctgggagtttcatgaaataaatattatcgcatttcaattttctttgtaatagtactgatttactgattttttttaatagtcctgcttcgaatagagtgttggnaacaaaaaaaaaaaaaa

SEQ ID NO: 99663 - DNA, 324 bp, Oryza sativa
  Clone ID: PAT_MRT4530_97453C.1
tcaacgtgttcgtcgtcagcaccaccccgtacgcacgtagacgtatggaaaacgggcccgacgcagaccgcggaaacgctagacgctaaaccctctagtctagctagagagaccaaaacgaagtcgtccggtggctactggagcagaaatttccagcgaaaattctgcagcccatgcgatgcgattgccgacacacagctctcttcgaaattggatgctcgtagtgcattttcttttcgagacgttaaaatcggaaaagccctggcctcgaagcaaaagcgccaaatagaaaagttttctcctttttcctgtgtccccctcaac

SEQ ID NO: 99664 - DNA, 857 bp, Oryza sativa
  Clone ID: PAT_MRT4530_97454C.1
ctagtccaggtgcccgggcggctggcggcctgcgccggggcggttgcggcccgcaccggcgcggcggcggccggcgccggggcggctggcggtctgcgccggtggtggcgcagaggaacgagagcggttggcggcaaacggaccataactagtggcgactgcaaaaatcgagcggcattttcgtaaacggctccttaagacacccatatggaaaaatcgattttcccatataggcctcttaaaaggttttctcagaccaatcgatagcgcgggacgggacgggcgcggcggcggcactggccgaggatcgcggcgcgcggcggcggcggacgggagcggccgtgggctcgatggcagtagggggagcggccacgggctcgatggccggaggcggtcggctcgcgtggatctgccacctccacttccctccgtcaccgctggcgactccccccgcggatccggcaacggcgccatcccccaactcggatccggcggcggcgccctcccccactgcggatccggcgacagttgccttctccaacgcggatctggcactggcgcccttccccaacacggatccggcggcggccgccctcctccaacgcggtttcggcctcctccaatgcgaccacccctccccctcctcaccgccgcagcggtggggcggctctgccgcctcggctggcgctgccccacgtggatccagaaccaagggcggcgggggcggccgatccggtgtagaccaactcgcccatgcggttggcgcaaccgtatgcaaagatgctgttcgcccgcatgcaaaaaggctttctgtagtagtggtgcatgaggacaggatgaaatgctactctgtctaa

SEQ ID NO: 99665 - DNA, 1329 bp, Oryza sativa
  Clone ID: PAT_MRT4530_97455C.1
acacaaattatctcggcattatagagatcaacataatctttcaacaattgatcatctttattcatgtagaacggagatgaacacaaaaacaataaaacataaacttcttaagggtcaaccctctagaaaatgaagaggtccaacacaagcaaattcagttggaactgcagcacggacgacatggtagaatcagtttgggagtttaaacaggccccatccacatggtatggaaaccaccattgttgcgatagtggattcccctatacatacactctgggacacaagacaaaattattaactcttccaagaaagggaaacaaagagttcctccactcttcagtagccccagttgtcgttacggatttcatcatcgaacttctgcttgacctcaggatgctttgcaaagtattcatctgctgtcattgtgctgatatttttcttcatctcctgcaattcagcaagctccttctctatcctctctgactccttcagagactccttttctgcttctttcagctcaacaagcagcgcatcaaactttggcttgtactgaggagtcacggtgtcaacgtacttggggatttcaatgctttcataagcttccttgtacatatctacaactttagacccaattccttttctgtagtactcccagtcaatcggttggggctcctgagagaacttggtctggagctggtggttgacgtcctcgaaggtgcggcggagggtgttgaactccttgcgcgcctcgtcggagacgagcatcttggccatcccctcccagtcgatcgccttcccggccttcgcggccacctccgccaccttcttcacgccgttcccgctcatcttcctccgccctcctctccctttcctctctacctcgacctctctctctcccccctcgttcgccgccgccgccgccgctgctggtcctccaactccaaccaccatggcggcagaggagatggacgcggagcagcagcgttgtagcggcatgcaggtgagtggggacgagggtatcttggtggtgtactcacaggcgttggccggcgtcatctctctagaaatcagaaccaccaccagcgtctgcagatccagattatttgctctcacctgcattatccgctcgccgccggctccaacatccccggtgatttcgacgtccatgggcgcaggtgattgaaatccatgtccttccatgccatgtgctagggcaggtgaaaacaacacgagatgagatgtcccggcagctgcagggtcctcctcctgcccttctcctgccatggaagctgatgcagctgcgttgcccgtggagacttgtcctgccat

SEQ ID NO: 99666 - DNA, 1082 bp, Oryza sativa
  Clone ID: PAT_MRT4530_97456C.1
atggcaagtcatttctatggacttcatcgaagggttaccactttctagccgacaaaactgtattccagtagttatggaccgtttttctaattatgcccattttattgctctccaccatccttttactgctatggacattgctaagctctttatgctgcacatttttaaactgcatggtctgccacaagtgatagtttcagacagagataaggtttttaccggtcaactatgggagaaactattccttagagatagtactaaactacatttcagttctgcttatcatccataatctgatggacatactgaaagagtcaatcaatgtctagaaatttatttgaggtgttttgtgcattccactcctactaagtggggcacatggctgcaccttgcagagtattggtataacacttcttattactcttctctaggcagaactccttttcaagttttgtatggttatcccccaaatcattatggtattggtgccaatgattgtgctcttccagatttggctgactagcttcacaatagagctcttatgcagaaactggttcagcagcccttgaagagcacaatagcagatgaaacattatgctgacaaagggagatgttttagagagtctcaagtgggtgaatgggtttatttgaaactccaaccctatgtgcagatttcagtggcccttagagctaatcacaaattggctttcaaatattatggtccttatcaaatcctggaaagattgggtcaagtggcttctaggcttcatgcaccagctcacagctctgtacacccagttttccatgtttctcttctgaaacacaacagaggattttctggtcctatccaatcccagttgccttcctctaattcttctttccactaccctctgaaagtttaaagccatcatgttaccaaaaagggtaattatgctatttctgaagttttgattcaatggtctgacactttagcagaacaagcaacatgggaagacctggaggagatgatgactagttttccagcagcattggcttgggggcaagccaattttcaaggagaggggatcctcagatccagcaca

SEQ ID NO: 99667 - DNA, 627 bp, Oryza sativa
  Clone ID: PAT_MRT4530_97457C.1
attcggcacgagggaggttctgtgtgtccaagttaagctaggaccataaaaatggaatcttaaggtgcatggccctgacctttccccagatggtggcagtgaaagtagcgcaatggcagagatctcagtttatgcaagatgctcatttgcaccaacaatgaagagtaaatggtgcagtgtctggaaaccatgtaattatgctccagatatagtttccttaagctgtgcatgggcaagaagaaaaatcttgagggatatcttgtcgtttcaccaaaatgtttggaactggtaggaggataaatggataatgtatactagctgccttctgatacaacaggtttcctgtgctcatgctttcatggcacgaaaggaactgagtaaaatgcagcaatgtttgaggagtgttggaaagatgtctaggactaagccatcttagataacagaattgatgtgttgtccgatatatcttcactcttgtccggttaaggaatcaccgaagacagcattcctggaaagcactgccaatgatgtcatgttgatgtactaacagtagctgatagctgcttggagagcacaatgtttactggcagctgaatatgctcgacgcatcccaacccatatctggat

SEQ ID NO: 99668 - DNA, 498 bp, Oryza sativa
  Clone ID: PAT_MRT4530_97458C.1
ggaaacgggttaaacctttctttcagggttttttcccctgcaattgggccccccttttatgaaccgttttcttgccctaaagggccccctgggaaaacaagggggcccttgctttggggaactggttaaacccaagcccaaacaattcttttccccccccaaataagtttaatccaaacttttgtagggcccccaaatccctttcaaaattttttttttttttttggcccccattgaatacccccgtttccagagagaaaaattttccctcccgggggttacccttctttgccgcttttttggggcccctaaaaaaggcctttttttgaaaagataattaaatagcgtgccaatcatttttggaccttacttaccccttttagggagccaatgggggccaattttggggggtattcctcaacccccgcccttggtccaacccacaaaaagcaaggggccttgtttaaatttgctttgggagggaaatgccaggggttt

SEQ ID NO: 99669 - DNA, 112 bp, Oryza sativa
  Clone ID: PAT_MRT4530_97459C.1
atggcttcaaatggcattgcacggtccatcacgacaaagtcttcactcgcccttcaccaccggtttcggttcatcgtcaccaagcctcttgctggcccttcaccaccgcatg

SEQ ID NO: 99670 - DNA, 786 bp, Oryza sativa
  Clone ID: PAT_MRT4530_9745C.1
atggatgacctcaccgtcgcgccgtcgtccaccgtctccgccatcgccgccctcgtggcgcttggcgtgatggacatcagggaatttttccactttccagcatggatttgcgctgagaaagaactgatgggtgaggccgcttgcaaatgcaagagcgggttaagagtgagccggaggccccgccatcgggttgactgccggccgtcctgccaccaccaactccgttgtctccgcctccgatctccggcgacgagcggctcggcgatgaggcgcatcgtcgcctcgcacggatcaaggcagggcggggccaaggagcaccaggtcaatcgagctcgagctcatcgtccccgtatttgccatctacgcgacggcatgttgccgcagtgcagcggcaagatgagtttgccggtgaagcatgtgatggtgtcgagcaccaccattgctggatccaccggcggcgaggtgccggcgaccgcgagtgcgccgtctgcaatcgcaggcacggggtttgtgcaggggttggtgacatacgccgtcatggatgacctcaaggtcgcgcccatgtccaccatcgcgctggtcaaatccggtgtcactcacatcaagtcgctccaggagaagaccgtgcagatcggctacactgagggtttggctatgctgaaggcgtcgctgcagtcgaagacggtgcttacagatgttttccttggcaagaagcggaagaaatggccatttgtgttggtccttctcttgttgtttattttgcttgctggcaagccgcaagcgtga

SEQ ID NO: 99671 - DNA, 378 bp, Oryza sativa
  Clone ID: PAT_MRT4530_97460C.1
ggaaagcgaacgggggaaaagttttttttttaaaaaaaacaacacctttcgggggcaaaaatttacgggttacaaaaaaccattcgggcccaaaatttacaacctacaaatccctaaacattttggaagaaggcatttgcatccgggggtatggggatgcctcccgggggggataagcattgccccccctttacaaatccagaatttttcctttccccccaaaagggggggcaacccctaagaccccattttcctaagggccctggagggggggttccggggccgaaaaccaggggggggagaaaagcttccgctggcagaaatgaaataggggggggaatgggtttttgaaacgggacccccccaatgggggagggg

SEQ ID NO: 99672 - DNA, 2604 bp, Oryza sativa
  Clone ID: PAT_MRT4530_97461C.1
ctagttcggacttccattcggatcaacaagcttcaatccccagctcacgtcgtcgcagtgccgaacgtggggcagtattgtcccggtgtccactccgcgcttcgtcttgcagtcgtagaacggcggcgagtggaagcacggctccatggacacgtcccgtccgcacggcgggtccggcaccgccgtgatgttcaccggcttgtacatcacccacggcctcagcccgccgagcccctgcgccacgtacccgaacgtcgaccagccgctggtcaccagcacgtcgcacaggctcaggaggtacatctccgcccacgccttgccgtcgtgcgacttctcgccgaagtgctggtactcctcgtggctcggctggtgcacgctcacgtcctcgccggtcgccgtcgcgcgctcccagtacatagccttgacgcgctcgtagaaccacggccggagagaggtgatcaggacggccttggagttgttgctcccgccgtgcggcgtcgtcggtggcgtgggcatggccgcgtcctccaccgcgtcgagtacctccgggagcagcttctccttccacgcgcacgacgtgatctgctcgaggacgacgtgcggcgacttcgcctgccggtggtcgaagacgcgcacctggacgccgaccagctgccgcgccgtcgcgaggtacgcgcggtagtaccgcgcgacgaggccccagacatggttggccgggtggaacaggtaccggccgaggtggtggaacacggcgtcgcgctccgggaagagcgcgtcgagctcgtcctggaacgtggtgaccaggaacagcgacggcacgatgtaggtgtccgtcctcatcaccagccactggatgttcgacagcagccgctggtcgtcgtcgcagaagaacatcttgtcgccgtcgccgtagtcgtggtccaggtggaggtacgcgaacgccggcatctgcgccgcgggcatgtcaccgtcagtactcccgtccgtcccgagcaccttgttcttcagcatgttgccgtagctctcggcggtgtcggcgctgaagttcgcgtagctcgacgccagcgggaagtcgcgtgggagcagccacgtcgtgccggggaacggctcgcagaagagctcgtccatctcgttgctcgggtcgacgaggaggacgcggccggtgagcaccgcgtagaggaaggccgacgcggcggcgaggatgcggttcccgaggccgcggtacgagatggagaccacgtacttgcactgctcgtcgtccggcgagtgcgcgtcggcctcggcggcgccgccgtccctcagccgttgcacggcgcggttgtacgactccgtgttggggccgcaccgtctctggagctcctcgtgcatccgcagccgcgccacgaggtgcggagatggtcgtcggcccgggttccggcggtacaggtatgactcgtacctgctgcgacatgatttctcgtcgaatccttcgggcaagaggccgccgaggagtttgtcagcggcgcttcgtgccaatggaatcgatttatcgtcggaacctcgacgcagggccttggtggcggcgatccagacggcggggcgccgcccgccaagaacggcgaagaccgtcgccatgacaaaggcggcgagcacgacgtaggccacggagctccatcgcttctcggcagcagccaccgccgcagctggcttcctcttccgcggcacggagcgctccagggactcctcgcccgcctccagcggcctgccgtcgcactgctgctgatccgctcctcgcgccgccgcggcgctctcggcgcaagccttgggcttgcgttgctgcacctgcattgctgttatatcgccttcgctgagcggacggtgtagtgtggtgcacacgcattgcctcttcatcaagaacgcctcttgccccatttccaccgccctctcccgcttccggcaatcgccgccgccgccggtgatgtccatgccgaacagcctcacgacgcgtgttgcttcgccgcttgtaattggcttctcgtcgccggtggccgccgccgtgttgttcttcttgcagtcgatgaagagcagcttgtcggggccatacgccgagccggagaagactatggtgtcgccggcgcggaggcccttctccctcacgaatcggctccatcccttggtcagcacgtaactctggctgcttcccctcgccgtcctcgaagttgaggagcacgcccttgcagagttgcaggtggccgcggcggcggtggcggaggcgtcggagctcgtccgccgcagcgggaagtgcttctccgcgtgctgcttgggcaccagcaggcggttgagcttgccgacgtcgctgggcgtcacggccttctcgaacagtggctcccgcgcccacgacggcgtgggctgcgcgcgggcgcccatgccgcgcccccggcggagcccctggcggagcttgcgcgatggtaggccagcttggagacagggcaggcggtggcgcggtcgccgtcgccactccggcccccggccgccgctgccgccgaggcgttcgaacggggaagagaaaagggggagagaagagagagaaggagggaggaggaagggaaggataaaggatgacat

SEQ ID NO: 99673 - DNA, 153 bp, Oryza sativa
  Clone ID: PAT_MRT4530_97462C.1
atggactctgagcctgatctcaagacgccgcctccgcctccacatctcgccctaccacagccgcaagtggacgcggtgcccatgccgtccttgtcccgacgccggaagcgcgcgccgttcttggtggagctcaccccggaggagatcgagtag

SEQ ID NO: 99674 - DNA, 3214 bp, Oryza sativa
  Clone ID: PAT_MRT4530_97463C.1
gctgggtcaaaactgatgatgattgactaaacagtagtatacagactgagttgaggcaaatttgatagactgcaaatctgcaatgggaacaataacattgccaaaaaaaccggcttaaagccaaaatcttacaaataacttgactatactcaaaagtgcaccacctgttgtatcgggaactattccctgttaacaaaatacaaagaagggaagaaacatctatgtcaaaacacaagtcgaaacccccatctccaaataacttgcagatggggaggagtaaaacacaggtatgaacaacaacaacaacacatcgatggcatgctgtatgttacacggtgtagctctgttggattgtgtcgatgtcgagccccttgagcttcaccaccgactctacgtgccccttgagcgtgtgcaactccctcagtctggcgacctcggctcgctttgcggcctgctcggcgatctcggagagctcgcggtagccggtcttgtcgttgaagaggtcggagctggtggacgactggttgagcccgtgcagcgtcctctgcgccgtcgcccactgcgcctcccgctcccccttcccgtagtcgttcttgttcacgaacgccgtcttgttgttgatgttgttccacgcccgcccgctcagcgcgtaccggatgatgaacttgagcacgtccagcgggaagtaggtcaccacgctgaacgcccagatcgcccctccccacccccacccgatcccctgcatcgtgcagaactcccactccgcgtacaccgcgatgcacgtcgccaccagctgcgccgccaggaacgcgatcaccagcagcgcccctggcctctccacgaacgaccagctccgcgacctcgtcacgaagatgagcgcctggctgattatgctcacctttgtttcactctcccaggtgattatgctcacctgcaggtacagcgccgccatcatctccttctcgttcgtcttgatcgacctcaccccgaacgtctctgtgaagaagtcggtgtcgtgcgcgaggtagaagaagagggcggtgatgagcgccatgtacgtgccgagcacgatgcccgtggcgaagatctccttgagcttccacgagtccggggtcggggacggcttgacacggtccttggagattgtcatgatggtgccgtcgttgaggatggcgatgatgagcaccatgaatggggcgaagtcgaacttccagaggagggcgacgagcatgaagccgaggacgatgcggatggtgatggagacggcgtagatggtgtagttcttcatccgctggaagatggcgcgggaggtgagcacggcgctgacgatgacgctgagccccggctccgtgagcacgatgtccgacgcgctccgggcggcgtccgtggcgtcgtcgacggcgatgccgatgtcggccttcttcagcgccggcgcgtcgttcacgccgtcgccggtcatgccgcagatgtgcttccggtcctggaggcgcttcacgatctcgtacttgtgctccgggaacacgccggcgaagccgtcggccttctcgatcagctcgtcgatggggaggccgctcatctcgctgctcttgtcgcccagcagcgtcgtcgacgggtacatgttggtgcccatcccgagccgccgcgccgtctccttcccgatggcgagctggtcgccggtgatcatcttcacgttcacgccgaggtgcagcgcgcggcggatggtctccgcgctgtcgtgcctcggcgggtcgaacagcggcaggaggccgacgaactgccatggctcgccctcgctctccttgctcttctccggcaccttctggtacgacacgcccagcgaccggaggccgcggtccgcgtactggtcgatcagcgtgtgcaccttcttctcggcgtccttgctcatcttgcacagctcgatgatctgctccggcgcgcccttgctgatcctgtgccattcgccattgccgtcgatgtaggtgatggccgtgcgcttctcgacggggttgaacgggaggaagtggacctccttgatgccggcgcgggcctccttggggtcggcgagcatgcccacgatgcatgtgtcaatggcgtcctggttctcgacgcgggacgccctcgccgcgtacaggagcaccgagtccttgtccagcccccgcccgtacacctcgatcagcgtcttgtcgacggtgagcttgttgagcgtcagcgtcccggtcttgtcgctgcagagcacgtccatgccggccatctcctcgatggcggtcatccgcttggtgatggcgccctgctgcgacagccggtgggagccgatggccatggtgacggacagcacggtgggcatggcgatggggatgccgccgatgagcaggacgagcaggttgtcgatgccgtcgcggtacgcgcggtgctggatcgggtacataacgatgatctcgattatcatgccgacgccgatggagatgatgcagaagttgccgatggccgtgagcacgagctggaagtggccgatgttgttggtgctgtccaccaggtgcgccgccttgccgaagaaggtgtgcacgccggtggcgatgacgacggcctcgatctcgccctgcttgacggtggacccggagaagacgccctgcccggcgtgcttgttgacgggcatcgactcgccggtgagcgccgcctggtcgaccttgagcgggtcgccctcgagcagccgcgcgtcggcggggatgatgtcgccgagcttgatgctgatgatgtcgccgggaacgaggatggacgcgtcctgctcctgccatttcccgtccctgagcaccttggtcttgggcgcgaggccggccatgagcgccgcggcggcgttcccggcattgttctcctcgatgaaactgatggtggagttgatgacgaggaggacgacgatgccgacgaagtcctgccagtcgggcggcctcccgccgccgttggcgaggacgatggccatgatggcggcggcctccatgacccaggagaggggattccacatgaaacccaagaacttgagcagcttgctctccgtcttctcctccagcttgtttggcccgaagatgttgagcctgttctgtccctccgctgccgacagcccctgcttgctgcatttcaggtgctggaacacctcctccaccgggatcgtctcgaggtcgacggtctcattgcggacgtcctcgagggagatggaggccat

SEQ ID NO: 99675 - DNA, 269 bp, Oryza sativa
  Clone ID: PAT_MRT4530_97464C.1
ctaccaacaacatctgggatggttggctcaagaggggaagatatggtaacggctacgggtaaaaagggtcgaaatcggtagaatctcttcggaaacgatgctcgatcagccggtaattgaccatatctatcatttaaactactcagtatcgacattaatacgatgtagaaagaaattagaaaaaacaaaatttaaaaatagccaaaaacggtacagtcggaaactgtaccccttaaacggaaacggcgcccggtcgatcgggaatttcc

SEQ ID NO: 99676 - DNA, 467 bp, Oryza sativa
  unsure (1)..(467): unsure at all n locations
  Clone ID: PAT_MRT4530_97465C.1
gacggttatccgatatcgcatccaatcgttctacctacttgctcaagtaccaaccctaaatcctatctccaccgcattgctcatagatgccgtcctactgctcttactcgtcttctgcaagtaaccgtggtcccgagctacctatgcgatcgcgccaagaaccgtgctctagtctgctacacctccaccggcggtggaaccgcccgtgcgcctgaatcgagtcacgcagcgagagccggaaggcgtgggccggttcttgctgcaccggatgaggccaaaaacgccgcgggcctttggcgtgctgctgtgcatggtgtacatgggcagggttgtgaccgggtcctcgcgggaggaggagttgggcgtctcggaggacagcgacgcgatcctgagaggaggaggcggcgacagtcaaaggaggcaggcgatcaggtgggagctcgncgaggcgagactgagcnagacga

SEQ ID NO: 99677 - DNA, 616 bp, Oryza sativa
  Clone ID: PAT_MRT4530_97466C.1
atgtgttcgtagcagatttgttctcggccttcagactgaagccggaagaagtttttgcccacctaccaatctggcgctcttttgccccacctcagtgtcacgtcgctacttcctgtggctggtcgctcactggcgctactggacgactgaccgattggagaagcgtggcctgccgcacccaacctattgtgtcttttgtgaccaactggaagaaacagttgatcacattctgattgggtgccttgagtccctatagctgtggtggactgtcctttcaagccccggcctccctcagtgctttccctctgacgctgattccttctttgagtggcactgctcctgtcggctcaaagttccgagggagcatcgtcgtgggttcaacacgattgtgactcttggcggttggtctatttggaatgaaaagggacaaccatgtgttcgacaaccattcccggccctagcctgaggttgtcgcagccatggcgtaagaggccatcctttggcgtcttgcccatcccccgttgccagcgcttcctagttagcatgtttggtcacgttttcgaagacgaccagccaactccatgtatttctcaaagccaactacttccatttcaca

SEQ ID NO: 99678 - DNA, 816 bp, Oryza sativa
  Clone ID: PAT_MRT4530_97467C.1
cactttttcgtttttttttttttttttttttttttcccaaccagagagagatttttttttctctcgaattttactaagcggagaacgaatgagataaaccagattgaaactctcattgttcccaactcataaaccctaggttcttatcatataagaacaggggattaagaagtaaatgggggaaaacaggggataaactagattgaaattccccactgttaagcaaaagggaataaacaagattgaaatttcccggaatccccaataagccggatccaatcggcctaaaatccccaaatgaggaaccctaatttttggggggaagaaccctaagtcacaaataccagaattaaatccaaattcaagtcaaaattaggtttgagttcgggttaattaccggatttagaccccctaagcttgccggagctctccggtctcctcggggccgcgccggttgaccgccgtgcgcgcgccgccttggagcttgtctctccaccgtccctcaccggggacgggaagcgtcggcttggcggctgccttcgggctccgcacccccgctgacgaggtccggccgcatagacgcttgccgtcgctagtgcgccgcctcgccggaccgccgacgccgtagcacacggcttggcgccgcccttgggtgcgccccccagccagccgaggtggagccgctacggcgctcgctgccgcacgcgcgcgctgcctcgccggaccgccgtcacaacatcgctgccgattcgctcgctcgctcgccggacgccgaatcaggaagagaaggggacaagaatgagccggacgcgtggg

SEQ ID NO: 99679 - DNA, 466 bp, Oryza sativa
  Clone ID: PAT_MRT4530_97468C.1
tccgccgcaccgcgtcgccgctcggacatgacgaatgcaaaagctggcagcaaacgcgggacgggagccgcgagtgccgctgcgccgtcattcgccgcatggtgaggagataccaagcagagcatgaccaccacccaaggaacaaggctggtcagcaatgtcggccgagaactaccgatgcgacgtactgactcccgagcaggggaactacggcgaggcgccaatgcgaggaggcgctactacggccagcaccagcaacagccaatgatgacccgactgaggctgacacatgccaggcagtacgacgggcagctgacgtccatgtgcctcgatgagacgcagcaatgcatcatcttcgacgtcggccactactaggccgagctccctaggctcatagctagtacgagcacaccgatactgtactgcatgcaaccagatagtgatcaaaacaaataatgaataatga

SEQ ID NO: 99680 - DNA, 478 bp, Oryza sativa
  Clone ID: PAT_MRT4530_97469C.1
gtctagctcctagatcaattggttatcctatgtaacaatacacaaggcatgcacatatagtacacggtaggattcgctgccatcaagggcaaggccaaccctacgccacgcccccgactcgtcagtcgtcacgcccccgactcgtcactcggcgcagccgctagcccggccgccagccgcgcagggtgccgccgcagcgctgccgctgccctacctcgccatcgcgggctcgaggcggcacgccgcacggccgcagcgccacactcccctcccctgagcagcagctgtaggccccggcgagccgcccgcgagcacaccgccccctgcgcccaaagacccaaaccctaactcggcggccggcaaacgggctgctggcggcgggccggcaacaccctcgtggagttctccgaccaagacaacggcggcgcggaccgagcagtcctcctatgtaagttcttcacttcttgttcgtttgttc

SEQ ID NO: 99681 - DNA, 6237 bp, Oryza sativa
  Clone ID: PAT_MRT4530_9746C.1
ttgttcaatattctatctaagaaggtgggagggtccgatgtctccgagtcctacttgaagaccagttgacctacggtataaaagggaccccccgggaggacctaaggcatcgaatctcagagccaacacatccaccacagcctacgaaatccttgtaccagcgtaccccaataccttctatatctggtctacgggtatcccccgtcgatagtggcgcgctaggtagggggacttggtgctcaaggttctactactatgacatccagcttcgtcgacaacagcgtcaacaccaacctcaaccaaggagttcctacttcaacaacactggtgtggactcaagtcggcgaaatcgtctttccagtttacaccactatgtcgatctcagctggtccggcaatggccggaaacaagaacgcattggctacaacccggggcgactctatgtcaaaggatcctcccgccgaagcggagatcggaacgttgacgacatccaagcccgagatggatcctagtgcggccaagccttgtctttctgacaggaatcacgagccgacgaggattacttccgaggtgacaaggtcctggtgtcctatccacaaaaccaggaaacacaccctgcaagcctgctgggtctttctcaacgtccatgctgaaattcgtgcctgcaaagagcgtggaattcagcgtacctctccaactcgtgatgtctattgtcctattcacaagacaaagaatcacgacctctcgagctgcaaggtctttctcagcgccatgaagacgccacctcctaaggtccagcagtcacacatccccatcagggatgaagacaaggaacaaggagcgacgccgatttcagatcgatttgttggggtaatcgacatcgatccccacgaaccatcatcttgcacctactcgaagactatggatcatcgacaacaagtacgccgcgtgaggtattggctatcgacgatgtcggcacgtcagcgcgcaccaatgcggaagcggagaatcaagtgactactccggcccagcacatcagagccgtcaacgcaatactgagggaaaccccctacgatcccgttttgaatgatgatctcgcacgttggacagaacgactacgggaatcagtgaccaacctcagcaacgcgttcgaagaggccgctgctacagcgcacccggaacaaccaccaactggcgatgctaatggtgaagaccctgaacggcggggatcgcctcatcgagcgacccctccacctcgcggcaccggcgatctccgcgatcacctgaatggccgtcgagaggccagacgcacacgagataacaagaaccgttcccggcgtcatgtctcttcacggcgtcacgataacggtgataactgccacaaccgccacgatcatgacgatcgcgaacggcgggtgctgggcgatactggtcgaggacgtcgccataatgacgacgatgatggagatcggtgccgagacaacaacgggaacgacgacaggattctcaagagcccagccgacgtcctcgtaatcatacgccggaaccaagcaacccatcgtcatcgtcatcatccttgtcatcttcatcatcagatagacatccacgaagaacgtatgatcgccgacaacccaccgcccccagtgatgggtgtagagctttcggtcgttcacttcgggatgtccgatggcctgaaagattccgacctagaggaatagagaaatacgatgggagcaccgacccagaagagttcctttaggtttactccatagtactctacgctgccggagtagacgacaacgcgttggcgaattacttgccaactacattgaaaggctctgcacgttcatggcgaatgcatctcccccctactcgatctcttcgtgggcagacttgtggcagcagttcgtagccaacttccaaggaacttacaagcatcacgcgatcaaagacgacctacatgcgttgacacagaacccaggtgaatgcttgagggattatgttcggcgctttaacgagtgcagaaacacaatccccgagatcaccgacgcttctataattcgcgctttcaaatccggtgtcagagatcgctatactactcaaaagttggcaatgaggcgcgtcacgactactcggagattattcgaaattgtcgatcgatgcgctcatgcggatgacgcactgagatgcaagaacgaccaaccgaaaaccggaggagagaagaaaccagccaaggacgcacctgagtcaagcaagaagaaaaatcgcaagagtgagaaaaggaaatctcaatcggaagttctcgcaacagaatacgcggaccctcccaagcgcccagacccacaaggcagcaacatgaagaaagcatggtgccctatacacaagtcggacatacactctctagaagattgcctcgtcttcaaaaagtcgctcgcaaaacacatggcatcggaaaaaggcaagcgagtacgcgtggttgagaaggatgctgaggcgcctactcaggaatcggactcagcatacccagattccgatctccatgtctcacacagcttcggaggctccacggcggcgatatccgatcgtggttgaacccactattcgtaatatcaaggtcgcatgagtcctgatcgacggcggcagctcaattaaccttctcttcgccagcaccttggacgcgatggggatcccacgaagcgagttgacacccaccgaccaacccttccatggaatcactcctcagtcatcgtccaaatcattgggcaaaattatgttgactgtgactttcggccaagcaaacaacttccgaacggaacagatcacctttgatgtcgctgaattcgatacagcatacaatgccatcattgggataactgcactcgcgaagttcatggccgcatctcactacgcgtatcaagtgctcaagatgctaggaccgatgggaacaatcactattcaagggaacgctaagctggcagtacaatgcgacaagcggagcctcgacatggtcgagcacacgcccagcccacccgccacagctgagctacccaagaaagtgagcaaaacaaacaagacgccgaagccggacggcacaatcaagatcgttccactctccaacgccaaccccgacaagaccgaactcgtgctcatcaccttcctccgcgacaatgctgacgtgttcgcttggcagctgtccgacatgccgggggtacccagggaggtgattgagcacaaactcatggtgcgacccgatgccaagccagtaaaacaaaaactgcggagatttgcaccagatcaaaaacaagccatatgagaagagctcgacaagcttttcaaagccggtttcatcagagaggtattccatccagagtggctagccaacccagtcatggtgcggaaggccaacaggaaatggagaatgtgtgtcgatttcaccgacctcaacaaggcgtgtcccaaggatcactttcctcttcctcgaatagaccaactgatggactcaacagccagttgcgagttgttgagctttctcgacgcttactccggttgccaccaaatcagcatggcgaaagaggacgaggagaagacagcattcatcacaccgttcagggtattctgctacgttaagatgccgttcggactaataaccgcaggaaacactttccagcgcaaggtccaaggtgcacttagcgaccagctcggaaacaatatcgaggcctacgtcgatgacattgttgtcaagaccaagacaagtgactcattgattgacgatctgcgggaaacgttcgacaacctccgacgatatcgcctcatgctcaacccagagaagtgcacgtccggagtaccctcgggcaagctactcagcttcctcgtctctggcagaggaatagaagcaaatcctgagaagatcaaggcaatcgagaacatgaagtcgcctacaagactcaaggaaatacagaagctaaccggatgcatggcggcactaagcaggttcgtcgctaggatgggagagcaaggacaacctttcttcgctctgctgaaaaagcaagacaaatttgtatggacacaggaagccgaagaggcattcattgcactcaagcgctacctatcaaatccacctgtacttgttgccccccaacctaatgaagaattatttctctatattgccaccacgccatactccgttagcactgtcattgttgtcgagagagagaaggtgcaacgtgcaacgaccagtctactatgtcagcgaagctctccacgacgcaaagacaagatatccacagatccaaaaactgctctacgcggtaatcatgacatcaagaaagctacgccactacttccaagcccacagggtcacagttgtctcctccttccctctcggtgaagtcgtgagaaacaaagactttgtaggccgcattgcgaaatgggtagtcgagctaagccaatttgatatccacttcgtgccacgaacagccatcaagtcccaagtactcgccgatttcgtagccgattggaccatgcctgataacaggtcagacaaccaaatcgacaacgaaacatggacaatggcgttcgacggcgcactcaacagccagggagcaggggcaggattcatcttgacatcaccttcaggagatcaattcaagcatgcaattcacctcaactttagggcaaccaataacacagccgaatacgaaggactactcgctgggataagagctgctgctgtactcggagtcaggcgactgatcgtgaaaggggattccgagctagtcgcgaaccaggtgcataaagattacatgtgctccagccccgagttatccaagtatctcgcagaagtcaggaagctggaaaaaaggttcgatgggatcgaggtccgacatgtataccgcaaagacaacatcgaaccggatgatctagcacgacatgcgtccagacgagaaccacttgaacgtagcacctttctggacgtcctgacgaggccatcagtgaaagaggcaaccggcgaagatagctcggtcgcccccaacatcggctcgggggctacaaaggcagagcgcgccgttgccgatattgagaccacagacgactggcgcaccccactcattaaattcataagcagcgaagagttgcccgaggacgacgcagaagccgagaaaatatcccgcaaagcaaaagtctactatatgatcggcaatgacctatacaagaaggcaccaaacggggtactcctaaaatgcgtctcatctgacgacagcagacacctcctcctcgacatatatgaagggatctgtgggtcacatgccgccggtcggacattagtcgaaaaagctttccgacaagggtttttctggccaaccgccctcaaagacgcctgcgacatgtaaacacacaaagctgccagcgcaagcactccagactatccctctcacttggccgttctcgtgctgggggctagatatactcgggccattcccacgagggcagggcggctacagattcctattcgtggcgatcgacaaattcaccaagtggattgaagcgacacccacgggggaaatcaaggccgacaacgccatcaaattcatcaaagggatattctgcagattcggattgcgccaccgtatcataacagacaacgactcccagttcattagtgccgatttccaggattactgcatcaggctgggagtcaagatctgcttcgcctcggtttctcaccctcagagcaatggacaagtcgagagggcaaacggcatagtactacaaggaatcaagaccctactatgggccgtgcgtaccacacggacgacgtccaacaaggagacaccattcttcctcgtgtacggctcagaggcgatgctccccaccgagctacgacatcaaagtacatgagtacagaagtatttcgatgaggatcaggaggagcagcgatacgatgatgtgaatctactcgaggaacatcgcgaacgagttgccgttcgagcagccagctaccaacaggcccttcgccgttaccatgagaagcgcatccgagcacacacgctttcgatcggcgactacgtcctccgacgggttcaaagccaagcagggcgaaacaagctctcacccaaatgggaaggaccgtacacgatcacacaagttctgcggccaggcgcattcaaaattgcagacgacaatggtcgcgagttggcaaactcttggaacattgatcaattatgtaaattatatgta

SEQ ID NO: 99682 - DNA, 178 bp, Oryza sativa
  Clone ID: PAT_MRT4530_97470C.1
ttatacactctccctagcccccacccttgtcgtcgtagaatcgttctcggaggataaggctcttggacctttgacctacctcgttgaacaagcactgatcctaccccccagccgtgagaagactttctcatcggttggcacaagacaacaaaagatccttgtttgcaggcaagggaag

SEQ ID NO: 99683 - DNA, 1044 bp, Oryza sativa
  Clone ID: PAT_MRT4530_97471C.1
atggtgagtggttttttgagatttgggggtccgttgttttgtccattttttgatgaactgtttgctgggtgttctgatgcgtctgtttgcctctgtcgttgcagatctggtgaggtttttgaatctgagcaggaggctgaggaggatttccgggggataggaggagaaggaactctagctaggattcatacgagtagaaattacagcaatatgcctgagatgagggatagcaagaggacggcccttggcgagctctccggcggtggcgggttcttcatcaggagggtggcctcgccgggtgctcttgcggcgaggggccccgggaagccgttggctcggcggttcatacggccatcgaacaacaaggagaacgtgcccccggtttgggctgtgaaggccacagccacaaagaggagaagcccacttcctgattggtacccgaggacgccgttgcgtgacatcacggcgattgcaaaggctattcagagaagccgcttaaggattgctgctgctcagcagcgaagccagacacctgagcagaatactccccattgcactgaagttcgggactcccttgatgttgaacctggcatcaactcaactcaaattgttgcgacccctgcatctagcttggccaaggacagtctgaagattttctcctcgccatctgaaacatcacttgttaccccgtccaagccgatggatccagtccttctggatgatatggagaagaaactgtccagctcaatagagcagatagagaagatggtgaggagaaacctgaagagaactccgaaggcggcggctgctcagccttccaagagggccatccagaggcgcacactcatgcttaccattgcatggtgctctgctcgaggacctagttctaggattaacagctggaagtgccagaatattttgaagtatagcaagaatgcacaatacctgctgccaatagtgaagcaccaaaactgccatgaggaagactggggtgtccccgaaaaagagaggaaaactggagtggctgtggctgacaaagcttga

SEQ ID NO: 99684 - DNA, 276 bp, Oryza sativa
  Clone ID: PAT_MRT4530_97472C.1
gggcctctatctaactagtacaccgttcatcttttgtatcgtgtttggtgcattctgcttcagccatgctctattcatgtttttcattccttcactcaccgtaaagaaacattctcttgtcacaaaacaaatccagtttaacttagcagaaatgctcaacgacgcaccgaatgctctaattattcctgaatatatccccatatggtggcgtgaacgacccaaagaggttttagtagaactatgahcaaatctggctaattctatacatagaggccc

SEQ ID NO: 99685 - DNA, 345 bp, Oryza sativa
  Clone ID: PAT_MRT4530_97473C.1
aagcatggccggatgccgctaggcctacggcaacaccacagagaagaggctccaaaaacgatgccaccacggtggtcacgacatccaagaatgccgccatcgcccatctaaaaagatgtgcttttcacctagagaagctcatcaagcaagggagagggtaaccctcgacaacaccccaagaggttacgacacccaaaggcgtagccgctgccagcccggtgaaccaccgaactaggcttttgcctgagaccctacacccttgactgcagatcgccatccaccaactcagcccaggacccctccgttccaccacccgcctgccgcctcgccagatttggccgaagg

SEQ ID NO: 99686 - DNA, 1098 bp, Oryza sativa
  Clone ID: PAT_MRT4530_97474C.1
atgacaaatttagcaagtacattgctccttgtccgtgctgtaaacttgagaggatggttcccccttctcgggcctgcatttgctgcaaatgagctagttttgcccacaaactgcctattttgcaggggagtggattctcacgcacctggtggtttacttaaatttttgaggaaaaccacaccaagaactgaacaacatgtgtgcaatgggagttcatcgcagccaatcaacgttggcgacgactgcaatgttggcgattgcgttaggactgaaaaacgcttgccatggacaaaagaggaggatcttagattggtcagtgcttggttgaataattcaaatgatccaatccaatcaaattacaagaagaatgaccaatattggaatggtgttgctgccgtctacaacaacaccaccccaaaaaacagggctaggcaggtcaagcaagtcaaggatcggtttggaagaattaaaaaaagggttgcatggttttgtgctagctggaaggaggctaatgctttgtgggctagtggtgaatctgaagtgaatttgatggacaggacagtgaaaagttatgaagaagatcacaaaaaggatggtccatttatgtttaagcattgttgggatgtgcttagcaaggaaccaaaatgggacgcctatttggaacgtttagaaggtttggagccagacaagagaaagttcaatgttgaggagggtgtggggcatcatttctctctagatgatgctagagatgaacgaccaatagggggcaagcaagctaaggagcagcagaaacgaaaaagaaaggaccaggctattatagatcttgaagaggaattccacaagcttgtagatgctcagaatacagcaaatgagggccacaaagagatgctagagacacagaggcgtgtgtctagtgagaatgttgaagctcgaaagcttaagtaccttgcagaaaaggaacacaaggaatcaaccatactagaaacatacaaatcgttgatgatgcaagatacaactgggatgcctgaagatgtgagatctgagcgcatgctggcattgaggtgtttcagggagaagttatttggcaaaactgactaa

SEQ ID NO: 99687 - DNA, 409 bp, Oryza sativa
  Clone ID: PAT_MRT4530_97475C.1
ccccctcaacgtggtttctttacacccgggggggacgaacgacaccgaccaccagcgcctagatgtgccgacctccgagcaatccatgcccaagggacggttatacgaaggggagcctgtaccagatagcaaatcatcagatgcccagacggaactgacagagaggatcactcatgaaatgaatggaactgcaatctaaaagggaaagaatttaacagagaagatggcgaagatactatacaggatgacttcaccctctgtaatcttagcagtcaagtcccatattataattatgatgtcgatcttattaaagatatacaattttctcacagcaacaatgttcaccgaagaacaaaacccgctattgaagttagatgcaaagaagggctatgctctgacacatgcacga

SEQ ID NO: 99688 - DNA, 285 bp, Oryza sativa
  Clone ID: PAT_MRT4530_97476C.1
gctctcctcccctcgacctccccgccgcgccaccacctcctcctcctccaagctctccaccccacgcactccggaagcttctagaacctccggcctccccttcccccgggggaaccttctcgcctcccgccgccatgcagagcgccgcggctggcgttcggcctcgtccggccgtgcccctgcgcggccgccgctccagctgggccccggcagcagtagctgtcgtcccatcctgctccatgcccggaccctcgccgccggcatcgcctcctcttcgcgagggcc

SEQ ID NO: 99689 - DNA, 1233 bp, Oryza sativa
  Clone ID: PAT_MRT4530_97477C.1
tcaaaagatagccattagtcccaaatatgaaataagcacttgcatcttcatgccatcttcagcgacccacaagtaatcatgaacccttggaatatgaaatctgaatgcctctgagttaggattttctatccagcaagaaagcatatttaataccttctgtacagcaccgctgcaaatgtatcgagtattctcatcttcgtaatgaatatgctgcatggcattcttcagagctttctctctcaatttgctgccaggccaatgcgatagaactggttcaacaaatttgtaaagagtggcccataggatatcttgccctaatggatgacggtagtacagatcctccttagcgcattggttacgagccttgtcccaattaatatcatcatagggtatattgtagagctcctttcgtagggtcagtactattggtgtaattgggccgacaaacttctttccgtaaatataagacataggcaagtataccattcggcagtgggaccatatccgtcctggatgaaatgggaggaaataaggtagcatccacaattctggaagcaatgggttgttaccagaccagtcaaagacaccaagtaccggcgaatctccttttgatgttctgttgatagcacagtatttagtgcaccagtcacatgcagtactataacctgggtaaaacaagcctggaagaaggaacatgggaccagcataatccccaggccagtgtccatcatgtgcctgaagagtagaataacgccgaatcgcccttttcaaagaggtcagcaccgcttcttctgtgacatcttcatcctcgcccagcttgataccaggaatctccagcttagagggattcgatctagtgaactttaatataggattagttggtatgaagagataagtgagctgagatagtccaatccaaaccaaagttgatttcttcggttttggatgaaatatgacccatatctttagccaacgaatctggatatgtctacgtccagattctgtcacattctgcaggagcaggagaaggtcggcgctgtgcttgatctggtgtcgccggcgggtgaactcgcggcgcgccgcctcgacctcctccgccgcggcggcggcgtcatcgtcatcagcagcggcggcgtcgaactcccagacctgccggccgacgtgcgcgttggtggagctcagccacccctcgccgccggcgccggcctcctccgcgactcttagccgccacat

SEQ ID NO: 99690 - DNA, 569 bp, Oryza sativa
  Clone ID: PAT_MRT4530_97478C.1
attgacgatattaattaatttatgagcatgacgtgggacaaacaccgtacttagtacgtaatacaagtagttataacgtgggaacaaactagtaagtaacacatttaaataaggaaatagtaatagttgccgtagaagccaagggggggtgagtaatcatatcttctttgtgactgtgactttaagaccatgtttcatacggagaaggatagaaggaattggttcgaccttgtgaccttcaatgaccttaaagtcatagtttcgtatgatctccagagctaccatcttcatctgcaagagagctagatttttacccaagcaagttctcggaccagaattaaaagccatgaacttgtatgaaggttcatgtcttagacctccattgtctgaaatccatctctctggtttgaaatccaatgcgtcttctccccatacagatctcatcctttccattgcatagatacatatcacgatctttgaatttgcatcaactttgtgcccgcttggaagacatctggcttcgcaagagacttgtggttgaagggaagtggcgggtagagtcttattga

SEQ ID NO: 99691 - DNA, 156 bp, Oryza sativa
  Clone ID: PAT_MRT4530_97479C.1
aatatcggactgccgaactggaaccaggctttatttcatttcatttgctaacctcttggcgagcaatatggtgccgtgcttaaaatgtagcacgacaagcttctatatatgtatgctcggtataagcactcgtaagcatatgtaaatcaagtttac

SEQ ID NO: 99692 - DNA, 837 bp, Oryza sativa
  Clone ID: PAT_MRT4530_9747C.1
atgggcgatgcggcggtggcaggtcgggtgccgcaggccacagcggtaggcgcgaaggtggaggcgggatcccgttcgccgccgcggcgatgggcttcgcatggaccctccgctcgtcgccgagcaggcggcggcgatggagcgcgacctggcgcactgcggaagcgcaaggacttcctgtccgtcgtgctcgcggcgagagagtcgaacaaatcctcgagggagctgctcacgtcggattacatcagcatgctcacctacgagcaccccctcatcaggtcagccacgacgtcgttcaccatctccccggtggtctacctcatcgccaagcacccagaggtggaggataaattgctcagggcgattgacgggatcaggaacagcacggcgaggaggcgtttgggctacctgtcgtgcggcaccattgctggcggtgctacccggacttgcgcaacaaccaacagcgacatcggcttcggccgcaacgccaacatggtcaccaaccccaacgacgacgacgccatgaaccccaggaagggcacgctctgctacgccatcatccgcgacaagccactcttgatggcgcaccatggccgacggcgtctccatcttcggtgccagccacatcttgatgacgccatctccatcttcggtgccccagccacatctggattgaccattgcccaccgccgcggcgcccacctgtgcccggcctactgccgtcgcgtccccgcaccaccgcaccgcccatcccgcctcgccctgatggtcagccggcgcgaggggaaagtgagaaagaaagagagggggaaggaagagatgaggggagagagatga

SEQ ID NO: 99693 - DNA, 204 bp, Oryza sativa
  Clone ID: PAT_MRT4530_97480C.1
gtgatggctgagcaggctaatcaaccgactgtgcttcataagttcggtggccaggtccaccttggctccagcttttctgaaggtgtacggtctttgaacatctgcccatttgtcttatcctatgactggcgccttaccacacggagctacatgaccaatggccttgttcaatggtttcattcaacattcatatgatgtcttcct

SEQ ID NO: 99694 - DNA, 260 bp, Oryza sativa
  Clone ID: PAT_MRT4530_97481C.1
catagacgtaatgagcatatagaaacatttgaacatgaagcagtaatcatatagctagattagaactgcatgacttcatccgttgcaattggtcagatgacctaaaatagcaagtttcaatatagtttaataaaaaattaaggccacacaatctaatgcaaaaggggcctattgacaaatcatcacgacgagcgggacttggctaatttcagccaaacagttttagctccaccaaaactgggagtggagttgggtggtcc

SEQ ID NO: 99695 - DNA, 443 bp, Oryza sativa
  unsure (1)..(443): unsure at all n locations
  Clone ID: PAT_MRT4530_97482C.1
gaagtaaaaaaaagtacttttcataattttactgtttcactgtaagctgcattaaatgtggcttagaagccaggaaacacccgtgtctcatgaagcaacgaattttacatgtcgcaaaacgttgcatggaattttatggaaattcttcaccattcatgataacatttagaacaagaggccctgagcccctgagcacataaaagcagtgaaaatatttttgggctggtaaccacatggaccataaaaaatggcaaaagcaaagggaaacagttaattacacagcaacttcataagtgacacaccaacctccagactgaaattgattatcacgaactgtgttacatgccaaggtggaaggacttctaatatctggtggctgaacttgtcgattggtagcccatgaagactccaccattttatccttncgatctcttggctttttt

SEQ ID NO: 99696 - DNA, 261 bp, Oryza sativa
  Clone ID: PAT_MRT4530_97483C.1
aaagcaccttccccgaactgtttttatcccaatggtagtcccatgaccagggaaagggcattctcaggcccgccgggcttttgaccgggggcaaaccagacttcgggtggcccccaaaccccaccaggggccgcccccagggggtccctggcccttttagcatggccagaataagtgaaccgttacaatttgaactgaaaactgaaagtttacgggaaccttgataactagggaaacgccccttaggaccccccgcggctt

SEQ ID NO: 99697 - DNA, 452 bp, Oryza sativa
  Clone ID: PAT_MRT4530_97484C.1
aatgctaaatgcagattctttctttggtttgcattccagtggcactactggacagctgatctcctctagaagcgtggtatcgatagtcactcggcctgtcccttttgctctcaggatcttgagatagcgaaccacatcctcctcgactgcgtgttcgctcagcagatctggttctgggtgttgtcgccttctggctgggctgccctctctctccctgtggcagctggttccaggactgttggctatcctctagggcctgcttacctgagcatctatgcgccgacttcgactccctggtgctcctggtctcttggcaggtgtggaagaaacggaactctagagttttcgactccgcgctctctttcgtctcaatggtcctggagtccatccgtttggagggccatctgtggtctttagctagcgttgccgcttttggggacttgttgggagtg

SEQ ID NO: 99698 - DNA, 597 bp, Oryza sativa
  unsure (1)..(597): unsure at all n locations
  Clone ID: PAT_MRT4530_97485C.1
ccaagtgatatttcttgatctctggctactactactgtgctaagctgcttgattacacattgctcttacaatgtccaatattagcagcgtcatttccggcatcatcagccggcggtgctacggcgtgtacgcgcgggcggtggtgaccacggcgcgcctccgacgcagcggcggccggncggcgaacggacgtcgcttcggcggcgacggcggcgacggcgaagagagaccgtggcctggatgcgggacccgaagacggggtgctgggccccggagaaccgggtggatgaggtggacgccgtcgacctccgcaacctgctgctcaactacaagtgactatatatatatatagctaattgaaagtgagnaaaccaaattaatgatcgatcgatgggtggatcagagtgatcgtagttacgcatatatacttgcatggagctagttttagaataaccagtgcataatttactctcatctacgtggcaagccactagcatgcatggtaccacaacatatttactgcaagatctagtgcaagttacagcattggatctgatctatatatacgtgtgttcagtaacaaaaaaaaaaaaaaaa

SEQ ID NO: 99699 - DNA, 657 bp, Oryza sativa
  unsure (1)..(657): unsure at all n locations
  Clone ID: PAT_MRT4530_97486C.1
gcacccgttgcgcgaatgcttaagcaggcctattaattatgtatcaagagtctgtccgctacaaatgtcgcgatgttcttgagacacatcagagatctcctattccatagagagattggaactaacatgtgtacggcacagaggacgcagataatgaaagggacacgaaagctaccgcgattaagctcttgatgatctgtcagggtcacacggaatgtaagctgacacgcccgtagcaagaagccaggcgcttctcttctgttgcttatttgtacaaacagtaatgaacactcatgctgaccttgtaaaaatatacattacaaaagtggctgttgttgacatctccatgacgagagatcttctggtgttagaacatctaagctatagagaatacacgatgtctgtttgggtacgtccagcttccaaaagtgttgatatgccaaggttgccaaggtgctattatttaaaaagtttgttgaatgcttcgattactacagcatgcgagctcaatatatccgtgacctgaagagtttccgcccatggttttcatgacagcatcataatttcttttgcggaagtatgcattctgcactgcttttagaatctcctaaacatacttaaagttcaagccacacgacanacttagtcgagcacaac

SEQ ID NO: 99700 - DNA, 323 bp, Oryza sativa
  Clone ID: PAT_MRT4530_97487C.1
aagcaaggccctgaaaccccattccagggggccaaaggggcccaaggggcaaaagaaacatggggggctcaacaagacccccactaaagggggacaaaaaaggggggaaaaaaaacgccccggagggggcaaaagccgcattttggaacaaaagaaccccccaaaagcccggggggggaaaggcccaaaaaaacaagccttttaagccgaaggggtctcgacctcgccataggggaaatcccgggggaaaacccggggggccttggcggtgacggggcacccaacggtgacccagggcccaagggtcctcctggcgggcccgg

SEQ ID NO: 99701 - DNA, 3624 bp, Oryza sativa
  Clone ID: PAT_MRT4530_97488C.1
cgttcggatgaatgaaaacaaaaagataagaaaaagcaaccctaaaacaaaaatacagaaaataaaaaaaataagcagaaacaaacgcaaaaacagacccagaacaataagaaaagaaaacgaaccaaaatcatctcctagggagcgatttggtcattcaccaagacggctgggatcgcctacctataatcatcctcaagccatgtcatggggatcttatccaatgccgccatcgggttatctttttccttactacatgccgtggggggcagcaccgccaatgttcaatcatatgcctccaatgcaatttaatcaaggatggggaggaccaaggaggccaacacgtgagtgtttgtcttcaccaaacaatggccggttttatgctaaaaatcgggtcaatgaaggaaggagggaaggaaagcgcatcaaggtggagactaggacttcggaggtgattactatcaaagtggggtctcatgatgagccaataccctctagagatgaagttggagagtcttcaagcaacaaatccgaagccggccggtctgaccgcggccctacggccggtctgaccaggccaacaggccggtctgaccaccggtctcaggccggtcggaccggggcctccgtccggtctgaccgttggtctccgtccagtctaaccgggctccagtgccggtttgatagttgatttgcaaagggtagctcgggggcttcgtcgtcttcaaataaaatcaacaggggacattatttacctcctggaatagagccaaaacaaagatggatgcctaaggattagacggctacccaaaagaggaggttgcaatgtctgcgggcccaagaattaaaagagaaaggggctgaagaacggagagataggagattcaatgagttgcgaccgccaccggaaaaggaagaacaatcggttgctaaagatgaaacatctccaaaagaagacatggatatcaacatggtatgtatgttgcctatggagctttgtgctatggatgaagccgaggttgctcaactttcattaggtcctaaaaatgcagtttttgagaagcccgatgaatcaaaccgtcatatgaaacctctttatctcaaaggtcatattgatgggaagccggtctctaggatgctcgtggatcgaggtgccgccgtgaatttgatgccatactcgttgttcaagaggttggggcgtggagatgatgagttgaagaagaccaacatgattctcaatggcttcaatggtgaaccaacggaggcgaagggtatcttttcggtggagcttaccatgggaaacaagacgctaccaaccactttcttcatcgtcgatgtgcaaggttcctacaatgttattttgggtcgttgttggatccatgccaattgttgtgtgccttctaccttgcatcaatgtttaattcaatgggacggcgatgatgttgaaattgttcaagcggatacatcgaccgaggttgcaatggccgatgcaatatttgagtggcgtcattggaatattcaatgcttatcagggatggatctttctaaagctaatttggagtggtcgcaaaagagggtgcaagaatatcggtctacaaagaacgatattggtgaaactattgaagattttgatgaagtagaaaagcttggtcaagggtttacatcggccgatccattggaggaagtagacataggtgatggaactaagccaaaggcaacttttgtaaacaaaaatattaaagccgattataagattaaaataatcgagctacttaaggagtatgttgattgctttgcatgggagtatcatgagatgtcgggtcttagccgtgatcttgttgagcattggcttccaatcaaaccgggttttaggccttataaacaaccacctcgtcgtttcaatcctttgttatatgaccgggtcaaggaggaaattgatcggttattgaaagcgggagatttaaataaagctacttcaaaagttgaatatcctatgcctatagccgacatgatgattaatgatgcctcgagtcataaggtgattagcttcttggatggtaatgccggctacaatcaaatctttatggcagaggaggatatgtacaagacggcttttaggtgcccaggatttgtttgtttatttgagtgggtggttatgactttcggattgaagaacgccggtgcaacatatcaaagggcaatgaatttgatcttccatgatttgctaggtattatcttagaaatctatattgataatattgttgtcaaatcggatgacatagagggacatatagccaatttgaggttagcttttgagaggatgcgtccgtatgtattgaagatgaacccactcaagtgtgcttttggtgtatcggcggcgaagtttttaggattcatagtgcatgagagaggagttgagattgatcctaagaagatagaaaagattcgtgatttcaaagcaccgacatgcaagaaagaagttcaaaagttgctaggtaaggtgaattatttgagcagatttatatctaacctagtggggcaagcgttcaaatgtacattgcttgatggggatttatatcgccgaaacatagatgaagtgttattgaagtgcttagatgatgatcaatctaaagttgctatgggaaaggtacatgaaggaatttgtggaactcatcaatcggcccataagatgaattggttgcttaggagagaagggttctattggccgaggatgatcgaagattgtttcaaatattatagaagatgtgaagcttgtcaacggcttggcaatgggcataggttcatgctagttgctacggattacttcaccaagtgggccgaagccgtgccgctcaagaatatgactcatacggaggtaattgactttattttgaagcatattgtccatagattcggtatcccgcaaacattgactacgaatcaaggagcttcttttatgtctaaggaagtgaagagttttgttgaatcttatggtattaaattgttgagttcttctccttacaacgctcaggctaatggacaagcagagtcgagtaataagacgttgttgaagctagtcaaaaagaagattgaggaacacccaaagaagtggcatgaagtgctttctgaagcattgtgggcgcataggatatccaaacatggtgccactaaagtcactctccttttgagttggtgtatggttaagaagacattttgccggttgaggtaaatcttggctctcttcggtttatcaagcaagatgatttgtcaagcgaagattacaagacctttataggagacaatcttgatgaagtcatcgacaagcgtttgaaggctttggaagagataaagaaagacaagaagagggtggccaaagcatacaacaaaagggtgaaagcaaagttgtttcaagtgggagacttggtgtggaagacaattttgcctttgggtactcgatccagggagttcggtaagcggtctcctagttgggagggtccttatcgagtatgcggcattgtttgaggaaacgcatattttttggagacacttcaaggagagtgttttcagcaagcaattaacgggaaatacttgaagaaatacttcccgagcatttggcaagatact

SEQ ID NO: 99702 - DNA, 126 bp, Oryza sativa
  Clone ID: PAT_MRT4530_97489C.1
aacaggttttgcagccttgataacatataatctctctacgaaggttgcgctaaaatgtatctttgttgaacaccaagctaatcagaaatatggtataatatgtgaacatactgatactgaatcttc

SEQ ID NO: 99703 - DNA, 2056 bp, Oryza sativa
  Clone ID: PAT_MRT4530_9748C.1
tcaaggatgatgtgacttgcctttctcagagagaacggccttccgaaccttcggcgacgaccacgaaccacgcttctggaacctccggaacgacagaaggggcgcggcggagacggacggcgagggaacgacttcggcggcgatccttgaacgaaggcgagacacggccggcacgaggcttgacgacgcggagccgaggacgaagacgatgatgggggccacaacgaccgggaacgacgagaggacgacgacgacgacgaccggggccggcgaggaggcgatgagggcagccggcagtggctgcacggagacgaggacgacgtgggacacgccgctgcgatgacgatgacggaggcggcgccgcgagacgacgagccgggcgaccgacgggacgtcgacgacgagaacgatcggagacgacgatgatggaccgcggaggggtttggatggaggggaaacaatgccgaggatggctttgccggtcaccgtgccgagggaggggacggcagcgccggctgacgcacgggcatggcgaaaagggcagccggaggagatgccgctgaggaggaaggagaagccggcgcgggcgacggtgttccggcgaaattcgggtgaggaggaggtgatgccggggatgagggcggcgtcgcggagccgagggaggtggtggcgacgtcggccggcgcacgggaaacgcgacagtggcggccggaggtggaacagtggcggcaacaccactgttttgccggcgaggacgcgtctccggtgcttcccccgcgaaacggagggctgaccgagggagaggaggtggctgcgaggccgagggagaagacggcgcggccggacggcgctccggcgaggagggagaggcggctggaggcggccggcgcggaggaaagagaagggcgacggcgggaacgcgcctccggcggtcaccgcgcgaaacggagggcaggccggggtggaggaggtggcggcgacgctcctcgatggaacccaaccaaggggtggcactggatgtggcggcgcacatatataggatgaggtggagatatgctcatgtgaagatgccatccccacgatccggcggaggcaggatacacagctctggccagatctacagcaacctcgccactggcttccggtgagaccagatatgcctaactcccagtcaagcattaaggcaagagattgttcagcagttctgacagcaaacgggttgctggcgttatatctgcaagcaaagccatgagccactcctggaaagatcctggcaaagtaatcaacctcaggtctttggcgcaaggcattcacaaactggtacactaatcttggtggtgttacagcgtcattctcagctccaaggatttcaatggggcatttgacatctttcatatcatcagcagtcaccgatgaaggatgggagatgacaatcgctccaacctcattggttttcgcaacctcgacagctaactttccgccccaacaataacctccaactccaacaacagatttcccttctctttttagagcagcaaagatcggtttagaatcttcagctgccttcaccggagagtgagccatgatccattgtgtaatgtttatacttgggtctccattgtaaggtcgcccttggaagaaatctggcaccacgacgtaatatcccgcttcaccaactttgtcagctattttcctcagcaatggtgcttcaaatccaaagacgtcggaggcgaggacgatggcccggccggagtgggcggcgccgccggtgacgtaggccgcgaatcctcccaggttttggacgaccacgccggcctcgccgtcgccggcggccgtcagctccggcgggttctccaggcactgcaaccgcggagaaccagcagcgccgccgccggccgccgcggcgagcacggcgaggcagaggaggctccggtggagcatcgacgtcggtgccatggtgatgggtttagtttgcatggtaatggtcactcgatgcagagggttttgtactacattttggctttagcacggtaggtagcaaaaagaagcctcgtgc

SEQ ID NO: 99704 - DNA, 250 bp, Oryza sativa
  Clone ID: PAT_MRT4530_97490C.1
caatattgaactcgttggaaattgggttgcagctgttattgggggttggtgcaatttcctaactgtcatttacattggatttgttagtgctcacacactgcccgtcctctacgagaagtatatatgaagatcaagttgatgatttcctctgcaatattcttggcctgctgcgtaaccagtatcagaaactcgatcaagttgtgttgagcaagaaaattttgccaaattaattagttatattaaatctaat

SEQ ID NO: 99705 - DNA, 262 bp, Oryza sativa
  Clone ID: PAT_MRT4530_97491C.1
cggacgcgtgggcaaaaaccctcctcccctctccctcgctgcgtcctccactcttctgctctagctcgagctcgacctcctcctcatccgccatgggcgacgacatcgacgcgaggtacgaggtcccccgcacggcggagttcatccgcgcccgcgcctacaccagggtcgcgctccagttcccggacgagatgctcagggacgcggcggcggtggcgcaggcgctgcggcgggagctaggcggcgtggggtaaagctgttc

SEQ ID NO: 99706 - DNA, 1421 bp, Oryza sativa
  Clone ID: PAT_MRT4530_97492C.1
gttctaaactagtggatccccgggctgcagtgaattcggcacgaggccctctttgccatggttcccccatcttgagctgagctgagcagagcagagcttgtacctgcagccagccatggtgaccaccgaatttcgtgcagaaccaccaccttcagaacagccagttcttcctgctccccaagaggcagcttgtgacctacgccctctacgctctcatccctctcgccctcctccattaccttctcttcaaccctgtggccactgccaagaagccggtggtggtggtggttcaggcgacagacgatgcttcggtcatcgcctcgtctcatcacgagcatgtcaaggtgaatgccaagcagcaagtggcggcggcggcggcgtgcgactactccgacggcgagtgggtgccggacgcgcggccgcctctctacaacgggacgagctgcgccacgatcaaggatgggcagaactgcatggcgcacggccggccggacaccggctacctccactggcggtggcggccgcggcggtgcgacctcccggcgttctcgccggaggcgttcctcggctggctccgcggcaagcacctcgcgttcgtcggcgactcgctggcgcgcaaccaggcggagtcgctggtgtgcctcctggcgtcccgctccacgccggagctcgtgcaccgcgacggcgaggagaacaggttccggcggtgggcgttccgggagcacgacgccaccgtgtccatcttctggtcgccgttcctcgtcaaggccgcggagaaggcggagcgcgccggcgtgcggcacaacaacgtgttcctggacgcgttcgacgagcggtggatgtccgggctggggggcctcgacgccgtcgtgctctccatcgggcactggttcctgatcccgggcatctaccacgacgccggcgaggtcgtcggctgccacgactgcgccgagttcaaccacaccgagacccccttcttcgccgtgttcaggcaggcggtccaccggacgctcgccgccgccggccgccgcggccgcaccgtggtggtgaccacgttctcgccggcgcacttcgagaaggagtgggacgaccccgcgacgtgcgcgaggacgcggccgtacgaggacggggagaaggaggtgggaggcatcgagggggagctccggagcatcgccatcgaggaggcggcgggggcggcggcggcggcggcggcggcggcgaggagcagggtggaggtgctcgacgtgacgaggctggcgacgatgcggccggacgggcacccgggggtgtacatgcaccgcgacccgttcgcgcgcggcgtgccggagcggctgcagagcgactgcctccacttctgcttgcccgggccggtggacacgttcaatgagatcttgctgcagctactgatcaagaagaagcag

SEQ ID NO: 99707 - DNA, 377 bp, Oryza sativa
  unsure (1)..(377): unsure at all n locations
  Clone ID: PAT_MRT4530_97493C.1
annnaaacnaaaggggtttttccttttgggttaaaaagggggcgccatgtttttttcccggcccagttttctgccttttttcttggggttgggctaaaagaaacaatcttttccccgaaaagacgggtttttttttcaaaacttccttgggggttaacttttacccaaaaaattttttttttttctttttgggatttttccaaatgagggggggccccccaattttaaaactgttgccggttttttcccctttcgggaggggggggtcaacattttccttttaatttgttgggcacccacatttctccacttttgaaaggttttttttttacccctttttttgggccccgggtgtttcctggaaaaattattttttt

SEQ ID NO: 99708 - DNA, 264 bp, Oryza sativa
  Clone ID: PAT_MRT4530_97494C.1
atgccgctctccctccgcttgtgcttacctgtcgcatccttgcgttggagaccaaggaggaggcgtgttggcggttgcctccttgagctcgagctcaaacgctccaacatccttgtgccggaggatgaggaggagatgcacatcgacagccgcctcctcgagcgcgagctttgcagcttccctgcattggaggctgccgagctgcctctgtgcaagcttcggctctgccaccctctccaagtgacgggggtgacggactggtag

SEQ ID NO: 99709 - DNA, 276 bp, Oryza sativa
  Clone ID: PAT_MRT4530_97495C.1
atgggcgactaccttaagcgccctcccaaggttgtgccgttaaatgcccacgcccacctagggtcggagctagcacaaaataaaataaaggagggttcctcttgcttgctttaccctgtcgtggggccatcgcatgaggtgaagtctagggcatcaaccagctgggaggaggaggcacctgtagaggtggaggagaaggtgcagccagagtcctcacatgaggacccggtcgtccccattccccaagcacgcactctggtatgggccgaccactag

SEQ ID NO: 99710 - DNA, 505 bp, Oryza sativa
  Clone ID: PAT_MRT4530_97496C.1
gggggaaatctcattttctatcgcaccaaaaatcctaaataaaaaaacgatgggaaatcggggcaaaaaaatatagttttttatcacaaaaaaactatcattgctccaggggaaaaaatggaacccaattattttttattaaaaaaattaagggccaaaagcccaattattttggaggcgggaccccgcctccaaagggccccactttttggcctctccgccggcatcccaagaacgacccctccttgccctcaagaaaaaaccccccgggcgggcccccatccgggaggggggccaccggaacgacgttcctccccccctcctggggcggaaggaatcccgagtcgatgggcatgtccgtcttgaccaaacccgggggcccccaattgacccccaactccgggggcctcctcgccaaaaacctcgggtacccgttcatggccaccttggccgttttgtaccccggaaaccccgttggccacccgtgcgcctccagggcgccggc

SEQ ID NO: 99711 - DNA, 230 bp, Oryza sativa
  Clone ID: PAT_MRT4530_97497C.1
agataatagaagctggtattcaaactcacggaacactgtacatgcttggaacgtgcttgctagtttattgctgcagcggtgaactacatatttacttgcaagaaaagaaaacgggaagggaaagaaaatggatccctcatccctgaaagtcaaggaaggagacatgtcaagaaatacagcgacaagaaccccctctcctcaccgggcaggacgttgtgtatgttatcagc

SEQ ID NO: 99712 - DNA, 2900 bp, Oryza sativa
  Clone ID: PAT_MRT4530_97498C.1
cttgctaatcaggttcgccaattgatggtacacgagacaagatcacgcacactagcggcttcccaagaagaagggaaggctgctccgaagaagcagaagacagaaagcaaagagcaggaaggtggccagcaagcgccctccaagaacaagaagacagccgacaatgaagagcacgacggggagcaggagccatcaaagaacaagaagctcaaagcggaggaatctgacctgaatgggaaggcaacagccgtgaaggagttctctgaattctgcaaggccataagggaacacctcacgatcgaggacatgcgcaagatcctccaaggcaatgaacaggatgcatctggatcagaagatgcagttgtcccaagatgtgaggatgtgatgttttatgggcctcttgacaagtgccccgtatgcggtggtcagctcgagtgtaagggattgaaatacaattgcactgggactcacagtgagtgggcatgttgtagcttcagtactaacaatccttcgaggagaggtggtcctataaaggtccctgatgatgtcaagaatgatttcgtgcgcaagtggctgaagcaacaagaagggaataagtaccctaaacgtaatttggatgacgagggtatcttctcgggcatgatgattgcattgtctggaaggatgtcacgctcacatggttatttcaaggagcagattatgaagcatggagggaaagtcaacaactccgtgattggtgtcacttgtgtagtggcttccccagctgagagacatcaaggtggctctggaggatttgccgaagcactggagcgtggaactcctgttgtgagtgagaattggataattgatagcgtccagaagaaggaaaagcaacctttggctgcttatgatattgcatctgatgttgttccagaaggccgagggctgccgctgggcaaccttgatccaactgaggaggctatcgagaccttggctgcagagcttaaacttgcaggcaaaagagcagtgcacaaagattctaaactggagaaagacggaggacatatctatgagaaggatggcatcatctacaattgtgccttttctgtgtgcgatttaggaggcgatattaaccagttatgcattatgcagctgatcatggtgcctgagaaccatttgcacctatactacaagaagggtcctattggacatgaccagatggcagaggaacgggttgaagattttggtagtcgtttcaatgatgctatcaaggaatttgtccgtctttttgaggaggttactggaaatgagtttgaaccatgggagagagagaagaaatttaagaagaagtgtatgaagatgtatcccttggacatggatgatggtgttgacgtgcgccatggtggtgtggctcttcgtcagttgggagctgctgcagcacactgcaagcttgacccttctgttacttttatcatgaaacaactatgcagccaagaaatatacaggtatgctttgacagagatgggccatgatgtgccagaccttcctatcgggatgcttacagatctccatctgaaaagaggggaggagacgctactagagtggaaacaagatgtcgagtctgctccagagtctgggcctgctgctgacgcattctggatggagatcagcaataagtggttcaccctattccccacaactcgtccatatacaatgaagggatatgaacagattgctgacaatgtggcttctggtttggagactgttcgtgatataaatgtcgcttctcgtcttattggtgatgtgtttggttcaactttagatgacccactgtctcaatgctacaagaaactaggctgttctatcaatcgtgttgttgaagactcggaggactataagatgatcctgaagtatctggagaaaacctacgagcctgtcaaggttggcgatgtggtttacagtgctactgtcgagcggatatatgctgttgaatcgagtgctcttccttcttatgatgaaataaagaaacttccgaacaaagttctcctctggtgtggaacaagaagttcaaatttgctcaggcacctgcgcgatggtttcgtgcctgctgtctgccatataccagtgccgggatacatgtttggcaaagccatagtttgctcagacgcagcagccgaagccgcgctctacggcttcacggcggtggatcgtccggagggttacctggtcctggcggtggcatctctggggaaagagatccaggagataacaggcacgccaggctcagaggacgtgaaacgcatggaggagaagaagatgggcgtgaagggagtcgggaggaagacgaccgacccgtcggagcacttcacctggagggacggcgtcacggtgccgtgcggcaagctggtgccgtccacgaacaaggacggcccgctcgagtacaacgagtacgccgtgtacgaccccaagcaggtgagcatcgcgttcctcgtgggcgtgaagtacgaggagcagaacatggaggtggtgccggacgagtgatcgatcgccggccggtcacccgaccgaggccggtggcggccatctgccgttctgcagctttttagcttagagtaatggtagcgaatgcattttgggcccgtgtcccattttgggctgtgtacttgctggagcccggcagcgacggtggtggctggtgtgttcgacggtggcagcccgtgtcccgttttgggctttgccttgttctcttctcttcgtcgtttgccgtgcgggtgtgcagcgcagccacgctctgtaggctgaaagaacccgttgtcgcagtgtcaaaagtttgtacatatttgttatgtgaatcgtaatgggatgtcggggttatcagttatcacttacttttcaaccagactagttctctctctctctcc

SEQ ID NO: 99713 - DNA, 237 bp, Oryza sativa
  unsure (1)..(237): unsure at all n locations
  Clone ID: PAT_MRT4530_97499C.1
gtgttcacgccccaataatacacatcaattgcatcattttcaaccttggtcttacaccncaccatccagccataatcatcaactcatcacaacaacaaaccatacctttattaattttgccaatctacacaaacacatactttctactagctcatctacttaacttattactacattaaccaaataaaccatgctaccaacttcacaaatcatctacaccatcacctttatacaacc

SEQ ID NO: 99714 - DNA, 469 bp, Oryza sativa
  Clone ID: PAT_MRT4530_9749C.1
cacatacacaaagcaacctgaatatacaacagacgcaatcatataaaggctagaaaccattagacaatttcacacctattaacacaacctagggcacgcgggggtgaatcaaacacacacacacactgcttgcttaattcacactcacacaggcataacccatcatactaaccggactatttatttattaataatacatacaggctactgcatttgcaataaagacatagatagcctcaacattatcagatgcacgggtcgcacctgcaaactgagccacacttgatatcatgggcataatatccagattcacactctttgccaacccgactatattgcgaatatttaggtgcaacatctaacacagcgatcgaattatctgcacttgtggtgaaattataaggcagataagggtacatcttatcacattcaccgcagcatgcgcaataacagcagttgcaacttcaac

SEQ ID NO: 99715 - DNA, 204 bp, Oryza sativa
  Clone ID: PAT_MRT4530_974C.1
atgtcaagaagacgacacgcaccacctcgcccgctcgacgagccgaccgtctccatgggagaggaggagcagaggcgttcgacggtgaccgccgcgctgctcgtgctcgtggcctgcaacctcgcgctcgcgctctccgggctctcgccgccgccgccgagcgcccacgacgacgacgacggccgcgcgcgtcgagccggtggg

SEQ ID NO: 99716 - DNA, 774 bp, Oryza sativa
  unsure (1)..(774): unsure at all n locations
  Clone ID: PAT_MRT4530_97500C.1
agctacagactacncagcggcgcacagcacaccggcagagatgngagcgtccagcgtacacgangtcgcccgatactaacagatcgagaggtacaataaagcagcgacgacgaagcaataaatacatcggtacatagctagtatccctagtcgtcgaaatccgtacatccgcgacacaatacccacacacacatacggagccggaaagcatacaagtagtacaagcccagngggtagccctacatcgaagtcgangctaaagcgtaccaccatatacatacagcnatacagcaagcgacaacaacgcaccaagctattaaccaagtccagcggaataccctggtccatagcccaaccaagcatacaatacaatccacgccaaccacacaaaagaaaaagccagtttagcatataagaaccacacaacaccaccttacctccacacacagacacaccagcaccacagccattccaggctgcaggcaaaccggtaatcaaccacaacacaaaaaggccaggtaataacggggtaaattcccacaaaaatccaggggaattaaccccgaagnaaaaaaacccatgttgaacccaaaaaagcgcaaaccaaaaagggccacgaaacccgcttaaaaaaagggcccccttttaccagggccttttaaccaattaaagccncccacccccccaaaaacaaccctttccaaaaaacaaaacccccacaaattaaaaaggtggcaaaacccacaaggacttaaaaatccacgttcccccgaa

SEQ ID NO: 99717 - DNA, 405 bp, Oryza sativa
  unsure (1)..(405): unsure at all n locations
  Clone ID: PAT_MRT4530_97501C.1
actacctccagggcatgacaacaggtgtccagagaaggctagttcaccgtagaccaggagcaaatacattcagtccggagtacgtntccgtccgggttattcaccgtaaagcagtgttcccctcgcttgttgtcatggaggcaatatgacaatagtgangtcactggaccgctttgccaaacttacctggaatcaagtcagcaaccgggccggagcacaatatatgtcgatacctgctgcatagtgcatacactagtgagtactatatgacaaagaaattgaagtgtgacgcctaacactataactcgtgacattatataggctggagataaatatttatgcatgtctttccgaacgcaataactatattcacgaatttttgtgtgtaacnaaaaaaaaaaaaaa

SEQ ID NO: 99718 - DNA, 717 bp, Oryza sativa
  Clone ID: PAT_MRT4530_97502C.1
atgacgtcatcaccggcgagaggctcgggacatcacggtcaccggcggtcacggcggcgagaacagagggcaccaacgcgacgagcacgacgcggggaactcaccgagtggcggcacgacgacgaacgacgacggaagacggccggcgacaaactccgaaggcggcaaggtactggtcgacgacggcagcggcttttcggcgacgagcagcggcaacggaggggtggacgggcttctccttggtgctgcgatgccgagggaggtggcggcacaagtcggggacgaccgaggcgacggcacggcgcggatggaggcgaagcagatcggcttgacgtcggcaatggccttccggttgtcttcggcttcggggaagtggaggccgctcttcctctcttcgatgcggtcccgatggaggcgacggcgccgaccggtgatggcggagccgacggctatagctgggggatgcggcggatttggtggaggaagcggcggctgcacaggtacaggacggctggctcgggctctatccaagcttgaagacgacactgtagcagggaggcgaattagactttctgtcttgggctggcgaccgtcatcgaagccaccactgcccgcttcccagtaccactcgacattgccaccgtcgtcgaagtcgttgccgtggggctcgccgaccttcattgatgctgccaccgtcgcacccaccgctaccgccat

SEQ ID NO: 99719 - DNA, 769 bp, Oryza sativa
  Clone ID: PAT_MRT4530_97503C.1
aaaagggctttatgacgtcatcgatgacgtcatcaacggcctctcgggacatcacggtcaccggcgatctaggtcacggcggcgagaacggagggcaccaacgcgacgagcacgacgcggggaactcactgaggggcggcacgacgacgaacgaagacggaagacggccggcgacaaactccgaaggcggcaaggtactgatcgacgacggcagcggcttttcggcgacgagcagcggcaacggaggggtggacgggcttctccttggtgctgcgatgccgagggaggtggcggcacaagtcggggacgaccgaggcgacggcacggcgcggatggaggcgaagcagatcggtttgacgtcggcaatggccttccggttgtcttcggcttcggggaagtggaggccgctcttcctctcttcgatgcggtcccgatggaggcgacggcgctgaccggtgatggcggagccgacggctatagccgggttggtggcgacgggccacctggcagggctcagaagcaggaagcggggcttccgctgcagctccggcgattgcacgctgtaacgaggtcgcgcgtggagaccgggccacggtagaccaccaccggtgccgccagatttcctggccgacttcatttcttgctcatgtgcatctttatccagctgcataactctcattgtattccggaagctcgtaacatggggccccccatgcatccgaccaccaacgaggtcgtcatactcatcctggctagggtgctttgccat

SEQ ID NO: 99720 - DNA, 273 bp, Oryza sativa
  Clone ID: PAT_MRT4530_97504C.1
attccgggtcaccaccgcgtccggtcgctctatgtcactcaatgccgaaggccacatcgcaccggagtgaccatccaacagcccaccctggagatggcccggacatgctctgattgaacagtgatgcccggcaggctgctactgacagttttattttacgaggtagatagctaaccatgggatctggccataaacgcagcttaccaggagatccgtgtttttttttgagcgcatctcacgcgcggcaggcggtgtctaacactgtgaggatcc

SEQ ID NO: 99721 - DNA, 1620 bp, Oryza sativa
  Clone ID: PAT_MRT4530_97505C.1
atggccgggcgcgcggcgctcctcgcgctgctcctggcgctcgcggcgccggcgccggccgcgtcgcagcccgccgccgtggacccgccgccgtcgtgggcgttcccgaacgcccgcctccgcgcggcgtacgtcgcgctccaggcgtggaggcgcacggccatcttctccgacccggcgaacttcaccgccaactggtccggccccgacgtgtgcggctacaacggcgtgttctgcgcggcgcaccccaccgacggccgcgtccgcgtcgtcgccgggctcgacctcaaccacgccgacatcgccgggtatatcccggcgtcgctccccgagggcctccccgacctcgcgctgctccacctcaactccaaccgcttctgcggcgtgctccccgacaccttctcccacctcaggctcctccacgagctcgacatcagcaacaaccgcttcgtcggcggcttcccggaggtggtgctctcgctgccgtcgctcaggtacctcgacctcaggttcaacgacttcgagggcgccatcccgcccaagctgttcgaccgcccgctcgacgccatcttcctcaactccaaccgcctcacgcgccccatcccgcccaacctcgggagctcgccggcgtccgtcgtcgtgctcgcgcacaaccgcctcgggggttgcatcccgccgtccatcgggaggatggccgagacgctcaacgaaatcgtgctcatcgacgacgagctcaccggatgcatcccgccgcaggtcgggctgctcaggaaggtgacggtgttcgacgtcagcggcaaccacctccagggcccgcttcccgggagcgtcgccggcttggccgccgtcgagcagctcgacgtcgccgggaacctcttcgaaggcccggtgccggcgaccatctgctcgctgcagagcctcaagaacttcacctacgaggacaacttcttctcctcgcggccgggttgcccggcggcgacggccgacgggcggtggaactgcatccctggagctccggctcagcggccgccggcgcagtgcgccgccgcggccgcccacccgttcgactgcagcaaggcgcaatgccaggcgacgccgccgacgactcgccgcccaggtggccgcacgccgctggctcctcatagatcgcctttgccacaccacatgcctccgagacggacgccgccgacgccgccgccgccgagctcgcccaccccatttcacctgccgccgccgccgccaacttacagcgagagccccaaatcctcaatgccgccatcaacctcaccaccatcctctcacggcgcctcgccgccatcctcatcctcgtcgccgcccacagagcacccgggatacgtgttgccgccgctcacgccgccgccgccgacgacgacgccaccaggacaccacgctcccggtcccgggaacaccatcctcgccggccaagctcttcttggtcgccacctcaaggaggcggaagggaagctgccgttcccgccggtgcacggggtggcgtactcgtcgccgccgccgccgccatcgggagacaagctgccgttcccgccggtgtacggggtggcgtactcatcgccgccgccgccatcgaagccgtacaactag

SEQ ID NO: 99722 - DNA, 410 bp, Oryza sativa
  Clone ID: PAT_MRT4530_97506C.1
agctggttgaccgcccaataaccgtgggcacgactattcgaatagttttactctgattagaggtgtacaactttacccacaagacacaatccaccggcatgttaccatgtcatcatgcgcccatgatgaacatgtcaccatgtcgagtgattgtgacaaaacccgtcatataactctccctaaccgaacatacccaccttaggtttcaccccctccttattccaagtcgggtagtcccctctcgtgtctaggtagatccagaagtagcatagaccaaaatccaggtccatccatactccatcacacccacccttgccatggtacgtcagctaggttaagttatactcctgatttagcctggagcccatttggcttgtagttagtacgagtatatcttccaggaattccca

SEQ ID NO: 99723 - DNA, 436 bp, Oryza sativa
  Clone ID: PAT_MRT4530_97507C.1
aagatgaaggcggttcctcgtattcatcggagtacagcgactaagattggccagtagaggccttagcgtcctatgccgttatccctaaatttccaatagatgtctgaatcaagtactgttagtgggcattacttgcccttgtggttaaaatgctagacgcggaccagaggtctgtgtgatagataggcatgtagtactgatgttcagtactgcatgcttcttttgattttcggcgtagccgagctgcccaaacaaccgggtagtgtgaagctgtactttgctggtttaaggtgttgggattgatgcgtacaatgtgccaaggcaaagtaccaagtttacctgaatggttgcctttacatattgttacaaaaaaaaaaaaaaaactcgagactagttctctctctctctccctcgtgccgaaattcctgcagcccgg

SEQ ID NO: 99724 - DNA, 824 bp, Oryza sativa
  unsure (1)..(824): unsure at all n locations
  Clone ID: PAT_MRT4530_97508C.1
catagaaaacaaaagaagagcttgatgccataggagagcacaagagctcaaccacacacacacacacacagagattttgactattaattttcatcgtctttggttttaagttggtgtgtgttcttccatggccggcctgagtgtccttcttgagacacacaagaacgatcaccaccccaacatgaggcctccccaaatcatcagcaaggccaccctccatagccacccagagacgatgtcctcctcctctccggcgactgcgacgacggcgacgatgagctccttcttgcagcgctgcttcctctgccgcagggagctcgccgacggcaaggacatctacatgtacagaggggacagagcgttctgcagcgtggattgccggtgcaagcagatcttcatggacgaggacgccgccgccggcggcggcaactgcgccgcggtgcgcgccggccggcggcgggcggacgtaccgcgcgagcaaacccgcgccggtggcttcgcgtactgatcgatcgaatcatcgatcagcccagccgtacgcgcgcgcgcacgtagattaattagcacaaatgaaacgaaaagcagaagatatcaagcacgacgatttggggaagatcaagatgcttgattcatcatataataataataatttattattcactcgccaatgaaaatgtactggttgattaattaaatccctttctttggaggaaaanaaaanaanannnaaannanaaattccaaaanaaggcncgagnnccttgccncnanncggaccatcccgttgatgttcaggtgcgcgctgtgttgcttttcctctttca

SEQ ID NO: 99725 - DNA, 128 bp, Oryza sativa
  Clone ID: PAT_MRT4530_97509C.1
atctgtcttgctttgactatcaatgagattacgcctcatagaaattgacttatctctaacagcgacgagaagacgcccttctaccggcgtgttgcacttagctgtggagagagagcggcttagtgctg

SEQ ID NO: 99726 - DNA, 1147 bp, Oryza sativa
  Clone ID: PAT_MRT4530_9750C.1
aaatgattttgtaaaaagaaaaaccctaaaaagtcttttccccccccctccccctcttgggccggctcgggccccatctccttccctctctctcctcctccccgcggcccactcggcctctccccgcgcgcgcgccgctgactgggcgggcccgcccgccaccctcgctgacgggtagggcccacctgtcatccctatcctcccgccgctcccgccgccccgcccgcgccctagcgccgccgccgccgcgaatcccgccgcctcccgccgtccccgcgcgcattaaagtggggggaattattccccgtgatcccctctctctttccccccgttctctctctctctcccgcgttcaaacgggcggatttgcccccgcaaatctcgccggcgccattgatggcggccgacctcccgcgccggtttcctcccttccccggccaccctctctcgccccggctctatttaaaccctccccgcacctcctccgtccggttccgcctctcgccgcccttcctcctcgccggatttgagctcgcgacgtcgccctctctctccgccgtcgccgccaagctccggcccgccgccgtcgtcaccccggaccgcctcccacctcggcgccgcctccttcggcttcgccgcatcctcgccgacctcgtccacctctccgtttcggtcgccgaccgccggagcgccgtcgtccccgtcgacccgagccgcgccaccacctccctccgctccggccgcctcctccgtcgccgccgtcgccccggggtgagccgtggaccgtcgcctcctttcccccttccctcccctctctcgggcgccgctccgccgcgccggtggtcaccggcggcgaccatcggggcgcgggtgcgccgcctcccgtcggctgtgccggcgaggccgccttcgggcgcgccccgcggctgccaggtggggcccggccgtcagccgcccgcgcccgcgggtgcggctgacgcgtgggacccacggcgccggccggcgcaagccgcgtgcacctggtccaccgcggaccgtgaggctgccgcgtgggccccactcccgtggacccggtccgcgcgcccctcccctcggccttgttcaccctagaataaacaaaacctcaactagtggacactctactcat

SEQ ID NO: 99727 - DNA, 402 bp, Oryza sativa
  Clone ID: PAT_MRT4530_97510C.1
atgtgccctgacattggcttcatcttcccgcagaaagtcagaaaatcaatcggtgcaactgcaagcttcatcactgtcctcttcaacctccacacatgtcgattcgtcactaaccaacactgctacctcgacctgactcatgcagacctgggtgacgtctccttcccgaacctcatgctagctagcccacgcaaatcgtctccactgccagcctccccaactcccctccaccggatctccaatgtcgctattgggaaggtcatccttggccacatgtggctccacggctcacttctccacctaagccttcttggcatcctcaccatcgtcgcacacgggagacttacctcacaggtcgccgtcgacaacttggccccacgcctcctccgccttgtcttctct

SEQ ID NO: 99728 - DNA, 434 bp, Oryza sativa
  Clone ID: PAT_MRT4530_97511C.1
aaaaaaaaaaaggaaactggtaatgcatcttctcactgaagatcagaaccataaaccttatcataatttacatacgagaaataattcatgcctacctatactattgccaacatcaattcataatttagatgctgtctagctacgttctgaaattctgcttcgaggaccttgcaggcctgattactgtgcttcagtttgtgttctcccttgcaacaacaatccatactggattcagaattgtatttgaccaaacaggttttgcaacgattatgatccactcgcctgttctcataagagaacattcatgctcatcttcattgtgatgcttaaagttgcagatttgcagtctagcacccttccataagaactgtccagatatgtagtaaggcacgccacgatgataagaactgccctcatcacatggaaccttcatt

SEQ ID NO: 99729 - DNA, 304 bp, Oryza sativa
  unsure (1)..(304): unsure at all n locations
  Clone ID: PAT_MRT4530_97512C.1
aacaaaaggggattcatnctgccggcgcgcttttttaacaaagaaaagaaaaaaaagctctacatctgcttctctttctttttttaggaaaaagtatgacggcaggacgttattatgatatcttaatgcaaatctttcgtgacatacatcgggacaaaacgttggcccactggattggacatcatgatattcataggatatctgaggactgcagtgtagcataaactaccatgggcttacatgtgtgaagacccttatgcttggatgtagcacttgcttttgaaacagcggtgacagtcttccc

SEQ ID NO: 99730 - DNA, 414 bp, Oryza sativa
  Clone ID: PAT_MRT4530_97513C.1
atggcggtgccgttggtggacgcgttgcgcggttcgccctccgagctgctcgcgctccccgaccacgcccaccacttcccgctccagctccaccggcgaggcgcgctccctctctccctctcactcaccgcgcccgctgccgagctcctcgctgtcactacctcccccgcagcggcggccgccggctccggcaacggtggggtgacggtgacagggagagctacacctcgagtgccatctgatttggaggaggggagtgagcctgcccgccaagatcttcacccatacgccgctgtgtactataccggcgacgcccgtacaagcgtgtcgtcatcgagccatctcgacgagatttcccagccccgccactcattcgcatctccagcagctctcactcctaacatcacctcctaa

SEQ ID NO: 99731 - DNA, 337 bp, Oryza sativa
  Clone ID: PAT_MRT4530_97514C.1
taatcccaagctaaaagaaacagggctatcggagatataggcccggggccagggggcctcggggttccacgtcacacccctcgggccctcgcgctgcctcgccccgaggccctcgcccaactgccatgtggcgggggaaacgtgcggtgccgcccgatggacccaccgttatccggagttccctccacgtgaggaggaccgccacaagccttcgctcatttaagagggaatgacagggctgtcccccgtgtcaggcggggggcggcgccgggtcccactcaaggacggactgctgcttagcttccgggcgaaggcacggatcgtggtccgatcaagg

SEQ ID NO: 99732 - DNA, 295 bp, Oryza sativa
  Clone ID: PAT_MRT4530_97515C.1
cggacgcgtggatcgaggcaaggcaaccgtcatggccaccgtcagcgccgtcgaggcgaccttcggcggtgcccgcgccgtcctcgccgggccacttgctctgccgcagatgagggcgaggaggagcgagagggtgaggtgcaactactccaaggaggcggtaacaccggcagcggccgtcaagggagccggtgcaattctactggcgattgctgtgacggtcgtgcccgcaatggcactcgaccacgagaggttgacaacagagggcaccgggcttactgtggacctgagcaac

SEQ ID NO: 99733 - DNA, 447 bp, Oryza sativa
  Clone ID: PAT_MRT4530_97516C.1
atggaattcgccggagtttcctcccgctccctcccggagttcgccgctccctcctctatgtcctgcgccgccaccgccgcctctgcgtcccccgccgccgtcgctgccgctgcttctgtgtccccctccgccgacgaccgcgctgaggaggcggctgctcgtcgtggccgccgccgcctcctcgtcccctgccgccgcctctccgtcacctgccgccgccgccgccgccgcggctccgcgtcacccgccccctgcacgccgccgtccaccgccctccctggcgtgtcgtcgtgcgctcatatagagagagatggaagtgaagacctgagaggtggtgaagagagagggggtatgacagccgttggcgtcggatgccgcaaccactgctgccgcaatctccggtccaccccgtaccccgctgttgatgaaaaattcgcgcttggctga

SEQ ID NO: 99734 - DNA, 728 bp, Oryza sativa
  unsure (1)..(728): unsure at all n locations
  Clone ID: PAT_MRT4530_97517C.1
ccggccgggatcgcattgcatcgcccttatccggattggactctatcttgtcactaaataccagaaatcgacaaggccttcacgatgcctttcgctgttggtagtgccgttaccaagcaagacctcgccgtcgctcaggctgaggcgcctcagctcgccaaggtcaaatggtgggctgaccctggaatgcgcgtgctgtacttctacgccgcaattctttgtgtctgttcagctaccactggttacgatggttccatgttgaacacctcccaggccatggacgactggcaggattactttggtcaccccaagggctccaagctcggtatcctcaactcaatctaccagattggcagcatcgccagtttcccattcgctccctacatggctgatcactttggccgaaagcttcccattngctgtgggatgtctcatcatgattcttggcgctttcctttccgctttcaccaacggttacggcatggtaccttggcggtcgattcctcgtcggtttcggaaactctctggctcagctgtcttgccctgtcctcctcaccgagatctgccatcctcagcaccgtgccattgtttcagccatctacaactgtttgtggaacttgggagccacactctgcgctttcatcggtctcggtacgatcaacatcagcagcaactggtcatggcgaagcatcaccttgatccaggctgtcccctccttatccaatcac

SEQ ID NO: 99735 - DNA, 909 bp, Oryza sativa
  Clone ID: PAT_MRT4530_97518C.1
atggattggggatttgagatctggaatggcacggacactggacaacaaacaaagaaacaattttcgcatttaggatttttaagagatagttttcccactaggcgccacgacgggacggacgctacaggaatgcaagttgaagaacctgaaaaatgcatgcagtacggaacaatcgaaatgctggctgctttatttccaggaattgagacttgtggagtcggaaagcagatagcaaccccggacgtgcacccaaccaacctacacttaccagccgcattggatgccgttgctccccacacacaccgaaccaacggtgactccttcaggagaactgttgatggtcctatgaggtcaacgttgacttttgataataatcattctgtagtgccaagtcaaaacattgattacggccagccaatggcttgcatttcatacccatacaacgattctggttcaggagtttgggcatcctacagttcacgctcggtgccttaccttcacgaatctcggcatcgccatgcaatgaagagggctaggggcactggtgggcgattcctgaataccaagcagctccagctgcagcaacagtctcacactacctccaccaagaccaccacagacagccaaaattcttcaggttcagtccatctacggctaggtggtggcgcaatcggagatcaaactccatttccgttcaaagcaatggattcacaagctaacatcaagagagctgcagcttctgcttccaccttcactgtaacttctgcggcacagaaagacgacgccttcttcgaccgccatggccaccatctcagtagcttctccggccattttggccaggcaagcgcacaaggtggcgtcggcagcatgcataacgggtcacagcagagggttcctgctatgagatga

SEQ ID NO: 99736 - DNA, 1410 bp, Oryza sativa
  Clone ID: PAT_MRT4530_97519C.1
cgtccaatggccgccgccgccgtccacgagccgcttctcgcggcggcgccgccaacgcccggcaaggccgccgacggcgacggtccggaggaggggcgccggctcgcctccgcggaggcgaagcggctgctgcggctggccgggccgatcgtggccagctgcatcctgcagtgcgtggtgaacatggtgtccgtcatgttcgtcggccacctcggtgagctccccctcgccggcgcctccctcgccacctccctcgccaacgtcaccggctacagcctcctcacgggcatggcgacggcgatggacacgctgtgcgggcaggcgtacggggcgaggcagtaccacctgctgggcgtgtacaagcagcgcgccatggtggtgctcgcggcggcgtgcgtccccatcgcgctggtctgggcgtccgcggggcggatcctgctgctcctcggccaggacgcgggcatcgccgccgaggccggcgcgtacgcgcggtggatgctcccgtcgctcgccgcctacgtgccgctccagtgccacatccggttcctgcagacgcagaccgtcgtgctccccgtcacggcgagctccgccgccaccgcgctcctccacccgctcgtgtgctggctgctcgtgttcagggccggcatggggagcaagggagccgcgctcgccaacgccatctcctacgccgtcaacctcgccatactcgccgtctacgtcagggcgtccaacacctgcaagggcaggtggagcggcttctccggcgaggccttcaaggagctccgccagttcgccgcgctcgccatgccctccgccatgatgatctgcttggagtggtggtcatttgaaatccttgtgctgctctctggacttctgcctaatcctcagcttgagacatcagtgctgtcaatatgcacgcgtgtttcgaacgaaattggagccgggcagcctcaagcagcgaagcgagcaacgcgagtggtgatgtatatggctttgtccgaaggattggtgataagctttaccatgttcttgcttcgcaatgtctgggggtacatgtacagcaacgagcaggaagttgtgacatacattgctaggatgctgccgattctcgacatatctttcttcatagatgggcttcacagttctctgtcaggcgtgctcacgggttgtggcaagcagaaaattggtgcagccgtgaacctcggggcattctaccttgtaggcattccggtggctgttctgcttgcattctacctccatctgaatggaatgggcctgtggcttggcatcgtctgcggcagcatcatcaaactactggtgcttataattgtctcgtgttgcatagactgggaaaaggaggcgatcttggcaaaggacagggtcttcagctcatctcttccagtagcatga

SEQ ID NO: 99737 - DNA, 6052 bp, Oryza sativa
  Clone ID: PAT_MRT4530_9751C.1
ttgacggcggccgacctcccacgccggtttccttcctccctggccgctctctcccccttccaaccctatttaaaccctccccgcacctcctccgtccggttccacctctcgccgcccttcctcctcgccggattcgagctcgcgacgtcgctctctctccgccgtcgccgccgagctccggtccaccaccgtcgtcgccccggaccgcctcccacctcggcgccgcctccttcggcttcaccgcatcctcgccgacctcgttcacctctctgtttcggtcgccgatagccggagcgccgccgtccccgtcgacccgagccgcgccaccgcctacctccgctccggccgcctcctccgtcgccgccgtcgccccggggtgagccgtggaccgtcgcctcctttccccttccctcccctctctcggccgccgctccgcagcatctatggccgcagccggcgaccatcggggcgcgggcgcgccgcctcccgccgaccgcgccggcgtggccgccctcgggcgcgccgagtggctgccgcgtggagcccggccatcagccgcccgcgccctcaggtgcggctgacgtgtggggcccacggcgccggccggtgcgagcccgggtgcgcccggtccaccgtggacccacctcggccatataaggatcagtcttcgggcctctgttgcaaagcactaccgtacttccacatgtctagtgggacaaatgacggctacacgagctgcggcccggtagtcgagatgtcatggcacagggctggtgtcctgctgctaggggctcagtcctgcctacctgtccggggggttccggccgtaggtggggttgggtcgatgtacacctctgatcagagtataatctgttcgaatagccgcgccctcggttatgggcaagccgagcaatgtacccaaatggccggcagcatcaaccatcgtggcttggacctgactggcttcgttttggagctgcggggcatgtgcgttgtcctggggtatccgcatggagtggactaccagggcaagcagctctcgaagcaggagggtgacgatgcagagccccacgctgcttgggaggtcactgcagtgatcctcactggctcacccgagaggacttcgttggcagtcaccgcgggtggagattccttctccgccgcttgccagaacgccgcactcctcaccatcggcactcttcaccagcgctacccggatgagttgcagcactcgccctaccgctaccaccctcgtcgcggaggagcccgcgactacgccaccttcagggatgctagctcggaggatgacgctaccatcatgcacctagcgcgcatcgtggaggcgtacgatgtggctcgtatcgacttccatcagatggtgcgccgtgggttggtcgagaacaacatgaagatcctggagctacgtcaggagaatctgcagctgaagaaggacctagacgcaggggaggcgcagctgtgtcagctcaagatcgcctagggagaggtctgtcgccccaagcgctgccgcgtctgccgcagcctgaagatcaccgcccgcaagagtacctccaggcccgagcttgttcgtcagtccttggcatggacctgcttcgtcgagacccctcgtgacgagcccgcgcccttggtttctcaggatgagggagcctctggcgttggtagcacggaggatgcactgctgctcaccttccatggtgacaaccaggagaagtgctgctaccggtgaaggcagtcaccccgaaggcagcaactacaacaaccatggcagcccacctccacctcctcacccgcctccaccaccaccaccagacaccaactctatcctcacccaaatcctcgcccagcaggccaacatgatggctgctttcctccatcacatccaaaatccgccacagcataatgctccacctccaccaccacccccgcaacattctaaacttgccgagttcctccgcatccgtccgcctaccttctctagctccaataaccccgtggatgctttggattggttgcatgccgtggggaaaaagttagacaccgtgcagtgcaacgatgaggagaaagtcatctttgccgctcaccaactgcaggggcccgcatctctatggtgggaccacttctaggctacgcagccagaaggacagcctattacttgggcccgcttcaccgccgctttccggaggacccatgtgcccgccggagtcatgacccttaagaaaagggaattccgagagttgaagcaaggcaactgctctgtgatggagtatttgcatgagtttaacaacctggcccggtacgccccggaggatgttcgtgaagatgaggagaagcaggagaagttcttggcaggaatggaccctgagctgtccgtgcatatggtctccggggattatccggatttccagcgtttggcggacaagagcatccgcttggaagccaagcacaaggaactggagtcacacaagcgtcgcttggcaaatttccgcaatcaacagggggctaaccaaaggatccgctacaccaatccctatccagggggatcctcctcgtagcagcagcagcagcaaccacgctccgcgctccgacctcaattcgtggtgcgcgtcccacagccgcagcaacagcagagccagcaagggacccgtgcgccccgtcctcctacgccagccgtgcagcctggacaaggccgcagagacgttcatggtcagcagcgtctgtgcttcaactacttcgagcccgggcactttgcggataaatgcccaaagccgaggcgccagcaaggccaagcgcctccccgccccaacaacggtggtaaggatgtcattcggggtcgtgtgaaccacgtgactgccgaggatatgctgacaactccaggcgttatcgtgggtacgttcctcattcattccatccctgctaccattttgttcgactctggagcttcccactcgtttatatctgtgccattcgtggggagaaatcagttgggggtagaaaggcttaggaaccctctgctcatcaccacccctggaggggttatgacagcaaagtattatagccctgccgttcctatagaaatccagggaatcctttttccctcagatttgattcttctggacaccaagaacttggatgtgatccttgggatgaaatggttggctcaattccaaggagtagtggattgcgcaagacgcactgtcactctgtaccgagggccggaacaaccggttgttttctttgcgcccccaacctctgccagtagttcagaacttcatcagataggactgtcagaaatccccatcgtcagagagttcggagacgtgtttccggaagaactactcggtatgccgcccaagcgagagattgagttccggatagatcttgctccaggaaccactcctctgtacaagcgaccctaccgtatggcagcaaatgaactggccgaagtcaagaaatagttggaagagttaaaagaaaaggggtatatacggccgagcacttccccctagagtgctcccgtgatttttgtggagaagaaagacaagacaaagcggatgtgcgttgactacagagctctcaatgaagttactatcaaaaacaagtaccctcttccccggatcgatgatctcttcgatcagcttaaaggtgccactgtcttttctaaaattgatcttcgttccggatatcaccaattgcgtatccgtgaagaagatattccgaagaccgcattcacctcgcgttatggactgtatgaattcacggtgatgtcgttcggtctgaccaatgctcctgccttcttcatgaacttaatggacaaagtgttcatggaaaacttggataagtttgtggtggtctttattgacgacatcctgatgtactcacaatcagaggaagaccatcagcagcatctccgtctggtgttgggaaagttgcgggaacatcaattgtatgccaagcttagcaagtgtgagttctggttgtccgaagtcaaattcttagggcacgtgatatccgctaaaggagttgctgtggaccccgaaacggtgaccgccgtcactaattggaagcaacccaagacagttactcaggttcgcagctttttgagtatggcaggatactaccgaagattcatcgagaatttctccaaaattgccagacccgtgacgcagttgctgaagaaggaagaaaaatttgtgtggagcccgcaatgcgagaaagcattccaaactctcaaagaaaagctggtttcctcgccagtgttaatcttaccggatactcgtaaggacttcctggtgtactgtgacgcttcgcgccgaggattggggtgcgtattaatgcaggaaggtcatgtggtagcctatgcctcacgccagctacggccccatgaaggcaactaccctacccatgatttggagttatccgctgtggttcatgctctaaagatctggcggcactatctcattgtgaatcgctgtgaaatatatattgatcataagagtttgaaatacatcctcactcagtcggatctgaatcttcggtagagaagatggttagaactcatcaaggattatgatgtgggaatccactatcatcctagtaaggccaacgtggtcgccgacgctctaagtcgaaaaagccattgcaacactcttggcgtccgtggcattccaccgaaacttaatcaacagatggaagccctgaacctaagcatagttggtcgtggattcttggctacactggaagccaagcctaccttgctcgatcaaatccacgaggctcagaagaatgatccggatatgcgtggactcctcaagaatatgaaacaaggtaaagccactggtttcacagaggatgaacatggaacccaatggaacggaaatcggcatgtcaaggcagagcaccaacgaccggccggacttctccaacctctccaagtaccagaatggaaatgggatgaaattgggatggatttcatcaccggacttccaaaaacccaaggcggatatgattctatgtgggtagtcgtggaccgactaaccaaggtagctcggtttattcctatgaagaccacctatggaggaaacaaattagctgaactctacttcgctaggatcgtgagtctccatggcgttcccaagaaaattgtatctgatcagggaagccagttcacctctcatttctggaagaaactccaagaagagttgggtacccgattaaatttcagcaccgcgtatcacccgcagacagatggacagaccgagcgtctgaaccagatcctcgaagatatgcttcacgcatgtgtcctagattttgggaagacctggggtaagagtctcccttatgccgagttctcctacaataacagctaccaagccagcatacaaatggcaccctatgaagcgcgttgtatggccgcaaatgccggacaccgctattgtgggaccaagttggggaaagccaagtgttcgggaccgatatactgagagaagctgaagctaaagtcagaaccattcgggataatctaaaggtggcacagtctcggcagaagagttatgcagacaaccgacgtcgtaacctggaattcgcagtggatgattttgtgtaccttcgggtcacgccattgcgaggcgtacacaggtttcagataaaagggaagctcgcaactcggttcgtgggtcctttccgtatcattgctcgacgcggagaagtcgcttaccagttggagctgcccgcatccttgggcaacgtgcaagatgtgttccatgtgtcgcaactcaagaaatgccttcgagtgccatccgagcaggccgattcagagtaaattgaagttcgcgaagacttgacctacgtggagaggctagtgaaaatcctggacaccatggagcgcaggaccaggaaccgggtaatccgtttttgcaaggtccaatggagcaaccacgctgaggaagaagctacttgggagcgtgaagacgagctgaaggcagtccatcccgatctcttcgccggttcttctgaatctcggggttgagattccgtt

SEQ ID NO: 99738 - DNA, 3775 bp, Oryza sativa
  Clone ID: PAT_MRT4530_97520C.1
atgcacccctccaaaaccaccgccaccgtcgtcgccaatgtcgccgccgcggccctccccctccccctcccccgtgccgccacgccgctcgacgcccgcatggtcaagacgggcttcgacgtcctcacctaccggctcaacctcggcctccgctccctcctctcctccggccaccttcaccgcgcccgcgccatgttcgaccaaatgccccacaagaacatcttctccctcaacctcatcctctccgcctactccagctctggcgacctccccgctgcacaacacctcttcctctcctcccctcatcgcaacgccaccacctggacaatcatgatgagggcgcacgccgctgctggtcgaacctccgatgccttgtcgctcttccgcgctatgctcggggagggtgtcattccagaccgcgtcaccgtcaccaccgtgcttaacctgcctggatgcactgtcccgtcgctccatcccttcgccatcaagttcggcctcgacacccatgttttcgtctgcaacacgctgctagacgcctactgtaagcacggcctccttgctgctgcccggagagtctttctggagatgcacgataaggacgcagtcacatacaacgccatgatgatgggctgctccaaggagggactgcacacccaggcgctccaactatttgctgctatgcgccgcgctggtattcccgccacccacttcaccttctccagtattctcacagtcgcagcaggtatggctcatctcctccttgggcatcaggttcacgctctcgtgctcagatccacctcagtgctcaacgtgtttgtcaacaactcattgctcgatttctactccaaatgcgattgccttgatgacatgaggagactgtttgatgagatgccagagcgggacaatgtctcctataatgtgattattgcagcctatgcttggaaccagtgcgctgccacggtgctgcggctgttcagggagatgcagaagctgggtttcgacaggcaggtgttgccttatgctactatgctaagcgtagctgggtctctgcctgacgtgcacatcgggaagcaaatacatgctcagctggtccttctgggccttgcttctgaggatcttttgggcaatgcgctgattgacatgtactcaaaatgcggcatgctcgatgctgcaaagagtaacttttctaacagaagtgaaaaatctgccatttcatggactgctttgatcactgggtatgtgcagaatggacagcatgaagaagctctgcaattgttctctgacatgagaagagctggtctaaggcctgacagggcaacgttttcaagcatcatcaaggcttcctcaagcctcgcaatgattgggctaggaaggcaattgcactcgtacctcattaggtcaggctataagtccagtgtattctccgggagtgtccttgttgacatgtacgctaagtgtggctgtttggacgaggcacttcggacatttgatgagatgcctgagaggaattccatctcgtggaatgctgttatttcagcctacgctcactatggagaggcaaagaatgccatcaagatgtttgaaggcatgcttcattgtggttttaatccagattcagtcaccttcttgagtgttctagcagcatgcagtcacaatggtcttgcagatgaatgcatgaagtactttcacttgatgaaacaccaatatagtatatcaccctggaaggaacactatgcttgtgttatagatacattgggtcgggtaggctgtttttctcaagttcagaaaatgttggttgagatgccattcaaggctgatccaataatatggacctccattcttcactcgtgtcgaattcatggaaaccaggaattagctagagtggcagctgataaactgttcggtatggaacccacagatgcaacaccctatgttatattgtccaacatatatgccagagctggtcagtgggaagatgctgcatgcgtgaagaagattatgagagacagaggggttaggaaagagtcgggttacagttgggttgaaatcaagcaaaagatatacagctttgcttcaaatgatctaaccagcccaatgatagatgagattaaagacgagctagacagattatacaaagagatggataaacaaggctataagcccgacataacctgtgccttgcatatggtggatcatgagttaaagctggagtcgttaaaataccacagtgagagattggccattgcatttgctctgatgaacaccccagctgggacacctatcaggattatgaagaatctgactgcgtgcctagattgccatgctgtcatcaagatgatatcaaagattgtgaacagagatatcatcgtaagagactcacgcaggttccaccatttcaaggatggggtttgctcctgtggagactactggcatcaatgcgatgtgaaatcgggggactccaaggggagtgcgtgtggttggtgtgagagaatgaaatggatgagcgctggggagcgtagcatgcaggtgcagatgcagatgcagcaggctaccaccgttctcagcagcagcagcaaccggccttggacgctgtggtgccatcctgtcccagtagtctcctccccatcccacgccaaaaataagaagcatggcctccgactccgagcaggcatggccatggcctcctccgagcttcctgacctgagcgcaatacaacgcgtggtgctggacatcgagggcaccacgacgcccatctccttcgtggcggacgtgctcttcccctacgcgcgcgacaatgtccgccgccacctggccgccacttacggcagcagcgaggagacgcgcgctgacgtggccctgctgcgggcgcaggtggaggaggacctcgcgcagggcgtcgacggtgccgtggcggttccgccggatgcggaaggggaaggggaaggcgccgtggtggaggccctggcggcgaacgtggagagcatgattcgcgcggacaggaaggtgacggcgctgaagcagctgcaggggcgcatctggcggcggggcttcgacagcggcgagctgcggagcgaggtgtacgacgacgcggcggacgcgctgcggcggtggcgtgccaaggcctacatctactccagcggaagcagggaggcccagcgcctcatcttcgccaacaccgctgcacacggcgatctccgcgaccacctctgcggattcttcgacaccacaataggggccaagcgcgaggttagcagctactacgagatctggcagactctgggcacggaccgcccctcccagatcctcttcttgacagacgtctaccaagaagccgctgcagcaaagactgcaggccttgaggtgataatatctgtcaggcctggaaacgcacccctccctgataatcatggttttcacacaatcacatcattcgctgaaatctccatctgaacctagccagaaatgtcttgtactatacaatctgatccgaacaatattctaccgtacgctagcagcacagttagcaaatggtttggttaggtttaaggcaagacaatctggggtgtaaataaatgtgtaatagtcccaatcaagctaatactatcatgctcccattccatccaaacctggaacaacaatttcagatgcatatactactactttacatttgttccttttcctgcaaaaaaaaaaaaaatgtcttactgaatccagtaaaattagcacatgtatcctccttgtctgatctgatgacgaatcattaattccctcccat

SEQ ID NO: 99739 - DNA, 1960 bp, Oryza sativa
  Clone ID: PAT_MRT4530_97521C.1
ttttttttttttttttttttttttttttagacaagttggtctatcctttcaccggaatcccgcgtattatgcatcaggcttcacaacattttctgatacaaatagacaatcatctgataactttcgaaagcaaaaggtaatcagatgaacaggctgacaagggacaacttttgagttattatgcatgaatttcctaattaacaaggattctccaactagccaagttcagagctggatgagattacagatacacaagcgttttattccctactcttgtgttgatatttcaaacaatagtggcagttgcacaatttttatgacatatatatatagttctagttacatggcgtccttcgaaagccggttatgggtcgggatgcaccgagcattagtgagctcatccactgcatccccacgctcaaagacagcagcagcccccatgccagaacctatgcacatggaaatcacaccaaatcgacagtctttgccccgtcgcttcatttcgttgagaagggtactgacagaccgtgcacctgtagcacccaatggatgcccaagagccattgcacctccgttaacgttaacttttgcaggatcaagtcccaacttcttgcagcagtatacgtactgtgatgcaaaggcctcattaatctcgaaaaggtcaacatcatctatttgaagaccagcagctttcactgccgcagggatggcaacagcaggaccaacacccattatagctggatcaactccaactgctgcaaagctcctgaagacgccaactattggaagacccttttgcatagcaatgtcacgtctcattagtaagactgctccagcaccatcgcttacttggctagcgtttccagcagtagtggtgccatctttagagaatgctggtttgagttttgacaggactgccaatgaagtgcctggtcggattccatcatctgccgagaccactatctccttttcctcaccagtttttggatccacaatcttcgtgtgaactggaacaatttcttccttgaatttaccagaagcagctgcagccgcagccttcctgtgggactcaacagcagcctggtcttgctccattcgtgttatgccaaatcgttttgcaacattctcggacgtgaggcccattgggagaaggcaatcgcgtgcttgagaaaacagctcaactttggggttcacttgcccatcaaggcgaacttggttcactgtcatggactctaggccagcagcaataccaatgtcataaagtcctgctttaatgttagaagcaacatttgcaactgcttgaagcccagacgaacattgcctgtttacagtcataagaggaacggtatcagggaatccagcataaaatgcagccattctgcattcaattgccctttgggacccaggagctaaaacagtaccaacaacaatatcaccaacttcacttgggttcaacttcgttttatctatcaaagccttgaatactggaaccaagaggtcctctgcgggagtatccttgaaaccacctctcttggacttgcaaattgctgtcctataggcagcgacgatgacgacgtcgtctgcgaagcacgccccgcggtggtacgcggcgctgtcccccgcggcgcacgcgctcgcggtgatggccggcgcggcggcggcgggactcgcggcgggctccaggtgggcgagaagcaccctctgcctgttgatcgccttctccatggctccctcctctccttccttccttcctcgctttctcccggcaaagctgttcggcgaatcacaaaccaggcgggatgcgggatgcggatgcgggaatatttctagggagaggaaggaagggagttaggtggtgggtggccgtgtactgcgaggttttttccgtggagttgtgggggaagaaggagcccacttgagttggagttgggagctaaaaaggcgcgtgacgtcgtgggtc

SEQ ID NO: 99740 - DNA, 459 bp, Oryza sativa
  Clone ID: PAT_MRT4530_97522C.1
atgctggcatcgaacacctcgatcatccactcctcctgcaccacggtgcgcacccactgcggcatatcgacgtcgtcgatccttggcaccacgttcgtcggcggcttcccccgctactgtcgccgtggaggaggaaggagaggactccagcgccgacgaagtacgagacaagaagcttctcgttccctcgcctcctccgccgccgacccggtctcccccatcgccctcgactcgctcccttccccttcacccgccgttcccatccccacccccgctgccgccgccacccacctcgccgtcgtggcctacctcgccgtttccgcgcctgacttcgacgtcgcggtggggccctcttcgcgcgccccagcagccgcgcgcgccgcgcgatcgaggagggtggggccgcctcactcgcctccgacgaggccgatgccgtggcggaccagctcgaagccgtag

SEQ ID NO: 99741 - DNA, 522 bp, Oryza sativa
  Clone ID: PAT_MRT4530_97523C.1
gataaacattaaacaagctgtgtgaacttcttttttcgtgacaagtttaattctttctcgatcgatcgtcgtgatggctgacgagtacggccgcggcggctacggcaggtccggcgccggcgccggcgacgactacgagagcggcggctacaacaggtccagctccggcggcgccgacgagtacggccgccggccgggaggcggtgccggtggctacaacaagcccggtggcaccgacgactacgacagcggctacaacaagtccgccggcggcgacgacgacgactacggccgcaccggcggcggcgggtacaacaagtccggcaccgacgacgactacgacagcggctacaacaacaggtcaggggctaacgagaagtacggtcgcaacaagtccggcgacgacgagtacagcggcggcggcggcgccgaagccgacgaggagtacgtcgacgggttgtcgtcccgggacgacccggagaagtacaaggtggaggagtaggagcacatgaacaggagcgc

SEQ ID NO: 99742 - DNA, 126 bp, Oryza sativa
  Clone ID: PAT_MRT4530_97524C.1
gtatatttgagagggaccaagcaaaacaacatggggagatgagtggattcgagccatcgagctaaatacaggcatgaaggacggggacgaagtcaggtaggcaccttgtgtacttgagatgtaaag

SEQ ID NO: 99743 - DNA, 525 bp, Oryza sativa
  Clone ID: PAT_MRT4530_97525C.1
gttaactcgataaacattaaacaagctgtgtgaacttcttttttcgtgacaagtttaattctttctcgatcgatcgtcgtgatggctgacgagagcggcggctacaacaggtccagctccggcggcgccgacgagtacggccgccggccgggaggcggtgccggtggctacaacaagcccggtggcaccgacgactacgacagcggctacaacaagtccgccggcggcgacgacgacgactacggccgcaccggcggcggcgggtacaacaagtccggcaccgacgacgactacgacagcggctacaacaacaggtcaggggctaacgagaagtacggccgcaacaagtccggcgacgacgagtacagcggcggcggcggcgccgaagccgacgaggagtacgtcgacgggttgtcgtcccgggacgacccggagaagtacaggaaggaggagaaggagcacaagaacaaggagcgcctcggcgaggtgggcgccctcgccgccggcgcctttgccatgtacgag

SEQ ID NO: 99744 - DNA, 289 bp, Oryza sativa
  unsure (1)..(289): unsure at all n locations
  Clone ID: PAT_MRT4530_97526C.1
cggtcgaccctgcgtccgaagagctctgtgccttcactcctagatatcaacagcagacctacctaggcttctcaaatgagtcggagaacgaagccccaaaatgatgtaccaatgaaataatataagggttttaaaaaaaaataaaatgccccaagtatgtgaaaccttgtggcgggtctgttcttagtttttggagggggggtgaattaaaaaaaaaaaaaaaaaggaaaaaaaaaaaaaatnaaaaagaaaaaaaagggnggncacaattaaagggcccccagtttaa

SEQ ID NO: 99745 - DNA, 1108 bp, Oryza sativa
  Clone ID: PAT_MRT4530_97527C.1
caaagaatagagaggaaacttagtagttggaaaggaaaacatatgtctgttggaggtagattggttttgattaattccgtcctttctagtttagctatgttcatgatatctttctttgagattccgaaaggggttcttcaaaagattgattattatagatcacgtttcttctggcaaggggatgatcataaaaagaaatacagattaactagatgggatataatttgtcaacccaaagatcagggtggtttgggtgttcataatttagagattcaaaataaatgcctgttaagtaagtggttatataagttaattaatgagaatggtgtgtggcaagatttattgaagaggaagtatcttcataataactctataacccaagtggataggaaacaaggtgattctcatttttggtcagggctcatgaaaataaaaaacacctttttaagtatgggctcttggattgtgaattatagtcaacatataagattttgggaggataaatgggtaggaaacatggccttcagagataagtatccttctttatatgctattgtcagaaggaagagtgctactattgccagtgttatggccttggttccgctaaatgtttcttttataagagctttagttggacagaacctaaccctttggtatgatttatgtgcttctattgctcatatccagttggatgattcttttgattgttttagatggaattatcatcagaatggctagttctctgttagattaatgtacttagctttaattaataatggttacattgacagaaataagtttatttggaagcttaagatgccacttaagattaagatcttcatgtggtacttgcttaagggtgtcgtgttaaccaaggataatttagcaagatgaaattggaatgggtgttgacgatgttgtttttacatgaaaaatgagtctattcaacatttatttatggattgtgaggaagatggaaaattactgtctgttgcatgtcgtaaccttgagtcaacggttatgcaactttttaccaaccatggatggagattcatcaatagaatggaataatgttttccttgtcatgttagaatttcttttatttttg

SEQ ID NO: 99746 - DNA, 443 bp, Oryza sativa
  Clone ID: PAT_MRT4530_97528C.1
gttaggtacgtggtgagcggcgacgggaaggggaagttcaggaccatcaccgaggccattaaggccgtgccggagtacaacaagaagagggtcatcctcgacatcaggcccggcacctacaagtaattaactaaatccttttcgatcaaattatcccatccgtcctaaaatatataacggtagtagctttttacataaagtttttgaccattcattttaatatagcttattttattctggcttgttttatcatcaaaatagctataatcttaacatgtacttttatatattcataataattattttaataagacgaatgaacaaatgttatatgaaaaagcaacggcgtcatacattttaagatgaaagcaatataatctgagcatgaaatcatggcggattatatatatatatatatatatatatatatatatatatatata

SEQ ID NO: 99747 - DNA, 213 bp, Oryza sativa
  Clone ID: PAT_MRT4530_97529C.1
atggaactactcgcggttgcgagcatcgacgaaggcgcgaagcacgcgagcggagagaaaggtgagccgtcgcggacgaacaaggagcagtcgcgcgaagcacttcccaaaaaccttattgtcgtcttctcccggtgcaggacgacgaaggcagaggtttcggagacctgctctcccgatcaccggtgcacgccggcgagcgggatggagtag

SEQ ID NO: 99748 - DNA, 1916 bp, Oryza sativa
  Clone ID: PAT_MRT4530_9752C.1
catggggtgcagttttcaccaccgccgccgccgcggatcccgccgcctcccgccgtccccgcgtgcaataaagtggggggaatcattccccgtgattccctctccctttccccccatttttccatctctctcttgcgttcaaacgggcggatttgcccccgcaaatctcgccggcgccattgatggcggctggacctcccgcgccgatttccttcccctccggccgctctctcccccttccaaccctatttaaaccctccccgcacctcctccgtccgtttccgcctctcgccgcccttcctcctcgccggattcaagctcgcgacgtcgctctctttctccgccgtcgccgccgagctccggtccgccgccgccgtcgccccgagccgcctcccacctcggcgccgcctccttcggcttcgccgcatcctcgccgacctcgtccacccctccgtttcggtcgccgaccgccggagcgccgccgtccccatcgacccgagccgcgccaccgcctccctccgctccggccgcctcctccgtcgccgtcgtcgccccgggggtgtgtaccgtcgcctcctttcccccttccctcccctctcttggccgccgctccgccgtgccggtggtcgccggcggcgaccatcggggcgcggacgcgctgcctcccgccgaccgcaccggcatggctgccctcgggcgcgccgagtggctcccgcgtggggcccggccgtcagccgcccgcgccctcgggatgtttaacagagaaaaaggaaagaatgtcagcgggtatgcctccagtaacttaagtttccaactcaatccaccactggcctcaagagagttaacaagggcacacccttggtccattccaagcatgctgcttagttcacagctaccattggttggaagtcaagaccaaaatcggtatgtgtttgatcgagcatttgccacccaggtcaatgagcttccaatgccagaagaggatgtccccttttgtcacgattgtagagaacgaggacactatgccctgaattgtccatgggtatatgccaaagaagccccttcctttggtttagcagggcagacatcgctaaaccagcctcctcgcagcaagtcaagcttgcagcctagtgtgcaaagtagagagcccaatggagagaatccattgaatcccgagaattgctttcctcctagcctttcgtaccacatggggtcacgtactaagcaagccaaaggcaagaagagtaagaatcagaagagaaaagcaccgatgcgaactgaagaagaagtacataagatgactattaccagcaccgaatggcctccagcagggataactattcctagacgtcaaagaggaaataccttccgaggtgcacgacagttgacccagcacctcgtaagccatggcggcagagtatctgatagtgaagggtcagatcaagtctcctcggattatgaagatgagtctctccgacatctcggcgaggaagagatggaatcaaaagcatgcccccgttgtggagaaattggacacgttgctagcatgtgtttcacactctgccctcattgtgaggaagaccatccaccaggtgaatgtcccacccgcaaggtcacatgttttctgtgcgaagttagtcagctccaacagcaacatcgacgatatcatccacagcaccaatgctcctcttgctgcacctgactctgcaataaatcatagcaataataccttcagcaccaaccattctctgcaccgacggcctcagcaaagaattgtcatcgatggaagaagttgtgtctctccccgacctactccaggccgagcgaagggcaatcaacctcaggaggatgatacgaagcagaagaccgttattcgcttcaaccagcaatcagaaggaagcttctcctgtgaatga

SEQ ID NO: 99749 - DNA, 363 bp, Oryza sativa
  Clone ID: PAT_MRT4530_97530C.1
gaaaaaaacaaacagacttagggggtttcctttttttagataaacacccaattttggttgtttcaggaccaggtgacggaattaaaaccctagaacctgggagcaaaaaaggcctttcaatttcggtgggaatccatggataaaacaccttttccggggaagaaatgaacttgggaatttaattaaggccagtttttttgtgccacccagtatttcgctcaaaaactttgcccaaatacccatcccccggtgccaaagccatttaaaaggctgactcatcaagaaccccctgggggggagattttcctttttaaaaaacctaaggttggccctcataaataaccttttgttgataaacaaaat

SEQ ID NO: 99750 - DNA, 520 bp, Oryza sativa
  unsure (1)..(520): unsure at all n locations
  Clone ID: PAT_MRT4530_97531C.1
gggctgcaggncttcggcacgaggctgttactgtcatggttctaaatttcgttgttactccccntgactaagcttgantgtcccnttcttgcgtttcgganaaattatcncaggnagtgganacntccctttganttccnatgcattcnagaangntatcactggncaagccccnaangatnttangcnccacattgtncatnccaagcncnggtnggtgannnctgccccgntcccacttggtgcnccgttcatgggtttcnccccntgtttcnaacctatgggccaaanggttgggggggttccctccaattcnaagaaccccgaatcaatttantgttacccgtgaatttggaaaattgaatctgttccaatacaacncctcctgaaaccgttntatatccaattaataaatttgttcctgttccnccanaattgaanaattgggtnccctggcccaacattttttggctggggggccatccctgggaacgccctgttnttgaaacnaaaaatcctn

SEQ ID NO: 99751 - DNA, 954 bp, Oryza sativa
  Clone ID: PAT_MRT4530_97532C.1
agaagccactatgcgagcccgtctaccgcatcgtcggccgagtatgctgagcatctctccaacctagttgcaattcccaacctgtcgcatgaaaattactatttcctcggcgcagtcggcaaccctgatcctaccgagttcattatcagcaaaaccaataggattcctttcagattggccaacccaaatctaggtcactagaaaaataccttcaaatcttggccatctctcgataaaactccacccgagaaaagttggactacatggtataagcgcgtatcggctagcaagaaagttcactaggacgagattggaatcggccaagcgcttgcccttaccatagccaattcagctaaagatgaacctctgatggccgccgccacttatatttggtccaacactatcaatgcctttttgttcaaccaagggccgatgactccaaccctgatcgacatcaccatgatcactggattagatgtaacctcatcggctaaccctatgagtatgaacaccaagaaccaatttgatttcaagaccaaaagcatagggggttagtctggctatatagcggcatatatgggcaaaggccctgtcactcctcgggagcatgtagctttcttgctaatgtggctagagaagttcctcttctgtggatccagttgtggtcctacaaccaattggtaatttgtagccgaagccctagaatcgaaaaagcaatttcctctaggcaaaatccttctcggctatctataccaaatgttgaataatgcatcagctaagatagctatcagatcagtagttggagcaggtggaccatggtggctattgcagacttcgttaaatctgatggtcatgaaagttgtcaatcggccatctttgacagaagccgaattcccaagactggagccgattgtagaagatgatggagaagagcgcactcatcgcagatggggg

SEQ ID NO: 99752 - DNA, 541 bp, Oryza sativa
  unsure (1)..(541): unsure at all n locations
  Clone ID: PAT_MRT4530_97533C.1
cggacgcgtgggcggacgcgtgggctatctcctctccctcttcgcccatatctcctctgcacctgcgatccatccgcgcccgctaggaggagggagccggacgccgccgcgacgagagcaggggagagaaggagaggaggagatcgccgtcgccgacaccggctccgctgtcgatctcgagcgggagctgagatggggctcacgttcacgaagctgttcagccgactatggggcaagagggagatgaggatcctcatggtgggtctcgaggcgagcgggaaaaccaccatcctctacaagctcctgcttggcgagatcgtgaccactatgcccaccatcggttntaatgtcgaaactgctgagtacaataacattaacttgaccgttggggatgctggcggtcacgacaagagcaggcccctgcggaggcactattttcagaacacccccacgcctcatatatgttgtggacagcaatgacagatagcgtgttggtgatggcagggatgagctccaccgtatgctgaatgaggatgagcta

SEQ ID NO: 99753 - DNA, 1416 bp, Oryza sativa
  Clone ID: PAT_MRT4530_97534C.1
atgtcatcttccgccagcccgtctgccactccgtcggccgagtatgctgagcatgtctccaacctagttgcaattcccagcctgtcgcatgaaaattactacttcctcggcccaatcggcaaccctgatcctaccgagttcattatcggtgaaaccagtaggattcctttcagattagccaacccagatctaggtcactggaaaaataccttcaaatcttggccatctcttgagaaaactccgcccaagaaaagctggactacatggctcagctcgagttcatgtcaagctcaagcctacatagccaaactcgctcgagctcagctcgttgacagccctactagcaagaaagttcactgggacgagattggaatcggccaagcgcttgcccttaccatagccaattcatctaaagatgaacctctgatggccgctgccacttatttttggtccaacaccatcaatgcctttttgttcaaccaagggctgatgactccaactctgattgacatcactatgatcaccggattagatgtaacctcatcggctaaccctatgagcatgaacaccaagaatcaatttgatttcaagaccaaaagtataggaggttggtctggctatgtagcggcatacatgggcaaagggcctgttactcctcgggaacatacgacaaaattctctcctcctcatcagagcaatagtggcagggatattgaatatgccccgggactaattccaaatggaggtggaccatctccgcctgtcatcggttataatgcccccaagacttcaactcttctccaagggctcatcagagaaccagccgatgccggtaaaaagagaagattcagatcatcggctatggatacatcggcccctgatccaaagaagaaagccaagctaaagaagcccaaaccattcgatgatctgcctgccctagatccatccattgaacaagctctggatgaagaagaaatcggcgaggatgttaatcaagccgcagatgaaaagaagaaaactgttgtaaagaagaagtcggcatcaacgattctcaaatcggctccgccacctcctcctcctccttcttctgctgtgcaacaatcatcaagtggccaaactccatcggctgtagaaagccatcatgttgaagaagaagaacaaccagctgctcctgctatcccaaaaacccttgaagacatctctcatcagctagaggcatcatcactagacaacttggtggtaaacagtgggccgattaggactcggttacacgagatccaagctctaatcctagacgagctagctgacgtccttactccagctatctatcttgagcaacatcaattcaagctggaaaaagccaaactaagactagccgaacgtcgagagcgcaaggatattgaagccacaatctaa

SEQ ID NO: 99754 - DNA, 642 bp, Oryza sativa
  Clone ID: PAT_MRT4530_97535C.1
atggaagcactaatcccgagaacgcaagctgctataacaagtttacctcttgttgaagatcgaaatcgatgcagctcaacccgaaagcaagaacttgtcgaaacaaaacgaaagcaacaattcttaaaccggctccaccagactcggctacatgaggttcaagctctgatcccagatgagctagccgatatccttactccggccgtatatctcgagcaacatcaattcaagctagagaaagccaagctgagactagctgaacgtcgggagcgcaaagatatcgaggctacaattcaagccaatcgacagcttgttcatgaagagaaggccaaacttgatcagctatctgagggcccgatcaaatctaatattgatcggctcgaaactcgtaagactgagctcttggcacaacttgaagaatgcaacgccgagctggacatggaacataaaaagctagccgatctcccaaattctgttgaagagcagaaggcaagactaaaatcggctatcaaaaatgttgctgatctgaccaagtttttaaaagtcatccctgtaaccgatgctcaaggtgcccatgccattgaagaagtagaaaaaatcaggcaaagagctatttcagctttccagcaatatttgtcttag

SEQ ID NO: 99755 - DNA, 588 bp, Oryza sativa
  Clone ID: PAT_MRT4530_97536C.1
tgggagacgccgccgccggcttctgttggcgctgccctcgccgccgacagccacagtcgccgctgccactgggggccaaaatcggcgccgccgccattgaaatcgattcgatttccctcctcctttcctcctctcgtgtattttccgtccaccgtaaaccctatctcttccaaaaaatccccaaatcggcgccggctcatcggtctacgggaggtcgccgggtgctaggtctaccggagggcgccgacggctgggtctacgggagggcgaggcctgctggggaccttgcctgccgcatcggcaggggcaaccggccggcggtaggtggcagcggcagggcagcatgccgcagcagcagcagggcatggctgtcgcggggcagaccctcttgttgcatgctatggctttggctctggctctagctatgtcacagcgtgaacaggccctataccgaagttgccgatggaagaaagcaatgtcatagctgcagcacaacaggggtactttttttttgagaatttcagaacattccaaatagaaaggtttaaatttattattgaatttgcagttgtgtaattgtttgtggag

SEQ ID NO: 99756 - DNA, 1629 bp, Oryza sativa
  Clone ID: PAT_MRT4530_97537C.1
tcactgagacaaatattgctggatagctgaaatagccctttgcctgatttgttctacttcttcaatggcttttggatcttgagcgttggttctggggatgacttttaaagacttggtaagatcagcaacattcttgatagccgattttagtcttgccttatgttcttcgatagattttgggagatcggctagctttttatgttccatatccagctcggcgttgcattcttcaagttgtgccaagagctcaatcttacgagcttcgagccgatcaatattagatttaatcgggccctcaaatagctgatcatgtttggccttctctttatgaacaagctgtcgatttgcctggattgtggcctcgatatccttgcgcccctgacgttcagctaatctttgcttggctttctccagcttgaattgatgctgctcaagatagacggctggagtaaggacatcggctagctcatctgggatcagagcttgaacctcatgtagccgagttctaattgagccacaatcaaccactaagctgtctaacgatgttgcctctagccgatgagagatatcttcaagaattttcttcacatcatcggataagggggctaaagctttgcttgtggtatcctcttctgtctcgtcaagatagtcccttatgtcaaaagagaaaagattggctaagactgggatagcagaagcagttggttgttcttcttcttcaatatgatggctcttagcatcggctggttctctgatgagcccttgaagaagagttgaagtctcgggggcattatagccgatgacaggaggagatggaccacctccatttggaataaggcctagagcatactctatgtccctgccactattgctctggtgaggaaggaagaactcccttatttggatgtttttcccctgatggatgccgacagaaagcatgcatgggctgattgcagctgagaaaacttccctggacttttggtatctttcatgattgatatcttcaaatctaaagtccgatgggagctcaaggtttgctgaatcttcataaggaaaccaaactcgaacatctttttgaaagccatcatagaaactgcagaaccagtccttgagcagttcagccgataattttgctccggcatcggttggtgtggatgcatattctccatatgacatgcatctgcgatgagtgcgctcttctccatcatcttctacaatcggctccagtcttgggaattcggcttctgtcaaagatggccgattgacaactttcatgaccatcagatttaacgaagtctgcaatagccaccatggtccacctgctccaactactgatctgatagctatcttagctgatgcattattcaacatttggtatagatagccgagaaggattttgcctagaggaaattgctttttcgattctagggcttcggctagatttgggttggccaatctgaaaggaatcctattggttttgctgataatgaactcggtaggatcagggttgccgactgcgccgaggaaatagtaattttcatgcgacaggttgggaattgcaactaggttggagagatgctcagcatactcggccgacgatgcggtagacgggccggcagaggatgacat

SEQ ID NO: 99757 - DNA, 828 bp, Oryza sativa
  Clone ID: PAT_MRT4530_97538C.1
atgcagctcaacccgaaagcaagaacttgtcgaaacaaaacgaaagcaacaattcttaaaccggctccaccacctcctcctcctccttcttctcctgtacgaccatcatcgagtgaccatactccgtcggctgtagggagccatcatgttgaagaagaagaacaactagctgctcctaccattccagtcctagccgatcttttctgctttgacattagagactatcttgatgagacagaagaggataccacaagcaaagctttagcccccttatccgatgatgcatcatcgttagacagcttagtggttgattgtggctcaattaggactcggctacatgaggttcaagctctgatcccagatgagctagccgatatccttactccggccgtatatctcgagcaacatcaattcaagctagagaaagccaagctgagactagctgaacgtcgggagcgcaaagatatcgaggctacaattcaagccaatcgacagcttgttcatgaagagaaggccaaacttgatcagctatctgagggcccgatcaaatctaatattgatcggctcgaaactcgtaagactgagctcttggcacaacttgaagaatgcaacgccgagctggacatggaacataaaaagctagccgatctcccaaattctgttgaagagcagaaggcaagactaaaatcggctatcaaaaatgttgctgatctgaccaagtttttaaaagtcatccctgtaaccgatgctcaaggtgcccatgccattgaagaagtagaaaaaatcaggcaaagagctatttcagctttccagcaatatttgtcttag

SEQ ID NO: 99758 - DNA, 1020 bp, Oryza sativa
  Clone ID: PAT_MRT4530_97539C.1
atgtcgtcctccgccagcccgtctgccgcgccgtcggccgagtacgctgagcatctctccaacctagttgcaattcccagcctgtcgcacgaaaattactacttccttggcccagtcggcaaccctgaccctaccgagttcatcattggcgaaaccaataggattcccttcagattggccaacccagatctagctaaagatgaacctctgatggccgccgccacttatttttggtccaacatcatcaatgcctttttgttcaaccaagggccgatgactccaacactgattgacatcaccatgatcattggattagatgtaacctcattggctaaccctatgagcatgaacaccaagaatcaatttgatttcaagaccaaaagcataggagatgttatccctcagaccacagagttctcccctcctcaccagaccaatagtggcagggacatagagtatgcaccaggccttattccaaatgaggtgggccatctcctcctgtcatcggctatcatgccccccagacttcaactcttctccaagggctcatcagagaaccagccgatgccagtaaaaagagaagaaccagggagccatcatgttgaggaagaagaacaaccaactgctcctgctatcccagtcttagctaatcttttctcttttgacattagagattatcttgatgagacagaagaagataccacaagcaaagctttagcccccttatccgatgatgtgaggaaaattctcaaagatatctctcatcggctagaggcatcatcgttagatagcttagtggttgattgcggatcaattaggactcggctacatgaggttcaagctctgatcccagatgaactagccgatgtccttactcctgccgtctatcttgagcagcatcaattcaagctggagaaagccaagctgagactagctgaatgttgggagcgcaaagatatcgaggccacaatccaagccaatcggcagcttgttcatgaagagaaggccaagcttgattag

SEQ ID NO: 99759 - DNA, 364 bp, Oryza sativa
  Clone ID: PAT_MRT4530_9753C.1
ccccaatcgctcgggcgcaatgcgcagcatcagcagcaaggccacacccacaacctcccctgcttttagcgtcctctgctctcctcctaggttagcagcggctttgccaacgagatagataggcaaaagagaaagtacttgcatagcccaacaaggcaacagctgctgctaccctctctttcttttctctgcttctccttgctctctcttctcttcctttctttctttctatctcctgcagtgccaagagtccaagacccaacaagggggaggacggaggaggcgaggcagaggcatctcaccgaagggggaagggcgacgccatgtgggacctcaatgactcgccggcggccgaggccgcgcc

SEQ ID NO: 99760 - DNA, 1296 bp, Oryza sativa
  Clone ID: PAT_MRT4530_97540C.1
atgtcgtcctccgccagcccttctgccgcaccgtcggtcgagtacgatgaggtcactggaagaacacctttaaatcttggccatctattgagaaaaccccacccaagaggagctggattacatggtacaagcgcgtgtcggccagcaaaaaagttcactgggacgatagccaattcagccaaagatgaactcatgatgtccgccgccacctatttctggtccaagaccatcaatgcctttttgttcaaccaagggccgatgactccaactctaattgacatcaccatgatcactggattagatgtaacctcatcgactaaccctatgagcatgaacaccaaaaatcaatttgatttcaagaccaaaagcataggcggttggtctggctatgtggcagcatatatgggtcaaggatcggttactcctcgagaacatgtggcctttttgctcatgtggctagaaaagttccttttctgtggatccagttgtggccctacaaccaattggcagtttacagccgaggctctggaatcaaaaagagaatttcccttaggcaagatcctcctcggctacttataccaaatgctgaacaatgcatcggccaaaatagctgttggctcaggaagaaacatccaagtttcttatgaattctatcatccaatgagctcagccagacaacttggaatgggtcaactcctaatcggcttattctttgccgataagatccagtgccgaggggaaatttcatcaactttgatgatggatcggcagctcaatctccaaggacctcctctgggtagcattgaaaatatagagctggcaaagttcaggagcaaaaccattgacagatggtggggtgaatggaaactgcatctattccataaatcagcttccatgtacaggatagacctctttctagttgttatccctcagacgacagaattctcccctcctcaccagagcaatagtggtagggacatagagtatgctccaggccttattccaaatggaggtgggccatctccccctgtcatcggctatcatgcccctaggacttcaactcttctccaagggctcatcagagaaccagccgatgccggcaagaagggaaaaaccagatcatcggctgtagatacttcggccccagctccaaaaaagaaaaccaagccaaagaagaccaaggaaaccgatgacttgcctgccctagatccatccattaagcaagctctggatgaagtagagatcggagaggatgttgatcaagctgcagacaagagtaccggaaataattattaa

SEQ ID NO: 99761 - DNA, 655 bp, Oryza sativa
  Clone ID: PAT_MRT4530_97541C.1
cctgactagcagataagggagctcttccttcctcaccagagcaatagtggcagggacatagagtatgctctaggccttattccaaatggaggtggtccatctcctcctgtcatcggctataatgcccccgagacttcaactcttcttcaagggctcatcagagaaccagccgatgctagtaaaaagagaagaaccagattatcggctgttgatacatcggctcctgctccaaagaaggccaaattaaagaagcctaaaccaaccgatgatctgcctgccctagatccatccatttaacaagctctggatgaagaagaaatcggcgaggatgttgatcaagccacagatgaaataagcaatactgaaataactccatcgacttcacctaagctaactcctccgaccccctctgctccagcttacttctctaggttacaaaaaaagagaattgctgtgaagaagaaatcggcatcaacaactctaaaaccggctccaccacctcctcttcttcgttcttgtcctgtacaacaatcatcgagtgaccaaactccatcgcccgtagagagccatcatattgaagaagaagaacaaccaactgcttctgctatcacagtcttagccaatcttttctcttttgacataagggactatcttg

SEQ ID NO: 99762 - DNA, 331 bp, Oryza sativa
  Clone ID: PAT_MRT4530_97542C.1
ggggagattaagtaaatgatgtatatctattaaacaacatgtacaagatcccttgggaatgggccactacatgcctacaataaccgaatacatgcatgacatgacaaaaattctttacttgaacccaaaggcttaactaacgcactgatgatgatgagataaggtaaaaaaaaatgaacttttggagccttcctaacatgctatttacagactttggacgggtagcttaggacaccagtttattttttggtttggatcctacggttgagatcaacggcggcgtcttctcctggatttggcgcacaagcttggacatggacgggcggagccc

SEQ ID NO: 99763 - DNA, 378 bp, Oryza sativa
  Clone ID: PAT_MRT4530_97543C.1
atggagaaagagaaaggccatggacaacgtcggcgacgacttcgatcgggcaggcggccggcgctgctgttcacggacgccatccacgccggccagcgccggcacgacgcagggcagccgacctcgacccaaccaacacctgtggaaggcgcgcgcctgcatcagccgaggccggcgctgcgctgctgccgggagacccgcgcttcgctcgcctcatggacggaggagctccgcgacaagtcggcggctactgacgatgctcggaaaggcggcgagggatccggcatgatcgagacgtcgacgaaggtgaagaatgacgacgacgaggagaagctcgccgccaacgcctccgccgccacaccgaggcgctcccgatga

SEQ ID NO: 99764 - DNA, 361 bp, Oryza sativa
  unsure (1)..(361): unsure at all n locations
  Clone ID: PAT_MRT4530_97544C.1
tttttttttttttaatagctcttaatttgaatacctgtttgaaaaaggtactaaaaccatttcccctgttaagaatagctctttgcttttatcagcagaattcattcgaaaaagacatcaccaattgataattacatcaaataaaaaaaatcattggacagatcaaatgcctcctcggcaagctctttggcactttctttgcttgtcctcctacgaaagaaaccgcggcgcgccgcgtgcgccggcgaccgtggcgtgacaagtcagaaaatcttcatgttcctcaccgattgcggcagcttccacccgccgccctccttcttnctgcgcgtcgcgcccgcactgcccggcgctcctcgcg

SEQ ID NO: 99765 - DNA, 312 bp, Oryza sativa
  Clone ID: PAT_MRT4530_97545C.1
ctgtctttgggggaaatgtaccatctgggtccgaatttcattcgggatatgaccgttcatggcacaccacatttttcatgagcaactcagaatgacgagaccaccgtattgtcgatatgtacaatccaattttgacaacaacaattaaattaccgttcataaataatcatctaaggttatgctaaaagactgctcgtccaggtgaagcggccgctgcttaggcatagtgaggctgaattccctctcggcctcaggccgagcatcttgtccagatggtagtcggcgccgggcatgtcgaccccggaagtggtg

SEQ ID NO: 99766 - DNA, 416 bp, Oryza sativa
  Clone ID: PAT_MRT4530_97546C.1
tcccgtgcacgtacccacgtacgtacgaagcacgtatctctattttccacatacgcgactagtgagcagcagctgtggtattctcccattgctactgccaccaaggaggttgccgctgcggctgctgccgccgacaaggcgccaacgacgccttcgacacccctgatacaggaggcgaacgaagctctgaaggcaccgaagccaaaagaggcgccgaaggctaaggaaggggaagagaaaaaagcgaaaggtgacaaagagaaagaaaacgccaataaggagaggcaccccagggcgactacatcccagatcggcgaggccacaccacccgccctactcggagacgatcaaggaggatatcatggcgctgcaagggaacagtacagggggatccagcacatacgcgatctccaagt

SEQ ID NO: 99767 - DNA, 787 bp, Oryza sativa
  Clone ID: PAT_MRT4530_97547C.1
gtggtggtggtggaggaggaggaggaggagcggcggctgcggggggcgctgcggagcctgcagcaggaggccggggtgctggagcggctggtgtacaagcaccggaaccagcaccgcggcgccgcctacttccagtacctcctcaaggtgaggcgcgacgtgaggctgctcctcgccgccggcctcggggacgtcctcaccgccgtcttccccgtcctcgcctcccgcaagccggccaacaccatcctcgccgtcaacagtaggcagagtaagaagaagcctggtgcaaaccattgtcaccatgagaggcttttgggtgtcgcacgcttgttatcagagatggctgaacctgttatgatgggagcaagtcagatctcgtttttacttgcaagatcattttttgttgatctttgcacagcgattcttgctttgctagcaagagtgagggctctggttcaacagatgctacttgatgttgtctcagtttacaacaaggcttctgatcttattgataggaagcaatctgttaagattagtattggtggagcgcaggctttcagagagtactatccctcaagcaatgatgcccgtacttttctggaatgtgtttgggtgaaagataaatttgttttgcatgaaaatacaaaaggtagcaagaggtcgaagcccactccgcctcgtaagtcatgtgcttccgaatcagcagtcctgtatgaaactcttggacaagtttctgaagatatggaaaatgctgaaggattgaactctcccatgaagctaccagatg

SEQ ID NO: 99768 - DNA, 210 bp, Oryza sativa
  Clone ID: PAT_MRT4530_97548C.1
tcgtgggttggggggacgcgcggctagggtttccgcgattcaggaggtgagggttgttggacacctccctgatcaagctcaacaatccaaagaaatatacactcacgaagctccttacgaacaccctcctcatttgcaagacaaaccagataccaaaaattcataatcacagacaaccaccatgccatggctatgatacctgtcataaac

SEQ ID NO: 99769 - DNA, 245 bp, Oryza sativa
  Clone ID: PAT_MRT4530_97549C.1
gctcgtggcagctgtgcacctgtggagtgggtggtcgaagggtgccccacgaccacggcgccgccccgcccaccgtgccggccgtcaggtccttggccactcacccatctcctctctattcagcagaagatcgagcttggagatagatggaggtgaaggaaggatggagcgccgctctagagaatccaagctacgtacgcgtgcatgcaacgtcatagctcttctataggtcacctatcatcgcc

SEQ ID NO: 99770 - DNA, 6986 bp, Oryza sativa
  Clone ID: PAT_MRT4530_9754C.1
atgccgcgctacaagcctgagtacttgtttggtgttgagggatttgtccaggagttgcgtacgatgtcctttgccataggatttgggactgcccctttgtatgcccagattcctcatgatcgtcacgaagagaagtgccgagtcaaagtcaccttgaacagtaatagtgaagatatcccatcagtgatgttcgaagctggaggaggaaactacatccatgcatgtcaggaggtggcaaggatcgccataggagagctccgcgatcgctacagtgatcagttggccgacactgagtatcgctaccatcctcgccaaccccagggaagtgaccgtggcggctaccttgagactgaggagattgagaatgatgctaccacaaggcatttggttgagatgctgtgggctatggatgaaacccgcgcggaggttgtgctagcagctcaagatcgtgaagaccggaatcgtggtaagatttgcaggctagaggacaaggtggatcgtttggaaaaggaactagccgcgttgaagggagaagcaccaccgcagaaggccaggattcgtcttaccgcaaggaagagagctctatttgtccctcgctaccaattggcgccaaaggtccgtgtggtggagaaagaagttaccccagccctagcggatcctccggtcgtcaatcacactaatcctggtgaagctggtgattggctgcatgccatagagaagaagttggatttgcttcagtgcattgatcaggagaaggtctcatttgcatcacaccagctgcatggccctgcctctgagtggtgggatcacttccgccttaacagaactactgctgaacctatcacttggcttgaattcaccgctgcgttccggaagacgcatataccatcgggagtggtgtctctcaagaagaaggaattcaggtcgctcacccagggatctcgcacggtcaccgagtatctgcacgagttcaatcgtctggctcgttatgctccggaagatgtgcgcactgatgaagagcgccaggagaggttcttggaaggacttaatgatgagctttcttacccactcatgactggggattatcatgatttccagaagttagtggataaggctattcgccaggaggacaagtacaaccgcatggagcagaagaaacgccggattgctcacttcaaggcacaacaggggaatagtcagaggccgcgtcttactttaggaccccagtccatgccacagggaggttcttcgtctgttgttcgtccgcagcatcagttcttcaacaacaatgctggcaacaacatccgcaatcaagctccacgccctgttgcagctccaacacagcaacagcctgccaagagggagcaaggcagcaagcccggggtgtgcttcaactgtggagacccaggacattactctgacaagtgtccgaagccccgacgcgtgaaggttgtccctgcccagaacaactctaccgcaccagcatcaaaggcccgtgtcaatcatgttgctgctgcagaagctcaaggtgctccagatgtgattttgggtacgttccttgtcaactcagttcctgcaacagtgcttttcgattctggtgctacacattcatttttatctatgagttttgcgggaaatcatgggatggaagtagaagatcttagacgtcctttgatggttagtaccccaagtaataattgtactctattatcaatttgttattgtgtgcctcggctgattcctggacgagggttcacacacatgtaagcgtttggaattttggatagaaattccgggcgagacagggcctgttggtagcttgctgctcgtacggcaactcgctcatgatgctcctcgagaaggtttacatcgatgtctcgctgttcatcctggttctcgtcggaatgcttctgtactcgtgtactttgatgtcgtagctcaccggggagcatggcttcagagccgtacacgaggaagaagggtgtttccttattggacgttgtcggtgtagtgcgcacggcccatagtactgatgggagttcttcaacccattttttgtcgtgtgacatgagtctgtcgtagacgcgggtttttatcccttgtagtactatgccgtttgccctttcgacttgtccattgctttgagggtgagagaccgaggcgaagcatattttgactcctaagccgatgcagtaatcttggaaatcggcgctgatgaattgggagctgttgtcggttatgatgcggtgcggtagtccgtatctgcaaaatatccctctgatgaacttgatggcgttatcggccttgatttctccagtgggtgatgcttcgatccatttggtgaacttgtcgattgctacaaataggaatttgtagccgccctgtcctcttgggaatggcccaagtatatctagcccccagcacgagaacggccaagtcagagggattgtttgaagcacttgtgcgggcagttttgtgtgtttgctgtggaattgacaggcttcacatcgctggaccatgtcgcatgcatctttaagggctgttggccagaaaaacccttggcgaaaggctttgccgaccaatgtccgaccggcggcgtgtgacccgcatatgtcttcatgtatgtcgaggaggagttgtctgccgtcgtcggtagagacgcatttgagaagtatcccgtttggtgcttttttgtatagatcattgccgaccatacagtagatttttgctttacgggttattttctcggcctccgtatcgtcttcgggtaactcctcgctgctaatgaatttgattaatggggtgcgccagtcatccgtggtttcgatttcagccacagcgcgttctgcctcggtgacctccgaactgatgtcaggggtgctcgggccaacttcgccgctaacttcttttaccgagggttttgtcaggacgtcgagaaaggtaccgggttcgagcggttctcgtctggatgcgcgtcgcgctaagtcgtctggctcgacgttgtctttgcgatagacgtgtcggacttcgatcccgtcgaacctcttctcgagtttcctgacttctgcaaggtacttggataactcggggttagagcacttgtagtctttgtgtacctggtttgcgactagctcagagtcccctttgacgattagtcgtttggccccaagtgcggctgcagctcgtatcccggcgagtagtccttcgtattctgcagtgttgttagttgccctgaagttgagatggattgcgtgtttgaattgatctccggatggagatgttaagataaatccagcccctgctccttggctattgagtgcgccatcgaacgccattgtccatgtctcattgtcgccttggttatctgacttgttatctggcatggtccaatcggccacgaagtcggcgagtacctgagatttaatggctgttcgcggcatgaagtggacatcaaattggcttagctcgactacccatttcgcgatgcggccgacaacgtctttgtttctcacaacttcgccaagagggaaggaggaaacaattgtgactctgtgggcttgaaagtagtggcgtagcttccttgatgtcatgatgactgcgtagagcagtttttgaatctccttgagtcttgtgggcgacttcatgttctcgattgctttgatcttctcgggatttgcctctattcctctgccagaaacaaggaatccgagtagcttgcccgacggtactccgaacgtgcacttctctggattgagcatgagacgatatcgtcggaggttgtcgaacgtttcccggaggtcatcaatcaatgagtcgcttgtcttggttttgacaacgatgtcgtcgacgtacgcctcgacattgttgccaagttgattgctaagtgcgccctggaccgtgcgttggaaagttttgccagctgttatcaatccgaagggcatcttgacgtagcaaaatactccgaacggagtgatgaacgctgttttctcctcgtcctccttagccatgctgatttggtggtagccagagtaagcgtcgaggaagcttaatagttcgcatccggctgttgaatccaccagttggtctattcgagggagagggaagtgatccttggggcacgccttgttgaggtctgtgaagtcgacgcacattctccatttaccattggctttccgcaccataactggattggcaagccactctggatggagtacttccctgatgaagccagctttgagaagtttttcgagctcttctcgtatggcttgttttcgatctggtgcaaatctccgcagtctttgcttgactggcttggcatcgggtcgcaccattagtttgtgctcaatcacctccctggggacccccggcatgtcggacggttgccaagcgaacacgtcggcattgtcgcggaggaaggcgatgagcgcgagttctttcttgggtggctcagacatggcgggtggagtgggcgtttgctcgaccatgtcgaggcttcgcttgtcgcactgcaccgccagttttgcgttcccttgaatagtgattgttcccttcgatcccggcatcttgagcatttgtggaattcccattgcatccagagtgctggcgaaaaggaggttgatcgagctgcccccgtcaatgaggactcgtgctaccttgatgttccgaatagtgggttcgaccacaatcggataccgtcctgggataactgcggtccaggaatggtctgcttccgagaactccatcttctgctcagaccacttcatcctgggtgcatccccctgccacatcgaacaaacttcgcgttccactttcttgtattctcgcttggaggagtacgtcgtggagccgccgaagatgtgtgaaacatggaggtcggagtccgggtacgcggagtccgattcatgaggaggtgactcctcgttcttctcgacaacgcgtactcgcttgcctttttcaaatgccatgtgcttctcgagcgactttttgaaaacaaggcaatcctccagagaatgtctatctgttttgtgtatgggacaccatgatttctttgtgtcgctgccttgtgggtccgggcgcttgggagggttcgcgtattctgctgcgaggacttctgcttgagctttccttttcccctttttgcgatttttcttcttgctcgactcagatgtgtctgcgactgacttcttctctcccccagtcttcggtttgtcgttcttgcgtcttagtgcgtcgtcgacgtgggcacatctttcaacgatctcgaataatcttcgagtagttgtgatgcgccttgtcgccaactcctgggtagtgtagcgatctctgacaccagatttgaaggcgcgaattacagaagcgtcagtgatctcggggatggtgttcctgcactcgttaaagcgtcgaacgtattccctcaaagattcacctgagttctgtgttaacgcgtgaagatcgtcttcgatcgcgtggcgcttgtatgttccttggaaattggcgacaaactgctgccacaggtgtgcaaaacccttcaacgcggtcggtaaataatttgccaatgcattgtcatctgctccagcaacataaagcactgtcgagtagacttgaaagaattcctctgggtcggtgctcccatcatacttttcaatagctccgggtcggaatctctcaggccatcggacatcacgtagggaacgaccgaaggccctgcacccagcacttggagcggtgggttgtcggtggtcgcgtgaccttcgtggatgtcgatctgacgatgaagaggacgcggatgatgatgatgatgatgacgatgggtcgcttggttccggcgtgtgattacgagggtgacgacctggatctcgggaatcttgtcttcgtctctcgctgttgtctcgacgccaatctccttcatcttcgtcgttacggcgacggccgtgactagtgttgtctggccctcgccgatcgcgatcgtcatggtctctgttctcgtttaggcgacttcctcgatcatggcgtcgtgaggagatatgacgccgggagcggtttgcgtcatcccgtgtgcgtcgtgcttctcggcgtccgttgatttgatctcgaagatcgccagtgccacgaggtggaggggtagcttgtcgaggtgattccctccgttctggaatttcgccgttagcgtcgccgactggcgatcggttttgctgtgctgcggtagcggcttcttcgaacgcattgcagaggttagtcaccgatgtccgtaatcgttccatccaacgctcgaggttgttgttcagaacgggatcgtaaggtgtttccctcagtatggcttcgacggccctaatgtgttgggctggggtagtcgattgattcgccgcctccgcattggcttgtgctgacgtgccaacgtcatcgatagccaacacctcccgcgccgtgtctgacgttgatgacccatagtcttcgaggagatgcaaaacagatggttcatggggattgagatcgattaccccgacgaaccgatctggggccggagtcactccttgttccttgccgttatcccggattgggacgtatgacttaggagacggagttttcatggcgccgagtagaactttgcaactcgagaggtcgtgattctttgtcttatggatagaacaatagacgttccaagttggagaagtacgctggatcccacgttccttgcaggcgcggatctcagcacgagcgttgacgaatacccagcaatcttgaagagtatgtttgttggttttatggataggacaccaagacctgatagtttcggaattcatctttgctggcccgcggtttgtgtcggagggacaaggcctggccgcatcagaatccttcacgaacttggatgtagtcggtaatccgttttccgtttcaacgggtggattcttcgatgtggaggcgtcttggttcgtagccaccgcgttctcgtttccggtcattgggggaccggttgagatcggcat

SEQ ID NO: 99771 - DNA, 639 bp, Oryza sativa
  Clone ID: PAT_MRT4530_97550C.1
atggccggcagcagcatccgcgggttcgccggcgccgcggcgctcggcggcctcctcctcctcgccctcctcctctgcccgccgccgccgtgcgccgccgcgcggccgctcgcgacgacgacgacgacgagctccgaggaggaggcgatgacgatcatcgcgctggcgccgtcggcgtggtcgcccggtggcggcgggcgtcggcagtggcgcgccgcgggcgccgcggcggccaagtggctcccgttcgtcgcgggtggcgccgcggggcgctacccgtacggccgcccgctctgggggctcccggcgccggcggcggggaggatggtgccgtgggcggcggcgacggcggcgccggggctggcgttcaggacgggagggcagctgacggaggaggaggcaccgcgcggcggcgaggacgcggcggcggcggcacggcaggagcaggccgccatgtgggcgtcgctgctcaaccccgcgcaggtcaggccggcgccagcgtggccgatggcgggcaacggcgaggcagaggcgccgccggccgacgccgagccgacggccgaagggatggacgccggcgacgagccaccggcgggcggcatgctggtcggccagccaaagtggccggtgtcaccgtaa

SEQ ID NO: 99772 - DNA, 597 bp, Oryza sativa
  Clone ID: PAT_MRT4530_97551C.1
ctgttgtttagctacctttggtggggcgagtgctcttctggtgtgtttgcctctgtcttccccatttttgctattttgacgtcatggcctcttctctcgtgcgtgccccgtgctatggccggtaggagtgaggagtacacaggcttccacactacgaggtcatggcctatattacatggccacagatcctatgaggtgggctgtattacattgccagacatcctatattacattgccactggtaggggtgaaaacgggcggcggtggcggtggcgggagctggcggcggcggcggcggcactgctcggccgccttgggctccggcctggagctggcggtggcgggggcggcgacctcggtcgaagagtgggcggcaacctcgggcggcggcaccaccgccatctcctcctcaccgtcgccgccgacgacgacgaggagccgacgggccagatccggcggcgacggttctcgtcccgcccggatccggcggcggcggacctcgtcccgcccgaatccgacggcggccttgggtgacatttttcagtgtcatttaacattcaagtacttccaaattgattccttcctagcttctgaaca

SEQ ID NO: 99773 - DNA, 1926 bp, Oryza sativa
  Clone ID: PAT_MRT4530_97552C.1
atgtactcggcgaaccactggggcgggtcgttcgagatcgccgcggacggcgcggcggaggatgaccacagccgcaacatggacctggaccgcggcgcgctgtcggcgcggcagcaccagctggacgagacgcagcagagctggctgctcggcccgccggaggccaagaagaaggacaagtacgtcgacctcggctgcgtcgtcgtcaagcgcaagctcctctggtgggtcctctggaccctcctcgccgccttcatcctcatcggcctccccgtcatcatcgccaagtccatccccaagaagaagccccacgcccctccccccgaccagtacaccgacgccctccacaaggccctcctcttcttcaacgcccagaaatcccttctttctctgacgaacaattttggccatgtctcgttctctgctctgacagccggccggctcccgaagaacaacggcatcaaatggcgcggcaactccggcctgtcggatggctccgatctgacggacgtcaagggcgggctcgtcggcggctactacgacgccggcgacaacatcaagttccatttccccttggccttctccatgacaatgctcagctggtcagtgatcgagtacagcgccaagtacaaggcggtaggggagtatgaccatgtgagggagctcatcaagtggggcaccgactacctgctcctcaccttcaactcctctgcttccaccattgacaaagtctatagccaggtgggcattgcgaagatcaacggcacccagccggacgaccactactgctggaaccggccggaggacatggcgtacccacgccccgtccagacggccggctcggcgccggacctcggcggcgagatggcggcggcgctcgcggcggcctccatcgtgttccgcgacaacgccgcctactccaagaagctcgtgaacggcgcggccgccgtgtacaagttcgcgcgcagcagcggccgccgcaccccgtactcccgcggcaaccagtacatcgagtactactacaactccaccagctactgggacgagtacatgtggagcgcggcgtggatgtactacgccacggggaacaacacctacatcaccttcgccaccgacccgcggctgcccaagaacgccaaggccttctacagcatcctcgacttctccgtcttcagctgggacaacaagctgccgggcgccgagctgctgctgtcgcggctccgcatgttcctcaacccgggttacccctacgaggagtcgctcatcgggtaccacaacaccaccagcatgaacatgtgcacctacttcccgcgcttcggcgccttcaacttcaccaagggtgggctcgcgcagttcaaccacgggaagggccagccgctgcagtacaccgtcgccaactccttcctcgccgcgctctacgccgactacatggagtccgtcaacgtccccggctggtactgcggcccctacttcatgaccgtcgacgatctccgctccttcgccaggtctcaggtgaactacattcttggggataacccgaagaagatgagctacgtggtggggtacggcaagaagtacccgcggcggctgcaccacaggggggcgtcgacgccgcacaacggcatcaagtactcgtgcaccggcgggtacaagtggagggacaccaagggggccgacccgaacgtgctcgtcggcgccatggtcggcgggccggacaagaacgaccagttcaaggacgcgcgcctcacctacgcgcagaacgagccgacgttggtgggcaacgccggcctcgtggccgccctcgtcgccctcaccaacagcggccgcggcgcgggcgtcaccgccgtcgacaagaacaccatgttctccgccgtgccgcccatgttcccggccacgccgccgccgccgtccaagtggaagccgtga

SEQ ID NO: 99774 - DNA, 365 bp, Oryza sativa
  Clone ID: PAT_MRT4530_97553C.1
aaaccgggttataaaacaaacatatcaaaccaccccaatggaccattaaaccagacacaagtaaacatcagccccacaaaaccttgcccaacaaaagctccggacaaccaggcacattggcacctccaccaaactggctgaccaccgaccaccacggaagcggaccaccacggggaggggggaccccccctgaatggggcaccccccgagggtgcgaccatccaccaggtggttgcccacgaaaaccatactctgcggagaataaaaaatcccctccatgaacggaatcccgcccctcacattatcaagggggtcaaaactaaaacctgcaaagagatggtcttcccaaacaagagacccacccc

SEQ ID NO: 99775 - DNA, 467 bp, Oryza sativa
  unsure (1)..(467): unsure at all n locations
  Clone ID: PAT_MRT4530_97554C.1
cctttggctgcaggattccgcatagtggatgttccttcttcctgctttcccttgctaaggttaanccaccaatctgcatgaagttcactcccggagcccggggaaacaggtgtttcctggatgctgagttcgacatggtatgataggtaatggatagaccggcctctgtatctaggatgcacaaagcaaaccatcacttattacaatagttccacgctgttttggaaagataaaaatgcaacaagtttgtcaagcattttgaaacggatggagtattaaataggcaccattttggaggttatctgttggtgccttgaaaatcantttttctcnctatttccncaaggaantggatcttnacttcttcagactactgttaccggttgtgtattgtgttaagtncataatanaaaacttgtngttctgcatcnttttgaangataaatatgaatanaatnctattgccc

SEQ ID NO: 99776 - DNA, 233 bp, Oryza sativa
  unsure (1)..(233): unsure at all n locations
  Clone ID: PAT_MRT4530_97555C.1
ggagaggagaggagaggagctaccggcgacggcgatgggaagngaggcggaggcgcggcggcggtggacgctggttctggtgaacctngngtnagtgctggagaaggccgacgaggtgctgctcccggcggtntaccgngaggtcggggcggactnaggngtgtngccgacggnctnaggntcgctcaccctatnccgcgcgatcntccaggcggcgtcgtacccgctcgcaa

SEQ ID NO: 99777 - DNA, 1095 bp, Oryza sativa
  Clone ID: PAT_MRT4530_97556C.1
atgatccggcggttcctctacatggtcgacctctgcggcgacaactcgctcacccagaggctacgccgcatcgacacgtcacgtctcttctaccccaaggatcaactgccccgagcgtcgccgtcgtcgtcggcggcggcggcggcggtggaggacgctcgcctgcctccagccgccatgggcttcagcgcgtcgatgaacttcatgcgcacgagcgacgacaagatcgtcaccgtcgacgacaccggccgccgcgccatcctttacgaccccgccgcgcacaccgtccgctcgttgccccccatggcatcgcccaagttcttgaccgtgtcgctcgccgtcgccggcgacctgtacgtcatggtgacgccacctcatcctgacaaggtcggcggcggcgagggacggcggccggagtattcgttcgaggcgctcgtccaccgtgaacgccgttccgggtggatgacgaatgcggacgaggaggcgcgccactggcgccccatgccgccgcctccgttcgtgcacgacgccgccgccggcgagatccacgggtacgcggcgatcggcgactcgcacatcctggtgtccaccgaccgcgccacctactcgttcgacacggcgagcgcggcgtggagcaaggccggcgactggaggctgccgttccgcggccgcgccgagcatgtccccgagcacggcctctgcgtcggcttcctggagatggacgacaccgtcctcgccgcgtgggacgtgtccgcgtccccacagccgcgggcgccggcggcgagcgtgcagtcgaaggggttctcggtggcgagccccggcgagtggaagggcttggcggcgccgcgggaggtcgcgtcgcacgtcgtgcacctcggcggcggcaagctgtgcgtcgccaaggtgttctgggtcgttcgccgcgggacgtgcagctacccttgctgcgtcggcgagcacgacaagatgaaattctccatgctcaccggcgtcgaggtggcgcccggcggcggccatggcgggaagccccgcatcgtcaagcacaagtcgtgccgttatagattcggtcaataccaccccactcatgtactctaa

SEQ ID NO: 99778 - DNA, 894 bp, Oryza sativa
  Clone ID: PAT_MRT4530_97557C.1
atcactcaagcaggcaacaacagcgagcagcaaggattggtgacaggcacaagcacttgtgcaacggcttgtggatgaatcatcattccacgttgatgaatttttttgggcgaagcacaaatcgtgcatagctattggcactttgacaatgcaccatgtatggtgggtttgtgatgggacatgaagcagttgatcgcaatagagaaacatgtcacttgagattataccaagactatttttctaataatcctacctatggcccagttttattcaggcgtaggaatagaatgagcaggcctttgtttctccgcataatgaatacagtagaggaccacgatgattattttgtgaagatagagaaatgcagctggtatacctggattaagttgtcatcaaaaggtcactgcaacaatgcgttagttggcttatggtatagcaatagatgctttggatgaatatcttggtattgcataaagtaccgctatagagagcctgagaaggtttgtgaaagcagttgttgaagtttttgaacatgagtacttaagatcaccaaatgagaatgatacaactcgattacttgaacttggggagaacagaggtttccccggcatgttaggatcgatccatagaccgcatgcattggaaatgtaagaactgccctacagaatgatggcatggtatgtaccaagggcacgtgcacaagtttacaataattttaaaagccattgcttcgaaggatttatggatttggcatgctttttttttatgcctgggtctcataatgatattaggcaaaaccacagagatcctttgaagcaacggcttctaaaattattacaggttcatgcacgtgcccttggtatgtaccatgccattktgtaggggtagttcttc

SEQ ID NO: 99779 - DNA, 342 bp, Oryza sativa
  Clone ID: PAT_MRT4530_97558C.1
atggagtggtacgaggactccatgatctggtcggagagtcgaacgcgcggtggcgagacggtgcgtcgcgtcgcgtcgcgcggccgcgcggggaggaagaggatcgagcgatcgcgacggcgatggccgccgcacaagaggtggcggcgtgcgcgcggtggcgaggcgtggcgtggcgtggcgtggggaggaagacgagagaggcaactagccgtggaggaatttggtggtggtggatttgaaagcgtcgcgaggaggaggacggaggcgcacgtcgcgattcagcataggacgcagcatctgcaaactggcaccgtcaaagttcctagatattttcgttaa

SEQ ID NO: 99780 - DNA, 2344 bp, Oryza sativa
  Clone ID: PAT_MRT4530_9755C.1
aaagtcctcttttggctttgggccgaaagtcggcccaaaaacccttctctctctcctcggcccagccggcccagtccgcagccgcagccgcccgcgcgtgcgcgctgtcgctgacaggtgggtcccacctgtcagggtcatcgtctaccttcggccgccgctgccgaaaccctagtttcgcgccgccgccgtttactatccaaatccggccgttcctttccttctccggccgaattgaaagaggggaaatgatcctcgggatctcctctaccttttctcctttggaatcttcggctatttcgttttggaaagagttggattcgagttcgtctcggattcgttcttcccgatctttccttcgccgttgccgtcgccgtgggccttcgccgccgcctccgagcccctttaaaaggacccccggtgtctcctctacccgtcgccacccttgccttcgcctctagtcgtcggaatcgctctagcgccgtgtgccctagcttcgccgtcgccgccgccgctccagccgtgcgctgccgtcgtttcagccgtcgccgtcgctcgggaagaccaccgtcgtgctcgccaagtcgtcgccgtcctcgtccgccccttcgccgtcgccggagatcaccggagcagcatcgccgtcgtcgacccgaaggttcccgccgcttcctcctcgtcgccgtcgccgtccgttggtcttccgccgccgtttaggtcaccggtgagttcgccgtgttgtcctctacgtcttggtgccctccgtttgcgtcctagtgccgccgttcgccggcgagcgtgcgccgttcgagccgtctcctccgccgagccgccgccgctgtcggtgacgtcaccgctgacgtcattggggtcgtccgccgaaggtgcgctgcagtggattgtgttatgcgaggggtattgtcacaactcctttccgagataccgtggtggtattgaggcacatgaggaagagttctacaatgaggctgatggactaccagcaatagcaacgtcgtctccggccgctgcatgcctcgacgacgcccagcgtgccttcccgcgcgtccaccccgaccgaccagctcgccaactcgtccacgcactaccaccgtcgctccatagcttgagggcgccaccgaacgagctcttgtttatcgtcgacttgtttagggagaccgtggccgctggctcggccagggcgcgaatatttccttataaattgccacacggcaccccagtctccacccacccggacctcgccgccgccgcctctccggcgccgcacccgaagctctctcattgggtcgacccggccgcgtccgccgcgccgccacgggagctcgcgacagcggacaccaccgcgcaggttcacccgggttcctttaccaaggccgtcctcgccgcgtctgacgccgaggtggtcatcggcgaggtgaagcgcgtcgtcgtccgggacggccgcgtcatcggggtcgaggtcaagggccgcggcgtggtggacgccgacgccgtggtgttcgcgctcgggccatggtcggggggggaggtgtacatttgtgggataaccaaggacgaagaggtgcccaatgatccggcgacgatcaccggtgatccggactcgatcgcggcgctgcacgagatcgccgggagggtgtccagccagctgaagagggaggaaggcgcggaggtggtggcggagcaggcttgctacatgccgtgcaccagtgacgggttgccggtgatcggagagatgcctggggtgaagggttgctacgtcgccaccgggcacggcgggtggggaatcctcaacgctccggccaccggcgctgcgctcgcggagctcatcctcaacggcagtgccagcatcttcgatctctcgccgttcagcccagcaaggtttctcaacaagaggactcggttctccttgacatctgccaagcttcctgatgcaatgttctgcctgaatgtcaacagacttgagcaagaagatgccattcttccgcaggatctgcttcaggacaaggtcgtcgccttcaacaaggtattgcactctgatggccatatctttgaaacgatccagatcctcgggcacctctagaagtcgctctgctcctggtgatgagaccgcttgcgacagcggcgtcgtccttccccaccgcgagcggcggtggcgccctccccccaccgcgagcgacagcgtcggcttccgctgggtggatccagtggcgttggcggcttcccgcaggcggatccagcggcgacggcaacttcccacgggtggatttagtggcgtcgacggaggaagaaattttcgtcgattggcttccttccgccatcgcctcat

SEQ ID NO: 99781 - DNA, 724 bp, Oryza sativa
  unsure (1)..(724): unsure at all n locations
  Clone ID: PAT_MRT4530_97560C.1
gtcgaggacatcgtcggcgccactgctcgtcctgtcggcggcgctcgccgtgctagcctccacctgcatcgccgaccctgagccggtgcaggacttctgcgtggccgtcgtcccccgcgccggcgacgccgcggcggcggcgtgcccggcctacccgggcttcccgtgcaagccggcgtccacggtcgtctccgacgacttcttcttcgccggcctcgccgtcgccagcgacacggacaaccggttcgggttcaacgtgacggcggcgaacgcggagacgttcccggggctgaacacgctcggcgtctccatcggccgcgtcgaccttgcccccggcggcgtcaacccgctgcacagccacccgcgcgccaccgagctgatccacgtcgtcgctgggagggtgctcgccgggttcgtgagcacgngcgggggagttctactccaaggtgctcggcgagggggaagacgttcgtcgtgccgcgcgggatgatccacttccagtacaacgtcgggcggcgtcgccgcccaggtcatcacggcgttcaacagccagatgccgggcgttcgtggccgccgggtcgaacgctgttcggctccgacccggagatacccgacgccgtcctcgccaagagcttncaggtggacgccaagatcatcaagctcctcaagtccaangtcttaaagtccttgatcatccggcatggctgatgaaacttctatttgc

SEQ ID NO: 99782 - DNA, 367 bp, Oryza sativa
  Clone ID: PAT_MRT4530_97561C.1
gtagacggtccgacggtcaccaggatttcaggacgaatatactggacaacaatggtgtcaatgtagtttctgtgttcttgacgactctgatcactgcattggcgtgcgtatacatcttctgaggtcttagttgtgtagagtagtggtagaggcagtagcaacacatcacaggttctcatacaatacaactgatgaaattcagacagaaaatcttatgacagttgcttctttctgggcattcctaacaatagttgcaactgttgttttagcaatttttcacacagaatccaatttttgtatggatagattcagctctagtgatcttaatacagatgtcgcattgaatagagaaatctttctttgtatc

SEQ ID NO: 99783 - DNA, 1266 bp, Oryza sativa
  Clone ID: PAT_MRT4530_97562C.1
gcaaattgcatgctcagaccaagaccaaccaggaacgactgactcacatacttatctccaaatgatcaaattttgcgtcaactaagtaaatggtgataccgacgttggtggtgctgcccgtctggagcgccggccatttcatacccataatcgacaccggcatgcggctgctccgcgcccgcggcgtgccgcgctggcggtcaccgcacacctcatagagagggaggaaccaacagggcaaaatgtgttccataaggagctttgcttttgtgctggtattagcattttcagttgcagtcgcggagagcagagattcatttaatgtattggctcataaaagctttccccttgaaaacaagaagacagggttaacttcagccaatggaaagctgtgtcaactatgcgagcagtactcaacggaagcactgttctacctccaacaaaatgaaacccaaactgagattcttagcatcctccaccatgcatgcgcaaacgttggacctctaaaacagcagtgcatcactctggttgactactacattccccttttcttcttggaggtttcgatggtaacacctgaaaagttctgtgaatcagtgcatctctgcagaaagggaacgatgcttcgcctaccatctcgaggagatacatgcggcatatgccatcatgttcttgttgaagttcttatcatgctaaaggatcctgacatgcagctggagatagtcgagatatttctcaaagcatgcagcaaggcagataattatgtacagcagtgcaagaagatggtccttgaatatacccctttgattctggtgaaatctcagaagtttcttgagacgacagacgtctgctctacaattcatgcatgcaaaacggggacacaagcatctgcagaaaccatgcttctgtctgccgcatcgtgaaaacaatgcaaatcaagaaattgctacttatttcccaagagattgaaccggtaatgaattgaagatcagatgcctgtgggaattctttactctattgctgaaacagtattgagtgaggcaaaaaaaaatgttgtatgtagagatttgtgttgtatattttgaacctacactgctctcaagtttgaagcatggagcagctgtaccaccgttcatcgatgatcgagcatacaaagttacaaactgtctgatgtcattgaatttggaagttacatgtgcaattatcgcattgtatcattatcatttgacaaacattcatactattattattcagtgtttctctgtt

SEQ ID NO: 99784 - DNA, 630 bp, Oryza sativa
  Clone ID: PAT_MRT4530_97563C.1
gaatattcaacttggatagtcgatagcaagatcttttgagctatggtggatacgtttattacaatacatgtctgattatttttagatgaagtacaatatatgtaggtaatgagggattcctttaagccctttttgctagaagtcggcggtgaaactctcctagggcccagattgggaacaagttcctgtagtttgtgtaattgaagaagagggaggaattgaagctcccaagaatttcttgttgtggaaattctcctgtctccagctgcatgttgattaattctttggccgcacggtataatggtgctggatctaattcaacctgtccagcatatattaagcccaacattccccacgcagtgtgaactacatgaggcctcccactgtcaatatactcctcaacttgacaaccgaggtaatcctctccccatccaccagtacttagctgctttgacagcaagaagttgcatgccttcctaatagacaaactgttttggaatgttcttcctggcgcaaccagtccttttatgcaaagaaggtagcataagtaaaacagacagcccaagatccttaccacggaccatcatttttttggttttttctcgagaaacaacacacccttttttggaa

SEQ ID NO: 99785 - DNA, 5721 bp, Oryza sativa
  Clone ID: PAT_MRT4530_97564C.1
atggctgaacaagcaaaggcgcacaacctctctccgagtgttagcggtgacgacggggagccgaacccacgccgtcgagctcgtactccaccgccccctccacgccaaagtcctaggcgggaggaggcgctcgagagggtcgaaggatccgcgacttcgacatccacgggtgatggggaagggcggcgagatggggagcgtcgcctcctcgtctacggcgacggcagcacgccccagggcgcgctccaagctgcgggcgcgctcctacgtcacccgcccattgtccctgacccagagtctccagcccaacgttggctggacgacgtggccaacttggtcatgacggcacggcagcgcctagatgctggtgggcggtcctccgccaccaagacctctggtactgctaccaccggctccgcgtcgtcaagacggagggcgcggcgagcggcggccgctgttcgccattcggccgccactccttcgtcagcgcctccgacccgggaagatctgcgtggggggccggatgcctgcatcagtatcgagcgccggcgtaatggccgacgtgctgcccacgcaacggagggcgcctcctcgtccggagtgtcacctcaacacggacgcggggatcagccctccgtgcccccggttggtggtgtcggctgtagagcctttgtggcgagccttcggaacgtccgttggcccccaaggttccggcccaccatcgccgaaaaatatgacgggagcgtcaaccccgccgagtttctccaggtctacacgaccgggatcgaggccgccgggggtgacgacagggtcatggcgaatttctttcccatggccctgaagggacaggcgcggggttggctaatgaacttgccacccgcgtccgtccactcttgggaggacttgtgccaacagttcaccatgaactttcaaggcacatatccacgtccaggtgaggaagcggacttgcacgcagtacagcgaagggatgatgagtcacttcgctcatacattcagcggttctgtcaagggggtgtgcggcacaaccgcatgctcgaaaagatcgcctccaaggagccccagactaccgcggagctttttcagctcgcggaccgagtggctcgtaaggaggagtcatggacctggaacccctccggttccggtgtggcagcttcggccgcccccggatccgctgctcggacagggcggcgtgacaggaggaggaagaaaaggtcagcccattccgacgacgagggtcatgtcctcgccgtcgagggtgcttcgcgggccacccgaaaggggaggcctgcgagcgacaaaaaggaggccagcgctcccagcagggagcgcccaaccggcaagtggtgcaccgtccacaacacctcccttcacgacctcgcggactgccgtgcagtcaaaagtttggctgagcggacgaggaagtgggaggaggagaggaggcaggagcgccgagagggcaagtccccggcggttccttccggcaatcggcgaagagaggccaaacagaaggcccccgccgaggacatcgatgacggcgatgatgacctgggtttccaagagcctggggccaccattgccactgtcgatgggggagcgtgtgctcacgtttctcgccggagcctcaaggccatgaagcgagagcttctggccgcggcccctactcatgaggcgacgcgccgggcgcggtggtcggaggttgccctcaccttcgaccagaccgaccacccaccgtgcgttgcccggggaggacaggttgcaatggtggtttcccccactgtttgcaacgtgaagctggggcgtgtcctcattgatgggggagcagccctcaacatcctttcccccgcagcctttgacgccatcaaggccccggggatggtgctccggccgtcccaaccgattatcggtgtgacgccggggcacacttggccgctaggtcatatcgacctcccggtcaccttcggtggatccgccaacttccgcacggaacgggtaaactttgatgtggcggacctcagtctgccctacaacgcggtcctagggaggcccgcgttggtgaagttcatggcggcggtccattacgcctacctccagatgaagatgccgggccccggtggccccatctctgtccatggcgacctcaaagtcgcgctcgcttgtatggagcagcgcgcggaccacctcgccgctgcgtccaagcccgagggtggcgacgagaggcttggcacctccgtccccgccgccccgaggcagcggatagtcacgtgcgacgaggtcccggaagacgcgctcgtctccttcctgcgggcaaacgctgacgtcttcgcatggagaccggcggatatgcccggggtccctagggaggtgattgagcaccgtctcgccgtgcggccgggcgcaaagccggtccggcagaaagtgcgccagcaggccccggaacgtcaagctttcatccgtgaggaggtggcgcgacttctggaggccggattcatccgcgaggtcatccatccggagtggctggcgaacctggtggtcgttcccaaggcgaacggcaagcttcggatgtgcatcgactacaccgaccttaacaaggcatgtcctaaggacccttacccccttcctcgcatagatcagattgtcgactccacagcggcgtgcgaccttttgtgttttctagatgcatactctggttaccatcagattcgcatggctagggaggatgaggaaaaaactgcgttcattacccccataggaacttattgttatacgacaatgtcattcgggttaaagaatgcaggtcctacttttcaacgtactactcgaatttctttgggtagccaaataggacgtaatgttgaggcttatgtcgatgacttggttgtgaagacccgcgaccgagaaactttactttcagatctggcggaaactttcgagagtctccgctctacctgcataaagctgaaccccgataagtgcgtgttcggtgtacctgcgggcaagcttctcgggttcttggtctctgcccgaggcattgaggccaaccccgagaagatacgagctatagaacggatgcgcccccccagcaagcttagggatgtgcaatgcgtcaccggttgcatggccgccctaagtcggttcatatcgaggctgggagagaaggcgctacccttatttaagctcctcaaacgctccgggccgtttacctggacggaggaagctgaacgtgccctcactcagttgaaggcgtatcttagctctcccccagttctggtcgccccggagccaggtgaacccttgctactctacttagcggtgaccccgcaggtagttagtgcggcgttagttgtggagcgcgatgaggacaaccctcattccgcgcatccccaccctgtgttggcttggcccgggagagagcagggaggagaggctcccgagccgaacggtggcccaaggcccccgacgaccggagctggccctctgcccgcttgtcagacggtgccaggtgcccccgacccccaggatggcccgggggccactgcgggaaagccgcacctatcgccctctgaccccgaggttaaccctgtgccgactcgacccgggagagagcagggagaagaggcccccgagccgaacggtggcctaaggctcccgatgaccggggttgaccctttgcccgcttgtccgacgacgccaggagcccccgacccccaggacggccctaaggccactgtgggaaggccgcacctgtcgtcctccgaccccgaggtcatcagcacagaagacaagtgcgccccgcgaggccgcttggacgaagagcgccccagggatgcggcccctggcgaagaggatcggccacaccgaaaggtgcagcggcccgtctactttgttagtgaggccctccgggacgccaagacccgataccctcaggcccagaagatgctttacactattctgatggcttcgaggaaactgcgccattatttccaggcgcatcgggtcacggtggttacgtcttaccccctcgcccaaatcttgcataatcgagagggtacaggacgggtggtgaaatggacaattgaactttctgagttcgatttgcactttgaaccacgtcacgctatcaagagccaggccctcgccgattttgtggcagagtggaccccggctcccgagcccgtctcagtccccgaggccagctcgggcccctcgcagctgccccacaccgcccactggggcgccggtgcgggggtcatattgacctcgccgagcggagacgtcctcagatacctggttcgccttgactttcgggcgaccaataatatggcagagtacgagggactccttgcgggacttagggtggcagctggactggggatccgccgcctcctggtgttaggcgactcccagctagtggttaaccaggtctgtaaggaataccggtgctctgacccgcagatggatgcttacgtacgccaagtacggcgtatggagcgccatttcgacgggatagagcttcggcacgtgcccagacgggataacacgattgccgatgaactctcacggctcgcttcctcgcgagcccagaccccaccgggcgcctttgaagaaaggcttgcccagccgtcggcgcgacctgaccccttaggggagacggacgcacctgaccggcccccgaggcccgtcggagtccaggcctcgggacccgaggggagcgctcccagctcccttagattgattgcttggatcgttgagatccaagcatacctcacagataagactctacccgaggaccgcgaaggaagtgaacgcgtccagcgcatctccaaacgctacgtgctgatagaagggaccctctatcggcgcgcggctaacggaatcctcctgaagcgggccccgggcgggtttgagtatctgtatgtcgcgatcgacaagttcactaagtggcccgaggcttatccggtcgtcaagatcgataagcactccgcacttaaattcattaagggcatcacagcccggtttggggtgcctaaccgtattattacggataacggcacccaattcactagtgagcttttcggtgactactgcgaagacatgggcattaaactctgcttcgcctcacccgcccaccccagaagcaatggccaagtggagcgcgccaatgcggaaatcctcaaaggccttaaaaccaagaccttcaacatcctcaagaagcacggcgattcgtggatcgaggagttgccagcagtgctctgggcaaaccgaaccacaccaagccgagcaaccggggaaacgcctttcttcctcgtctacggcgcggaggcggttctcccatccgagctcaccctgaagtcccctcggaccaccatgtactgtgaggctgatcaagatcagcttcgcagagatgacctcgactacttggaagagcgaaggcggcgcgcggccctccgagccgcacgctcccagcagagcctgcggcgctaccatcagcgccacgtccgggcacgatcactctgcgtcgacgacctcgtcctacgccgcgtccaaacgcgtgctggattgagcaagctctcaccaatatgggagggtccgtatcgtgtgatcggcgtcccccggccgggctccgttcggctggccacaggcgacggcacagagctgcctaacccgtggaacatcgaacaccttcgtcgcttctacccctaa

SEQ ID NO: 99786 - DNA, 264 bp, Oryza sativa
  Clone ID: PAT_MRT4530_97565C.1
ccctcgaggccggccgggaacatcctatcaatatgtgttctactcactctggaatgagagtgtaacagtagtcagagtgaaatcagaatgggatctatacaccatcaacatctttgccctgcgcgcctaaattgataatccagcgaggggcactactgcattctccactatccactatttcccatcaacattacccatggctagcctctggatcccagccggcagcacgtaaggcaaacggaggatgtggggacctcgactgct

SEQ ID NO: 99787 - DNA, 642 bp, Oryza sativa
  Clone ID: PAT_MRT4530_97566C.1
atggggaaggcggggagatggctgaggagcttcttggccggcggcaagaagggtggcaagaagggcgaggcaatggcggcggctttgcccggagaggcggcgaaggagaagcggtggagcttcaggcgaccggtgcacggcgagaaggcggcggcggaggcggcggcggcggcggacggcgtggtggtgggcgaggccgaggcggggtttgatctgtccgcgtcggagtcggagttcgaccagaagagacacgccatggcggtcgcggtggccgaaccgcgggacgcacgcatcgggctccattatcgggttcttggcgtcccggagggcctcactaacaaagtagacgggccgctgcacctttcggtggggccgatcctcttcgctaggggccgcatccttggggcgctcttcgtccaagcggccacgtggggcgcactcgtcttctgtgccgatgacctcggggtcggaggacgacaggggcggccttcccacagtggcctcggggccgtcctgggggtcgggggctcttggcgtcgtcggacaagcgggcagagggccagctccgagggcgataggtgcggccttcccgcagtggcctccgggccatcctgggggtcgggggcacctggcaccgtctga

SEQ ID NO: 99788 - DNA, 3633 bp, Oryza sativa
  Clone ID: PAT_MRT4530_97567C.1
atggccgaacaagcaaaggcgcacaacctctctccgagtgttagcggtgacgacggggaaccgaacccacgccgtcgagctcgtactccaccgccccctccacgccaaagtcctaggcgggaggaggcgctcgagagggtcgaaggatccgcgacttcgacatccacgggtgatggagaagggcggcgagatggggagcgtcgcctcctcgtctacggcgacggcagcacgccccagggcgcgctccaaactgcgggcgcgctcctacgtcacccgcccattgtccctgacccggagtctccagcccaacgttggctggacgacgtggccaacttggtcatgacggcgcggcagcgcctagatgctggtgggcggtcctccgccaccaagacctctgagcctttgtggcgagccttcggaacgtccgttggccccccaaggttccggcccaccatcgccgaaaaatatgacgggagcgtcaaccccgccgagtttctccaggtctacatgaccgggatcgaggccgccgggggtgacgacagggtcatggcgaatttctttcccatggccctgaagggacaggcgaggggtgaggaagcggacttgcacgcagtacagcgaagggatgatgagtcacttcgctcatacattcagcggttctgtcaagtccgcaacaccataccatgcatccctacacacgcggtgatctacgcgttcagggggggtgtgcggcacaaccgcatgctcgaaaagatcgcctccaaggagccccagactaccgcggagctttttcagctcgcggaccgagtggctcgtaaggaggagtcatggacctggaacccctccggttccggtgtggcagcttcggccgcccccggatccgctgctcggacagggcggcgtgacaggaggaggaagaaaaggtcagcccattccgacaacgagggtcatgtcctcgccgtcgagggtgcttcgcgggccacccgaaaggggaggcctgcgagcgacaaaaaggaggccagcgctcccagcagggagcgcccaaccggcaagtggtgcaccgtccacaacacctcccttcacgacctcgcggactgccgcgcagtcaaaagtttggctgagcagacgaggaagtgggaggaggagaggaggcaggagcgccgagagggcaagtccccggcggttccttccggcaatcggcgaagtgaggccaaacagaaggcccccgccgaggacatcgatgacggcgatgatgacctaggtttccaagagcctggggccaccattgccactgtcgatgggggagcgtgtgctcacgtttctcgccggagcctcaaggccatgaagcgagagcttctggccgcggcccctactcatgaggcgacgcgccgggcgcggtggtcggaggttgccctcaccttcgaccagaccgaccacccaccgtgtgttgcccggggaggacaggtcgcaatggtggtttcccccactgtttgcaacgtgaagctggggcgtgtcctcattgatgggggagcagccctcaacatcctttcccccgcagcttttgacgccatcaaggccccggggatggtgctccggccgtcccagccgattatcggtgtgacgccggggcacacttggccgctaggtcatatcaacctcccggtcaccttcggtggatccgccaacttccgcacggaacgggtcaactttgatgtggcggacctcagtctgccctacaacgcggtcctagggaggcccacgttggtgaagttcatggcggcggtccattacgcctacctccagatgaagatgccgggccccggtggccccatctctgtccatggcgacctcaaagtcgcgctcgcttgtatggagcagcgcgcggaccacctcgccgctgcgtccaagcccgagggtggcgacgagaggcttggcacctccgtccccgtcgccccgaggcagcggatagtcacgtgcgacgaggtcccggaagacgcgctcgtctccttcctgcgggcaaacgctgacgtcttcgcatggagaccggcggatatgcccggggtccccagggaggtgattgagcaccgtctcgccgtgcggccggacgcaaagccggtccggcagaaagtgcgccgacaggccccggaacgtcaagctttcatccgcgaggaggtggcgcgacttctggaggccggattcatccgcgaggtcatccatctggagtggctggcgaacccggtggtcgttcccaaggcgaacggcaagcttcggatgtgcatcgactacaccgaccttaacaaggcatgtcctaaggacccttacccccttcctcgcatagatcagattgtcgactccacagcggggtgcgaccttttgtgttttctagatgcatactctggttaccatcagattcgcatggctagggaggatgaagaaaggcttgcccagccgtcggcgcgacctgaccccttaggggagacggacgcgcctgaccggcccccgaggcccgtcggagtccaggcctcgggacccgaggggagcgctcccagctcccttagattgattgcttggatcgttgagatccaagcatacctcacagataagactctacccgaggaccgcgaaggaagtgaacgcgtccagcgcatctccaaacgctacgtgttgatagaagggaccctctatcggcacgcggctaacggaatcctcctgaagtgcattcctcgggaacaaggcgtcgagcttcttgctgatatccatgaaggcgaatgcggagcccactccgcctcgcgcaccttggttggcaaagcctttcgtcaaggtttctattggccgacagctctcaatgatgcggtcgacctgttcactaagtggcccgaggcttatccggtcgtcaagatcgataagcactccgcacttaaattcattaagggcatcacagcccggtttggggtgcctaaccgtattattacggataatggcacccaattcactagtgagcttttcggtgactactgcgaagacatgggcattaaactctgcttcgcctcacccgcccaccccagaagcaatggccaagtggagcgcgccaatgcggaaatcctcaaaggccttaaaaccaagaccttcaacatcctcaagaagcacggcgattcgtggatcgaggagttgccagcagtgctctgggcaaaccgaaccacaccaagccgagcaaccggggaaacgcctttcttcctcgtctacggcgcggaggcggttctcccatccgagctcaccctgaagtcccctcgggccaccatgtactgcgaggctgatcaagatcagcttcgcagagatgacctcgactacttggaagagcgaaggcggcgcgcggccctccgagccgcacactaccagcagagcctgcggcgctaccatcagcgccacgtccgggctcgatcactctgcgtcgacgacctcgtcctacgccgcgtccaaacgcgtgctggattgagcaagctctcaccaatgtgggagggtccgtatcgagtgatcggcgtcccccggccgggctccgttcggctggccacgggcgacggcacagagctgcctaacccgtggaacatcgaacaccttcgtcgcttctacccttaa

SEQ ID NO: 99789 - DNA, 5505 bp, Oryza sativa
  Clone ID: PAT_MRT4530_97568C.1
atggccgaacaagcaaaggcgcacaacctctctccgagtgttagcggtgacgatggggagccgaacccacgccatcgagctcgtactccaccgccccctccacgccaaagtcctaggcgggaggaggcgctcgagagggtcgaaggatccgcgacttcgacatccacgggtgatggggaagggcggcgagatggggagcgtcgcctcctcgtctacggcgacggcagcacgccccagggcgcgctccaagctgcgggcgcgctcctacgtcacccgctcattgtccctgacccggagtctccagcccaacgttggctggacgacgtggccaacttggtcatgacggcgcggcagcgcctagatgctggtgggcggtcctccgccaccaagacctctggtactgctaccaccggctccgcgtcgtcaagacggagggcgcggcgagcggcggccgctgttcgccattcggccgccactccttcgtcagcgcctccgacccgggaagatctgcgtggggggccggatgcccgcatcagtatcgagcgccggcgtaatggccgacgtgctgcccacgcaacggagggcgcctcctcgtccggagtgtcacctcaacacggacgcggggatcagccctccgtgcccccggttggtggtgtcggctgtagagcctttgtggcgagccttcggaacgtccgttggcccccaaggttccggcccaccatcgccgaaaaatatgacgggagcgtcaaccccgccgagtttctccaggtctacacgaccgggatcgaggccgccgggggtgacgacagggtcatggcgaatttctttcccatggccctgaagggacaggcgcggggttggctaatgaacttgccacccgcgtccgtccactcttgggaggacttgtgccaacagttcaccatgaactttcaaggcacatatccgcgtccaggggggggtgtgcggcacaaccgcatgctcgaaaagatcgcctccaaggagccccagactaccgcggagctttttcagctcacggaccgagtggctcgtaaggaggagtcatggacctggaacccctccggttctggtgtggcagcttcggccgcccccggatccgctgctcggacagggcggcgtgacaggaggaggaagaaaaggtcagcccattccgacgacgagggtcatgtcctcgccgtcgagggtgcttcgcgggccacccgaaaggggaggcctgcgagcgacaaaaaggaggccagcgctcccagcagggagcgcccaaccggcaagtggtgcaccgtccacaacacctcccttcacgacctcgcggactgccgtgcagtcaaaagtttggctgagtggacgaggaagtgggaggaggagaggaggcaggagcgccgagagggcaagtccccggcggttccttccggcaatcggcgaagagaggccaaacagaaggcccccgccgaggacatcgatgacggcgatgatgacctgggtttccaagagcctggggccaccattgccactgtcgatgggggagcgtgtgctcacgtttctcgccggagcctcaaggccatgaagcgagagcttctggccgcggcccctactcatgaggcgacgcgccgggcgcggtggtcagaggttgccctcaccttcgaccagaccgaccacccaccgtgcgttgcccgaggaggacaggtcgcaatggtggtttcccccactgtttgcaacgtgaagctggggcgtgtcctcattgatgggggagcagccctcaacatcctttcccccgcagcctttgacgccatcaaggccccggggatggtgctccggccgtcccagccgattatcggtgtgacgccggggcacacttggccgctaggtcatatcgacctcccggtcaccttcggtggatccgccaacttccgcacggaacgggtgaactttgatgtggcggacctcagtctgccctacaacgcggtcctagggaggcccgcgttggtgaagttcatggcggcggtccattacgcctacctccagatgaagatgccgggccccggtggccccatctctgtccatggcgacctcaaagtcgcgctcgcttgtatggagcagcgcgcggaccacctcgccgctgcgtccaagcccgagggtggcgacgagaggcttggcacctccgtccccgccgccccgaggcagcggatagtcacgtgcgacgaggtcccggaagacgcgctcgtctccttcctgcgggcaaacgctgacatcttcacatggagaccggcggatatgcccggggtccctagggaggtgattgagcaccgtctcgccgtgcggccgggcgcaaagccggtccggcagaaagtgcgccggcaggccccggaacgtcaagctttcatccgcgaggaggtggcgcgacttctggaggccggattcatccgcgaggtcatccatccggagtggctggcgaacccggtggtcgttcccaaggcgaacggcaagcttcggatgtgcatcgactacaccgaccttaacaaggcatgtcctaaggacccttacccccttcctcgcatagatcagattgtcgactccacagcggggtgcgaccttttgtgttttctagatgcatactctggttaccatcagattcgcatggctagggaggatgaggaaaaaactgcgttcattacccccataggaacttattgttatacgacaatgccattcgggttaaagaatgcaggtcctacttttcaacgtactactcgaatttctttgggtagccaaataggacgtaatgttgaggcttatgtcgatgacttggttgtgaagacccgcgaccgagaaactttactttcagatctggcggaaactttcgagagtctccgctccacctgcataaagctgaaccccgataagtacgtgttcggtgtacctgcgggcaagcttctcgggttcttggtctctgcccgaggcattgaggccaaccccgagaagatacgagctatagaacggatgcgcccccccagcaagcttagggatgtgcaatgcgtcaccggttgcatggccgccctaagtcggttcatatcgaggctgggagagaaggcgctacccttatttaagctcctcaaacgctccgggccgtttacctggacggaggaagctgaacgtgccctcactcagttgaaggcgtatcttagctctcccccagttctggtcgccccggagccaggtgaacccttgctactctacttagcggcgaccccgcaggtagttagtgcggcgttagttgtggagcgcgatgaggacaaccctcattccgcgcatccccaccctgtgttggcttggcccgggagagagcagggaggagaggctcccgagccgaacggtggcccaaggcccccgacgaccggagctggccctctgcccgcttgtcagacggtgccaggtgcccccgacccccaggatggcccgggggccactgcgggaaggccgcacctatcgccctctgaccccgaggttaaccctgtgccgactcgacccgggagagagcagggagaagaggcccccgagccgaacggtggcctaaggctcccgatgaccggggttgaccctttgcccgcttgtccgacgacgccaggagcccccgacccccaggacggccctgaggccactgtgggaaggccgcacctgtcgtcctccgaccccgaggtcgtcagcacagaagacaagtgcgccccgcgaggccgcttggacgaagagcgccccagggatgcgacccctggcgaagaggatcggccccaccgaaaggtgcagcggcccgtctactttgttagtgaggccctccgggacgccaagacccgataccctcaggtccagaagatgctttacgctattatgatggcttcgaggaaactgcgccattattttcaggcgcatcgggtcacggtggttacgtcttaccccctcgcccaaatcttgcataatcgagagggtacaggacgggtggtgaaatggacaattgaactttctgagttcgatttgcactttgaaccacgtcacgctatcaagagccaggccctcgccgattttgtggcagagtggaccccggctcccgagcccgtctcagtccccgaggccagctcgggcccctcgcagctgcctcacaccgcccactgggtgatgcagttcgacggctccctgtctcttcagggcgccggtgcgggggtcatattgacctcaccgagcggagacgtcctcagatacctggttcgccttgactttcgggcgaccaataatatggcagagtacgagggactccttgcgggactcagggtggcagctggactggggatccgccgcctcctggtgttaggcgactcccagctagtggttaaccaggtctgtaaggaataccggtgctctgacccgcagatggatgcttacgtacgccaagtacgacgtatggagcgccatttcgacgggatagagcttcggcatgtgcccagacgggataacacgattgccgacgaactctcacggctcgcttcctcacgagcccagaccccaccgggcgcctttgaagaaaggcttgcccagccatcggcgcgacctgaccccttaggggagacggacgcacctgaccggcccccgaggcccgtcggagtccaggcctcgggacccgaggggagcgctcccagctcccttagattgattgcttggatcgttaagatccaagcatacctcacagataagactctacccgaggaccgcgaaggaagtgaacgcgtccagcgcatctccaaacgctacgtgctgatagaagggaccctctatcggcgcgcggctaacggaatcctcctgaagtgcattcctcgggaacaaggcgtcgagcttcttgctgatatccatgaaggcgaatgcggagcccactccgcctcgcgcaccttggttggcaaagcctttcgtcaaggtttctattggccaacagctctcaatgatgcggtcgacctggtccggcgatgcagagcgtgtcagttccacgccaagcaaatccatcagccggcccaggcactgcagatcattccactttcatggccgtttgctgtctgggggctcgatatcctgggtccgtttaggcgggccccgggcgggtttgagtatctgtatgtcgcgatcgacaagttcactaagtggcccgaggcttatccggtcgtcaagatcgataagcactccgcacttaaattcattaagggcatcacagcccggtttggggtgcctaaccgtattattacggataacggcacccaattcactagtgagcttttcggtgactactgcgaagacatgggcattaaactctgcttcgcctcacccgcccaccccagaagcaatggccaagtggagcgcgccaatgcggaaatcctcaaaggccttaaaaccaagaccttcaacatcctcaagaagcacgacgattcgtggatcgaggagttgccagcagtgctctga

SEQ ID NO: 99790 - DNA, 249 bp, Oryza sativa
  Clone ID: PAT_MRT4530_97569C.1
ttctatttgaccgcgcggccggctgccctcagctgcgggtagaaacggcaacacgagagcttcctttaacacgggcaggaccctcccgcgccggccattgctctgctcgccagaggctgctgcgcttccaacgattggaatcccgcacgacggaacgccgacattcagaagtgctgccatgcataccggacaggaagagtctgcgccactaccccaaagggatcttacctgacgctgcttaacaacctc

SEQ ID NO: 99791 - DNA, 1791 bp, Oryza sativa
  Clone ID: PAT_MRT4530_9756C.1
atgtcggccagcaaatccactcactgggacgaaatcggcatatcccaagctttggcattaactgcagctaatatggcaagggatgaacccatgatggcagcatccacctacttctggtccactgctatgaatgccttcttattctcacaaggactgatgaccgcaactctgctagatgttaccatgattactggcctagatatcacctcatcagctaacctgtccagcctcaacaaccaactcacccatgagttcaaaaccagaagcattggaggctggagttgctacatggctaagtatatgggaactgggccagtaacccaaagagaacacacagcttttatcatgatgtggttagaaaaattcttattcggtggcccaagttgtggtccaactgcaaactggcaaaggatagctgaaaacctggtagaaaagaaacactttcctcttgccaagtatctacttggctatctatatcaaaccctcaatactgcaactgacaagatagcctctggaaaaacgatcggtacaggagggccacctctaggcagtattgataatatcaagtttaggatgctgagaagtacagccttcgaccgatggtgggtagaatggaaaaaacacctattccatcaatcggcatccatgtatctcgctggccttttccctgatgagatccctcagacaacagaatcttctcctccccaacaaagcaaaagtggtgttgagatcgcatatgctccaggactccttcccaatggtggtggactaacacctcctgtcatcggctataatgcccccaagacttctacactactacatggcctatctcacgtgccgatcatccttactgctagaagaaaaagagcaaaatcggctactgcactatcggctgtaaagaataagcctcagaaacagaagaccaccaccgatgataaaccaaagattgctgccgacgatctgccagccatagatcctgatgtagcagacttcttagaagatgaagcaatgtctgaagaggtgaatgaagcaactgatgttgttagtgaaacaagggaacaaacgcctccagccgatccacctggtcaacagaaaacaccacctcctccagttctaggtgatatgttctcttttgatattagtcaattcttgcatgaagaagaaaccacaagccaagctttagttcctttagccgatgacctcaagtcaaccctcttagatatgtcaaaaagacttgaaggctccctggaaactctggtgacaagttgcggatccatccaggatagattcaacgaaatccatgacaaaattccagatgagctagccgatgtctttactccagcagtctatcttgaacagcatcggctcaagcttgaaaaggctaaaaacagaatggccgatcgtctcgagagaagggatctggaagccactatccaagccaacagggtatccattaatgaagaaaaagctaaacttgatgaactggagggcggtctagattctattcaaaccaacatcgatcggctgaacgctcgtaagatagatcttttggctgaattggaacaatgcaatgcacagattgctattgagcagaaaaaacttgaagacttgccaaaagctattgaagatcaaaaatcaaagttgaaggcgtctgtcaaacatttggctgaattaatcaaatccttgaagccgattccaagttctgatgcagctgatgccaggatgatagatgaagtagatcaaatcaagcataaggccatatcaggtatccagaaatatgtatctagctga

SEQ ID NO: 99792 - DNA, 5988 bp, Oryza sativa
  Clone ID: PAT_MRT4530_97570C.1
atggccgaacaagcaaaggcgcacaacctctctccgagtgttagcggtgacgacggggagccgaacccacgccgtcgagctcgtactccaccgccccctccacgccaaagtcctaggcgggaggaggcgctcgagagggtcgaaggatccgcgacttcgacatccacgggtgatggggaagggcggcgagatggggagcgtcgcctcctcgtctacggcgacggcagcacgccccagggcgcgctcctacgtcacccgcccattgtccctgacccggagtctccagcccaacgttggctggacgacatggccaacttggtcatgacggcgcagcagcgcctagatgctggtgggcggtcctccgccaccaagacctctggtactgctaccaccggctccgcgtcgtcaagacggagggcgcggcgagcagcggccgctgttcgctattcggccgtcactccttcgtcagcgcctccgacccgggaagatcttcgtggggggccggatgcccgcatcagtatcgagcgccggcataatggccgacgtgctgcccacgcaacggagggcgcctcctcgtccggagtgtcacctcaacacggacgcggggatcagccctccgtgcccccggttggtggtgtcggctgtagagcctttgtggcgagccttcggaacgtccgttggcccccaaggttccggcccaccatcgccgaaaaatatgacgggagcgtcaaccccgccgagtttctccaggtctacacgaccgggatcgaggccgccgggggtgacgacagggtcatggcgaatttctttcccatggccctgaagggacaggcgcggggttggctaatgaacttgccacccgcgtccgtccactcttgggaggacttgtgccaacagttcaccatgaactttcaaggcacatatccgcgtccaggtgaggaagcggacttgcacgcagtacagcgaagggatgatgagtcacttcgctcatatattcagcggttctgtcaagtccgcaacaccataccatgcatccctgcacacgcggtgatctacgcgtttagggggggtgtgcggcacaaccgcatgctcgaaaagatcgcctccaaggagccccagactaccgcagagctttttcagctcgcggaccgagtggctcgtaaggaggagtcatggacctggaacccctccggttccggtgtggcagcttcggccgcccccggatccgctgctcggacagggcggcgtgacaggaggaggaagaaaaggtcagcccattccgacgacgagggtcatgtcctcgccgtcgagggtgcttcgcgggccacccgaaaggggaggcctgcgagcgacaaaaaggaggccagcgctcccagcagggagcgcccaaccggcaagtggtgcaccgtccacaacacctcccttcacgacctcgcggactgccgtgtagtcaaaagtttggctgagcggacgaggaagtgggaggaggagaggaggcaggagcgccgagagggcaagtcctcggcggttccttccggcaatcggcgaagagaggccaaacagaaggcccccgccgaggacatcgatgacggcgatgatgacctgggtttccaagagcctggggccaccattgccactgtcgatgggggagcgtgtgctcacgtttctcgccggagcctcaaggccatgaagcgagagcttctggccgcggcccctactcatgaggcgacgcgccgggcgcggtggtcggaggttgccctcaccttcgaccagaccgaccacccatcgtgcgttgcccggggaggacaggtcgcaatggtggtttcccccactgtttgcaacgtgaagctggggcgtgtcctcattgatgggggagcagccctcaacatcctttcccccgcagcctttgatgccatcaaggccccggggatggtgctccggccgtcccagccgattatcggtgtgacgccggggcacacttggccgctaggtcatatcgacctcccggtcaccttcggtggatccgccaacttccgcacggaacgggtgaactttgatgtggcggacctcagtctgccctacaacgcggtcctagggaggcccgcgttggtgaagttcatggcggcagtccattacgcctacctccagatgaagatgccgggccccggtggccccatctctgtccatggcgacctcaaagtcgcgctcgcttgtatggagcagcgcgcggaccacctcgccgctgcgtccaagcccgaggatggcgacgagaggcttggcacctccgtccccgccgccctgaggcagcggatagtcacgtgcgatgaggtcccggaagacgcgctcgtctccttcctgcgggcaaacgctgacgtcttcacatggagaccggcggatatgcccggggtccccagggaggtgattgagcaccgtctcgccgtgcggccgggcgcaaagccggtccggcagaaagtgcgccggcaggccccggaacgtcaagctttcatccgcgaggaggtggcgcgacttctggaggccggattcatccgcgaggtcatccatccggagtggctggcgaacccggtggtcgttcccaaggcgaacggcaagcttcggatgtgcatcgactacaccgaccttaacaaggcatgtcctaaggacccttacccccttcctcgcatagatcagattgtcgactccacagcggggtgtgaccttttgtgttttctagatgcatactctggttaccatcagattcgcatggctagggaggatgaggaaaaaactgcgttcattacccccataggaacttattgttatacgacaatgccattcgggttaaagaatgcaggtcctacttttcaacgtactactcgaatttctttgggtagccaaataggacgtaatgttgaggcttatgtcgatgacttggttgtgaagacccgcgaccgagaaactttactttcagatctggcggaaactttcgagagtctccgctccacccgcataaagctgaaccccgataagtgcgtgttcggtgtacctgcgggcaagcttctcggcaagcttagggatgtgcaatgcgtcaccggttgcatggccgccctaagtctgttcatatcgaggctgggagagaaggcgctacccttatttaagctcctcaaacgctccgggccgtttacctggacggaggaagctgaacgtgccctcactcagttgaaggcgtatcttagctctcccccagttctggtcgccccggagccaggtgaacccttgctactctacttagcggcgaccccgcaggtagttagtgcggcgttagttgtggagcgcgatgaggacaaccctcattccgcgcatccccaccctgtgttggcttggcccgggagagagcagggaggagaggctcccgagccgaacggtggcccaaggcccccgacgaccggagctggccctctgcccgcttgtcagacggtgccaggtgcccccgacccccaggatggcccgggggccactgcgggaaggccgcacctatcgccctctgaccccgaggttaaccctgtgccgactcgacccgggagagagcagggagaagaggcccccgagccgaacggtggcctaaggctcccgatgaccggggttgaccctttgcccgcttgtccgacgacgccaggagcccccgacccccaggacggccctgaggccactgtgggaaggccgcacctgtcgtcctccgaccccgaggtcgtcagcacagaagacaagtgcgccccgcgaggccgcttggacgaagagcgccccagggatgcggcccctggcgaagaggatcgaccccaccgaaaggtgcagcggcccgtctactttgttagtgaggccctccgggacgccaagacccgataccctcaggcccagaagatgctttacgctattctgatggcttcgaggaaactgcgccattatttccaggcgcatcgggtcacggtggttacgtcttaccccctcgcccaaatcttgcataatcgagagggtacaggacgggtggtgaaatggacaattgaactttctgagttcgatttgcactttgaaccacgtcacgctatcaagagccaggccctcgccgattttgtggcagaatggaccccggctcccgagcccgtctcagtccccgaggccagctcgggcccctcgcagctgcctcacaccgcccactgggtgatgcagttcgacggctccctgactcttcagggcgccggtgcgggggtcatattgacctcaccgagcggagacgtcctcagatacctggttcgccttgactttcgggcgaccaataatatggcagagtacgagggactccttgcgggactcagggtggcagctggactggggatccgccgcctcctggtgttaggcgactcccagctagtggttaaccagatctgtaaggaataccggtgctctgacccacagatggatgcttacgtacgccaagtacggcgtatggagcgccatttcgacgggatagagcttcggcacgtgcccagacgggataacacgattgccgacgaactctcacggctcgcttcctcgcgagcccagaccccaccgggcgcctttgaagaaaggcttgcccagccgtcggcgcgacctgaccccttaggggagacggacgcgcctgaccggcccccgaggcccgtcggagtccaggcctcgggacccgaggggagcgctcccagctcccttagattgattgcttggatcattgagatccaagcatacctcacagataagactctacccgaggaccgcgaaggaagtgaacgcgtccagcgcatctccaaacgctacgtgctgatagaagggaccctctatcggcgcgcggctaacggaatcctcctgaagtgcattcctcgggaacaaggcgtcgagcttcttgctgatatccatgaaggcgaatgcggagcccactccgcctcgcgcgccttggttggcaaagcctttcgtcaaggtttctattggccaacagctctcaatgatgcggttgacctggtccggcgatgcagagcgtgtcagttccacgccaagcaaatccatcagctggcccaggcactgcagatcataccactttcatggccgtttgctgtctggggactcgatatcctgggaccgtttaggcgggccccgggcgggtttgagtatctgtatgtcgcgatcgacaagttcactaagtggcccgaggcttatccggtcgtcaagatcgataagcactccgcacttaaattcattaagggcatcacagcccggtttggggtgcctaaccgtattattacggataacggcacccaattcactagtgagcttttcggtgactactgcgaagacatgggcattaaactctgcttcgcctcacccgcccaccccagaagcaatggccaagtggagcgcgccaatgcggaaatcctcaaaggccttaaaaccaagaccttcaacatcctcaagaagcacggcgattcgtggatcgaggagttgccagtagtgctctgggcaaaccgaaccacaccaagccgagcaaccggggaaacgccttttttcctcgtctacggcgcggaggcggttctcccatccgagctcaccctgaagtcccctcgggccaccatgtactgcgaggctgatcaagatcagcttcgcagagatgacctcgactacttggaagagcgaaggcggcgcgcggccctccgagccgcacgctaccagcagagcctgcggcgctaccatcagcgccacgtccgggcacgatcactctgcgtcgacgacctcgtcctacgccgcgtccaaacacgtgctggattgagcaagctctcaccaatgtgggagggtccgtatcgagtgatcggcgtcccccgaccgggctccgttcggctggccacgggcgacggcacagagctgcctaacccgtggaacatcgaacaccttcgtcgcttctacccctaa

SEQ ID NO: 99793 - DNA, 3702 bp, Oryza sativa
  Clone ID: PAT_MRT4530_97571C.1
atggccgaacaagcaaaggcgcacaacctctctccgagtgtgagcggtgacgacggggagccgaacccacgccgtcgagctcgtactccaccgccccctccacgccaaagtcctaggcgggaggaggcgctcgagagggtcgaaggatccgcgacttcgacatccacgggtgatggagaagggcgccgagatggggagcgtcgcctcctcgtctacggcgacggcagcacgccccagggcgcgctccaagctgcgggcgcgctcctgcgtcacccgcccgtcgtccctgacccggagtctccagcccaacgttggctggacgacgtggccattttggtcatgacggcgcggcagcgcctagatgctggtgggcggtcctccgccaccaaggcctctgcctttgtggcgagccttcggaacgtccgttggcccccaaggttccggcccaccatcgccgaaaaatatgacggaagcgtcaaccccgccgagtttctccaggtctacgcgaccgggatcgaggccgccgggggtgacgacagggttatggcgaatttctttcccatggccctgaagggacaggcgcggggttggctaatgaacttgccacccgcgtccgtccactcttgggaggatttgtgccaacagttcaccatgaactttcaaggcacatatccgcgcccaggtgaggaagcggacttgcacgcagtacagcgaagggatgatgagtcacttcgctcatacattcagcggttctgtcaagtccgcaacaccataccatgcatccctgcacacgcggtgatctacgcgttcagggggggtgtgcggcacaaccgcatgctcgaaaagatcgcctccaaagagccccagactaccgcggagctttttcagctcgcggaccgagtggctcgtaaggaggaggcatggacctggaacccctccggttccggtgtggcagcttcggccgcccccggatccgctgctcagacagggcggcgtgacaggaggaggaagaagaggtcagcccattccgacgacgagggtcatgtcctcgccgtcgagggcgcttcgcgggccacccgaaaggggaggcctgtgagcgacaaaaagaaggaggccggcgctcccagcagggagcgcccaaccggcaagtggtgcaccgtccacaacacctcccttcacgacctcgcggactgccgcgcagtcaaaagtttggctgagcggacgaggaagtgggaggaggagaggaggcaggagcgccgagtgggcaagtccccggcggttccttccggcaatcggcgaagtgaggccaagcaaaaggcccctgccgaggacatcgatgacggcgatgatgacctaggtttccaagagcctggggtcaccattgccactgtcgatgggggagcgtgtgctcacgtttctcgccggagcctcaaggccatgaagcgagagcttctggccgcggcccctactcatgaggcgacgcgccgggcgcggtggtcggaggttgccctcaccttcgaccagaccgaccacccaccgtgcgttgcccggggaggacagatcgcaatggtggtttcccccactgtttgcaacgtgaagctggggcgtgtcctcattgatgggggagcggccctcgacatcctttcccctgcagcctttgacgccatcaaggccccggggatggtgctccggccgtcccagctgattattggtgtgacgccggggcacacatggccgttaggtcatatcgacctaccggtcaccttcggtggatccgccaacttccgcacggagcgggtaaacttcgatgtggcggacctaagtctgccctacaacgcggtcctagggaggcccgcgttggtgaagttcatggcggcggtccattacgcctacctccagatgaagatgccgggccccggtggccccatctctgtccatggcgacctcaaagtcgcgcttgcttgtatggagcagcgcgcggaccacctcgccgccgcgtccaagcccgagggtggcgacgagaggcttggcacctccgtccccgccgccccgaggcagcggatgatcacatgcgacgaggtcccggaagacgcgctcgtctccttcctgcgggcaaacgctgacgtcttcgcatggagaccggcggatatgcccggggtccccagggaggtgattgagcaccgtctcgccgtgcggccgggcgcaaggccggtccggcagaaagtgcggcggcaggccccggaacgtcaagccttcatccgcgaggaggtggcgcgacttctggaggccggattcatcctcgaggtcatccatccggagtggctggcgaacccggtggtcgttcctaaggcgaacggcaagcttcggatgtgcatcgactacaccgaccttaacaaggcatgtcctaaggacccttaccccctgcctcgcatagatcagattgtcgactccaccgcggggtgcgaccttttgtgttttctagatgcatactctggttaccatcagattcgcatggctagggaggatgaggaaaaaactgcattcattacccccataggaacctattgttatacgacaatgcccttcgggttaaagaatgcaggtcctacttttcaacgtactactcgaatttctttgggtagccaaataggacgtaatgttgaggcttatgtcgatgacttggttgtgaagacgcgcaaccaagagaccttactctcggatctagcggaaacttttgaaagtctccgctccgcccgcataaagctgaaccccgataagtgcgtgttcggtgtacctgcgggcaagcttctcggcaaacttagggatgtgcaatgcgtcaccggttgcatggccgccctaagtcggttcatatcgaggctgggagagaaggcgctacccctatttaagctcctcaaacgctccgggccgtttacttggacggaggaagctgaacgtgccctcactcagttgaaggcgtatctcagctctcccccggttctggtcgccccggagccagatgagcccttgctactctacttagcggcgaccccgcaagtagttagtgcagcgttggttgtggagcgcgatgaggacaatcctcattccgcgcatccccaccctgtgctggcttggcccgggagagagcagggaggagaggcccccgagccgaacggtggcccaaggcccccgacgaccggagctggccctctgcccgcttgtcagacggtgccaggtgcccccgacccccaggatggcccggaggccactgcgggaaggccgcacctatcgccctctgaccccgaggctaaccctgtgccgactcgacccgggagagagcagggaggagaggcccccgagccgaacggtggcccaaggcccccgacgaccggagctggccctctgcccgcttgtccgacgacgccaagagcccccgacccccaggacggccccgaggccactgtgggaaggccgcccctgtcgtcctccgaccccgaggtcatcggcacagaagacgagtgcgccccacgtggccgcttggacgaagagcgccccaaggatgcggcccctagcgaagaggatcggccccaccgaaaggtgcagcggcccgtctactttgttagtgaggccctccgggacgccaagaacccgataatggagctgctatctaattcctgcgccccagatcagtctgacattcgttag

SEQ ID NO: 99794 - DNA, 1374 bp, Oryza sativa
  Clone ID: PAT_MRT4530_97572C.1
atggcggcagcggcggtggcgcggctcactgcggcgacgacgtgccggatgcgcgtcagtggcccggtcactgccgcgacgacgtcggctgcctcgccggtgaccgtcactctgggtgatctgccacagcagaagcgatcggccgccacggcgacgacgacgacgagtagtggtggttctcctgtggtggtggagaagagagcggcggcggcgacggcggcggaggaggaggaggtggaggaggcggcggcggtggcggcgctggcgagcgcgtggcgggaggtgcagggcgccggcgactggaggggcatggtggagccgctccacccgctgctccgggacgaggtggtccggtacggggagctcgtcgcggcgtgctaccgggcgttcgacctcgacccggcgtcgaagcgctacctcaactgcaagcacggcaagaagcagatgctgccggcggtcggcatggccggcgccgggtacacggtcaccaggtacatctacgccgcccccgacgtcgcgctgcccttcggcgtcggcggccgctgctcctgcgccggcaagagccggtggatcggctacgtcgccgtcgcgtccaaccgcgaggccgcccgcctcggccgccgcgacatcctcgtctccttccgcggcacggtgaccggatcggagtggctggccaacttcatgagcgcgctgtcgccggcgcggttcgacccggccgacccgcgccccgacgtgcgcgtcgagtccgggttcctctccctctacacctccgacgacctctccggcaagttcacctgcgggagctgccggaaccagctcctctccgaggtgacccgcctcatcgacaagtacaagcacgacgacgtcagcatcaccctcgccggacacagcatggggagctcgctggcgatcctcctcggctacgacctcgccgagctgggcctcaaccgcggcggccgcggcggccgcggcggcgccatcccgatcaccgtcttctccttcggcggcccgcgcgtcggcaacctcgagttcaagagacggtgcgatgagctccgcgtcaaggtgctccgcgtcgcgaacgcccgcgacccggtgacgaggatgcccggcgtggtgctcaacgaggccgccgctagggttttccgggtcgagctgccgtggagcaaggcgtgctacacccacgtcggcgtcgaagtcgccctcgatttcttcaaggccagccacgcggcgtgcgtccacgacctcgacgcctacataaatcacctcctcgacggcggcgcggcggcgtcggcgacgacgacgaccttggagtcgtggaggtggcagatggcggcgattcgtgcaggcgagtggctgcagacgctagggatttga

SEQ ID NO: 99795 - DNA, 5871 bp, Oryza sativa
  Clone ID: PAT_MRT4530_97573C.1
atggccgaacaagcaaaggcgcacaacctctctccgagtgttagcggtgacgatggggagccgaacccacgccgtcgagatcgtactccaccgccccctccacgccaaagtcctaggcgggaggaggcgctcgagagggtcgaaggatccgcgacttcgacatccacgggtgatggggaaggacggcgagatggggagcgtcgcctccttgtctacggcgacggcagcacgccccagggcgcgctccaagctgcgggcgcgctcctacgtcacccgcccattgtccctgacccggagtctccagcccaacgttggctggacgacgtggccaacttggtcatgacggcacggcagcgcctaggtgctggtgggcggtcctccgccaccaagacctctggcgctgctaccaccggctccgtgtcgtcaaggcggagggcgcggcgagcggcggctgttgctcgccattcagccgccactccttcgtcagcgcctccgacccaggaagatctgcgtggggggccggatgcccgcatcagtatcgagcgctggcgtaatggccggcgtgctgcccacgcaacggagggcgcctcctcgtccggagtgtcacatcaacacggacgcggggatcagccctccgtgcccccggttggtggtgtcggctgtagagcctttgtggcgagccttcggaacgtccgttggcccccaaggttccggcccaccatcgccgaaaaatatgacgggagcgtcaaccccgccgagtttctccaggtctacacgaccgggatcgaggccgccgggggtgacgacagggtcatggcgaatttctttcccatggccctgaagggacaggcacggggttggctaatgaacttgccacccgcgtccgtccactcttgggaggatttgtgccaacagttcaccatgaactttcaaggcacatatccgcgcccaggtgaagaagtggacttacatgcagtccagcgaagggatgttgagtcacttcgctcatacattcagcggttctgtcaagtccgcaacaccataccatgcatccctgcacacgcggtgatctacgcgttcaggggggcttcggccgcccccggatttgctgctcagacagggcggcatgacaggaggaggaagaagaggtcagcccattccgacgacgagggtcatgtcctcgccgtcgagggcgcttcgcgggccacccgaaaggggaggcctgcgggcgacaaaaagaaggaggccggcgctcccagcagggagcgcccaaccggcaagtggtgcatcgtccacaacacttcccttcacgacctcgcggactgccgcgcagtcaaaagtttggctgagcggacgaggaagtgggaggaggagaggaggcaggagcgccgagagggcaagtccccggcggttccttccggcaatcggcgaagtgaggccaagcagaaggcccccgtcgaggacatcgatgacggcgatgatgacctaggtttccaagagcctggggccaccattgccactgtcgatgggggagcgtgtgctcacgtttctcgccggagcctcaaggccatgaagcgagagcttctggccgcggcccctactcatgaggcgacacgccgggcgcggtggtcggaggttgccctcaccttcgaccagaccgaccacccaccgtgcgttgcccggggaggacagatcgcaatggtggtttcccccactgtttgcaacgtgaagctggggcgtgtcctcattgatgggggagcagccctcaacatcctttcccccgcagcctttgacgccatcaaggccccggggatggtgctccggccgtcccagccgattatcggtgtgacgccggggcacacttggccgctaggtcatatcgacctcccggtcacctttggtggatccgccaacttccgcacggagcgggtgaactttgacgtggcggacctcagtctgccctacaacgcggtcttggggaggcccgcgttggtgaagttcatggcggcggtccactacgcctacctccagatgaagatgccgggccccggtggccccatctctgtccatggcgacctcaaagtcgcgcttgcttgtatggagcagcgcgcggaccacctcgccgccgcgtccaagcccgagggaggcgacgagaggcttggcacccctgcccccgccgccccgaggcagtggatagtcacatgcgacgaggtcccggaagacgcgctcgtctctttcctgcgggcaaacgctgacgtcttcgcatggagaccggcggatatgcccggggtccccagggaggtgattgagcaccgtctcgccgtgcggccgggcgcaaggccggtccggcagaaagtgcggcgccaggccccggaacgtcaagccttcatccgcgaggaggtggcgcgacttctggaggccggattcatccgcgaggtcatccatccggagtggctggcgaacccgatggtcgttcccaaggcgaacgacaagcttcggatgtgcatcgactacaccgaccttaacaaggcatgtcctaaggacccttaccccctgcctcgtatagatcagattatcgactccacagcggggtgcgaccttttgtgttttctagatgcatacttgggttaccatcagattcgcatggctagggaggatgaggaaaaaactgcattcattacccccataggaacttattgttatacgacaatgcccttcgggttaaagaatacaggtcctacttttcaacgtactactcgaatttctttgggtagccaaataggacgtaatgttgaggcttatgtcgatgacttggttgtaaagacgcgcaaccaagagaccttactcttggatctagcggaaacttttgagagtctccgctccgcccgcataaaactgaaccccgataagtgcgtgttcggtgtacctgcgggcaagcttctcggcaagcttagggatgtgcaatgcgtcaccggttgcatggccgccctaagtcggttcatatcgaggctgggagagaaggcgctacccttatttaagctcctcaaacgctccgggccgtttacttggacggaggaagctgaacgtgccctcactcagttgaaggcgtatctcagctctcccccagttctggtcgccccggagccaaatgaacccttgctactctacttagcggcgaccccgcaagtggttagtgcggcgttggtggtggagcgcgatgaggacaatcctcattccgcgcacccccaccctgtgctggcttggcccgggagagagccgggaggagaggcccccgagccgaacggtggcccaaggcccccgacgaccggagcaggccctctgcccacttgtcagacggtgccaggtgcccccgacccccaggatggcccgagggccactgcgggaaggccgcacctatcgccctctgaccccgaggctaaccctgtgccgactcgacccgggagagagcagggagaagaggcccccgagccgaacggtggcctaaggcccctgacgaccggagttggccctttgcccgcttgtccgacaacgccaggagcccccgacccccaggacggccccgaggccactgtgggaaggccgcccctgtcgtcctccgaccccgaggtcgtcggcacagaagacgagtgcaccccgcgaggccgcttggacaaagagcgccccagggatatggcccctagcgaagaggatcggccccaccgaaaggtgcagcggcccgtctactttgttagtgaggccctccgggacgccaagacccgataccctcaggcccagaagatgctttacgctattctgatggcttcgaggaaactgcgccattatttccaggcgcatcgggtcacggtggttacgtcttaccccctcggccaaatcttgcataatcgagagggtactggacgggtggtgaaatgggcaatcgaactttctgagtttgatttgcactttgaaccacgccacactatcaagagccaggccctcgccgattttgtggcagagtggaccccagctcccgagcccgtctcagtccccgaggccagctcgggcccctcgcagccgcctcacaccgcccactgggtgatgcagttcgacggctccctgtctcttcagggcgccggtgcgggggtcacgttgacctcgccgagcggagacgtcctcagatatttggttcgccttgactttcgggcgaccaataatatggcagagtacgagggactccttgcgggactcagggtggcagctggactggggatccgccgcctcctggtgttaggcgactcccagctggtcgttaaccaggtctgcaaggagtaccggtgctatgacccgcagatggacgcttacgtgcgccaagtacggcgtatggagcgccattttgacgggatagagcttcggcacgtgcccagacgggataacacggttgccgacgaactctcacggctcgcttcctcgcgagcccagaccccaccgggcacctttgaagaaaggcttgcccagccgtcggcgcgacccgaccccttaggggagacggacgtgcctgacaggcccccgatgcccgtcggagtccaggcctcgggacccgaggggagcgctcctagctcccttagattgattgcttggatcgctgagatccaagcatacctcacagataagactctacccgaggaccgcgaagggagtgaacgcgtccagcgcatctccaaacgctacgtgctggtagaagggaccctctatcggcgcgcggctaacggaatcctcctgaagtgcattcctcgggaacaaggcgtcgagctttttgccgatattcatgaaggcgaatgcggagcccactccgcctcgcgcaccttggttggcaaagcctttcgacaaggtttctattggccgacagctctcaatgatgcggtcgacctggtccggcgatgcagagcgtgtcaattccacgccaagcaaatccatcagccggcccaggccctgcagatcataccactttcatggccatttgctgtctgggggctcgatatcctgggaccgtttaggcgggccccgggcgggtttgagtatctgtatgtcgcgatcgacaagttcactaagtggcccgaggcttatccggtcgtcaagatcgataagcactccgcacttaaattcattaagggcattacagcccggtttggagtgcctaaccgtattattacggataacggcacccaattcactagtgaacttttcggcgactactgcgaagacatgggcatcaagctctgcttcgcctcacctgcccaccccagaagcaacggccaagtggagcgcgccaatgcggaaatcctcagaggccttaaaaccaagaccttcaacatcctcaagaagcacggcgattcgtggatcgaggagttgccagcggtgctctgggcgaaccgaaccacgccaagccgagcaaccggggaaacgcctttcttcctcgtctacggcgtggaagcggttctcccatccgagctcaccctgaggtcccctcgggccaccatgtactgcgaggctgatcaagatcagattcgcagagatgacctcgactacttggaagagcgaaggcggcgcgcgtccctccgagccacgcgctaccagcaaagcctgcggcgctaccatcagcgccacgtccgggcccgatcactctgcgtcgacgacctcgtcctacgccgcgtccaaacgcgtgctggattgagcaagctctcaccaatgtgggagggtccgtatcgagtgatcggtgtcccccagccgggctccgttcggctggccacgggcgacggcacagagctgcctaacccgtggaacatcgaacaccttcgtcgcttctacccctaa

SEQ ID NO: 99796 - DNA, 5955 bp, Oryza sativa
  Clone ID: PAT_MRT4530_97574C.1
atggccgaacaagcaaaggcgcacaacctctcttcgagcgttagtggtgacgaaggggagccaaacccacgccgtcgagctcgtactccaccgccccctccacgccaaagtcctaggcgggaggaggcgctcgagagggtcgaaggatccgcgacttcgacatccacgggtgatggggaagggcggcgagatggggagcgtcgcctcctcgtctacggcgacggcagcacgccccagggcgcgctccaagctgcgggcgtgctcctacgtcacccgcccattgtccctgacccggagtctccagcccaacgttggctggacgacgtggccaacttggtcatgacggcacggcagcgcctaggtgctggtgggcggtcctccgccaccaagacccctggcgctgctaccaccggctccgtgttgtcaaggcggagggcgcggcgagcggcggctgttgctcgccattcagccgccactccttcgtcagcgcctccgacccaggaagatctgcgtggggggccggatgcccgcatcagtatcgagcgccggcgtaatggccggcgtgctgcccacgcaacggagggcgcctcctcgtccggagtgtcacatcaacacggacgcggggatcagccctccgtgcccccggttggtggtgtcggctgtagagcctttgtggcgagccttcggaacgtccgttggcccccaaggttccggcccaccatcgccgaaaaatatgacgggagcgtcaaccccgccgagtttctccaggtctacacgaccgggatcgaggccgccgggggtgacgacagggtcatggcgaatttctttcccatggccctgaagggacaggcacggggttggctaatgaacttgccacccgcgtccgtccactcttgggaggatttgtgccaacagttcaccatgaactttcaaggcacatatccgcgcccaggggggggtgtgcggcacaaccgcatgctcgaaaagatcgcctccaaagagccccagactaccgcggagctttttcagctcgcggaccgagtggctcgtaaggaagaggcatggacctggaacccctccggttccggtgtggcagcttcggccgcccccggatccgctgctcagacagggcggcgtgacaggaggaggaagaagaggtcagcctataccgacgacgagggtcatgtcctcgccgtcgagggcgcttcgcgggccacccgaaaggggaggcctgcgggcgacaaaaagaaggaggccggcgctcccagcagggagcgcccaaccggcaagtggtgcatcgtccacaacacttcccttcacgacctcgcggactgccgcgcagtcaaaagtttggctgagcggacgaggaagtgggaggaggagaggaggcaggagcgccgagagggcaagtccccggcggttccttccggcaatcggcgaagtgaggccaagcagaaggcccccgccgaggacatcgatgacggcgatgatgacctaggtttccaagagcctggggccaccattgccactgtcgatgggggagcgtgtgctcacgtttctcgccggagcctcaaggccatgaagcgagagcttctggccgcggcccctactcatgaggcgacgcgccgggcgcggtggtcggaggttgccctcaccttcgaccagaccgaccacccaccgtgcgttgcccggggaggacagatcgcaatggtggtttcccccactgtttgcaacgtgaagctggggcgtgtcctcattgatggaggagcagccctcaacatcctttcccccgcagcctttgacgccatcaaggccctggggatggtgctccggccgtcccagccgattatcggtgtgacgccggggcacacttggccgctaggtcatatcgacctcccggtcaccttcggtggatccgccaacttccgcacggagcgggtgaactttgatgtggcggacctcagtctgccctacaacgcggtcttggggaggcccgcgttggtgaagttcatggcggcggtccactacgcctacctccagatgaagatgccgggccccggtggccccatctctgtccatggcgacctcaaagtcgcgcttgcttgtatggagcagcgcgcggaccacctcgccgccgcgtccaagcccgagggtggcgacgagaggcttggcacatccgcccccgccgccccgaggcagcggatagtcacatacgacgaggtcccggaagacgcgctcgtctctttcctgcgggcaaacgctgacgtcttcgcatggagaccggcggatatgcccggggtccccagggaggtgattgagcaccgtctcgccgtgcggccgggcgcaaggccggtccggcagaaagtgcggcgccaggccccggaacgtcaagccttcatccgcgaggaggtggcgcgacttctggaggccggattcatccgcgaggtcatccatccggagtggctggcgaacccggtggtcgttcccaaggcgaacggcaagcttcggatgtgcatcgactacaccgaccttaacaaggcatgtcctaaggaaccttaccccctgcctcgcatagatcagattgtcgactccatagcggggtgcgacctcttgtgttttctagatgcatactctggttaccatcagattcgcatggctagggaggatgaggaaaaaactgcattcattaccccgataggaacttattgttatacgacaatgcccttcgggttaaagaatgcaggtcctacttttcaacgtactactcgaatttctttgggtagccaaataggacgtaatgttgaggcttatgtcgatgacttggttgtaaagacgcgcaaccaagagaccttactctcggatctagcggaaacttttgagagtctccgctccgcccgcataaaactgaaccccgataagtgcgtgttcggtgtacctgcgggcaagcttctcgggtttttggtctctgcccgaggcatcgaggccaaccccgagaagatacgagctatagagcggatgcgcccccccagcaagcttagggatgtgcaatgcgtcaccggttgcatggccgccctaagtcggttcatatcgaggctgggagagaaggcgctacccttatttaagctcctcaaacgctccgggccgtttacttggacggaggaagctgaacgtgccctcactcagttgaaggcgtatctcagctctcccccagttctggtcgccccggagccaaatgaacccttgctactctacttagcggcgaccccgcaagtggttagtgcggcgttggttgtggagcgcgatgaggacaatcctcattccgcgcacccccaccctgtgctggcttggcccgggagagagcagggaggagaggcccccgagctgaacggtggcccaaggcccccgacgaccggagcaggccctctgcccgcttgtcagacggtgccaggtgcccccgacccccaggacggccccgaggccactgcgggaaggccgcacctatcgccctctgaccccgaggctaaccctgtgccgattcgacccaggagagagcagggagaagaagcccccgagccgaacgatggcctaaggcccctgacgaccggagttggccctttgcccgcttgtccgacgacgccaggagcccccgacccccaggacggccccgaggccactgtgggaaggccgcccctgtcgtcctccgatcccgaggtcgtcggcacagaagacgagtgcgccccgcaaggccgcttgggtgaagagcgccccagggatgcggcccctagcgaagaggatcggccccaccgaaaggtgcagcggcccgtctactttgttagtgaggccctccgggatgcaaagacccgataccctcaggcccagaaaatgctttacgctattctgatggcctcgaggaaactgcgccattatttccaggcgcatcgggttacggtggttacgtcttaccccctcggccaaatcttgcataatcgagagagtactggacgggtggtgaaatgggcaatcgaactttctgagttcgatttgcactttcaaccacgccacgctatcaagagccaggccctcgccgactttgtggcagagtggaccccggctcccgagcccgtctcagtccccgaagccagctcgggcccctcgcagctgcctcacaccgcccactgggtgatgcagttcgacggctccctgtctcttcagggcgccggtgcgggggtcacgttgacctcgccgagcggagacgtcctcagatatttggttcgccttgactttcgggcgaccaataatatggcagagtacgagggactccttgcgggactcagggtggcagctggactggggatccgccgcctcctggtgttaggcgacttccagctggtcgttaaccaggtctgtaaggagtaccggtgctctgacccgcagatggacgcttacgttcgccaagtacggcgtatggagcgccattttgacgggatagagcttcggcacgtgcccagacgggataacacggttgccgacgaactctcacggctcgcttcctcgcgagcccagaccccaccgggcgcctttgaagaaaggcttgcccagccgtcggcgcgacccgacccgataggggagacggacgcgcctgacagacccccgatgcccgtcggagtccaggcctcgggacccgaggggagcgctcccagctcccttagattgattgcttggatcgctgagatccaagcatacctcacagataagactctacccgaggaccgcgaagggagtgaacgcgtccagcgcatctccaaacgctacgtgctggtagaagggaccctctatcggcgcgcggctaacggaatcctcctgaagtgcattcctcggggacaaggcgtcgagcttcttgccgatatccatgaaggcgaatgcggagcccactccgcctcgcgcaccttggttggcaaagcctttcgacaaggtttctattggccgacagctctcaatgatgcggtcgacctggtccggcgatgcagagcgtgtcaattccacgccaagcaaatccatcagccggcccaggccgtgcagatcataccactttcatggccatttgctgtctgggggctcgatatcctgggaccgtttaggcgggccccgggcgggtttgagtatctgtatgtcgcgatcgacaagttcactaagtggcccgaggcttatccggtcgtcaagatcgataagcactccacacttaaattcattaagggcatcacaacccggtttggagtgcctaaccgtattattacggataacggcacccaattcactagtgaacttttcggcgattactgcgaagacatgggcatcaagctctgcttcgcctcacctgcccaccccagaagcaacggccaagtggagcgcgccaatgcggaaatcctcagacgccttaaaaccaagaccttcaatatcctcaagaagcacggcgattcgtggattgaggagttgccagcggtgctctgggcgaaccgaaccacgccaagccgagcaaccggggaaacgcctttcttcctcgtctacggcgcggaagcggttctcccatccgagatcaccctgaggtcccctcgggccaccatgtactgcgaggctgatcaagatcagcttcgcagagatgacctcgactacttggaagagcgaaggcggcgcgcggcccttcgagccgcgcgctaccagcagagcctgcggcgctaccatcagcgccacgtccgggcccgatcactctgcgtcgacgacctcgtcctacgccgcgtccaaacgcgtgctggattgagcaagctctcaccaatgtgggagggtccgtatcgagtgatcggcgtcccccggccgggctccgttcggctggccacgggcgacggcacagagctgcctaacccgtggaacatcgaacaccttcgtcgcttctacccctaa

SEQ ID NO: 99797 - DNA, 299 bp, Oryza sativa
  Clone ID: PAT_MRT4530_97575C.1
cccccacccccaccctttgttaaattcccccaaccccattgggttctcccccctgtaagtcttttaaaggaacccccccccctccttgtttttttcgggaatggcaaaccttaaaaaaccattggggggaaatggttttttaccaaaaaaaaaaagggcctttttggggctaacctaaatccttttccaaaccccataaacaaactggccaacagtgaaatcaccgggggcaagggccttttttttgtaaatttttgaaacatgggttttgtgaacctttttaacaaaccccgaatttt

SEQ ID NO: 99798 - DNA, 303 bp, Oryza sativa
  unsure (1)..(303): unsure at all n locations
  Clone ID: PAT_MRT4530_97576C.1
cggacgcgtgggaaaaaaaaagaaaaagaaaaaaagaaaaaaaaaacatagcgaagaggagcccgcgagatggcagatggcgagcttggcgaggaggcgcgcaggcaggaggcggcgctgctgcaggcgggcagccggcaggcaggcagtgggccgtcctttttggagggggtacgccggcggcggcggcgggggaggagagcgacgtcgtggtgatcggcggcggccgggcgggtacgtggccgncatcaaggcggcncagctagggctcaagaccacctgcatcnagaagaggggaacgct

SEQ ID NO: 99799 - DNA, 515 bp, Oryza sativa
  Clone ID: PAT_MRT4530_97577C.1
atagcattaagtaatgtcataaataatgccctgttggaaaccatttttttctttattcctgctggaattgataattcctacaagaattcgcgtcccaaagccttaattaatagcactgtgcatttattaccgctaagacactaaggcagtccagtttattggacccttctctcccttctttgctgcaattgaatgtacctatacaccagaggggttatttggttgtttcttagtgcagacttatcgctagctgtatttctggtttctgtatgcaattaactgcatatatgtgctttctttcaatattacatggtttgcccaataatataaaccttttgctcatttattttcaagggtttttggttttctgcttgttttacatgccctgaatcaactatcgagttgctaaaatgaattcggtatttgtgtatccgtgtggttcttgatgcttcagttggtccaaagcatctttgacttccactttaatggcactattgacttcttagaatttagat

SEQ ID NO: 99800 - DNA, 286 bp, Oryza sativa
  Clone ID: PAT_MRT4530_97578C.1
cgggtttacacctgtcacagctgagtgatacactacaggtagatcagtgccagatactgcaacagttggtgttcttgtgcgtgcgtgattgagcctgcgagctcgtttgagttgttgagcctgtgtgcttgcgtcatgtgactagctctgtttctattacagcaaggggaaggggttatgaaaatgaatagagaaaactaaatctatctgccatctctgctctgtttctcttctgttcttctctgttcttctgttcatcctttctctgctgcttctctctatctct

SEQ ID NO: 99801 - DNA, 420 bp, Oryza sativa
  Clone ID: PAT_MRT4530_97579C.1
atggatccgacggccgggacaggttcctccaccaagaagatccctagttggatggtaacggagctgccaatgctatcgacggaggccaaccgcttgccacagatccctagttggatgataaggaagccgcttatgctatgtatggaggccggccgctctggcaaggccgccgccgccgccaccgccaccgcggacgccatggagcagagctgctcggtgtgcctcaagagtttcgagaaggacgactgcatctggtcgatgccctgctcccacactttccatcagctctgcatcttgggcgaccgctcctgcagggacatgaacgccaatgaggagtgcaaggagctttctttggtagaggatgaagcttctactgcaagagaagcaagcgagctgggaagaactagaggaagcttttag

SEQ ID NO: 99802 - DNA, 1468 bp, Oryza sativa
  Clone ID: PAT_MRT4530_9757C.1
cccacccaaacctctcctcgagcctctccccggccggatcgccgccgcccgccgacactcgccggtggggtttgcatggtctcatcggtgctgagcatgtgaattttaggaagttgacaagagttcacatttaattcgtacatgatgaatggttcaaatggttcccaagggtatcatgtgaatggaaagcaagtgcaaagcgttgttccttccattcagaacaatggaccaagacaccggccattgactctaatgagacggtgccgtggcatgttatgtttggttattatgccgttgacagcatttatgatgatggtttacctatcccctgtaactactttcctcatacggttgttcagtgtgcattacagcagaaagtcgacatgctttctgtttgggatgtggttagcaatgtggccatttttgtttgagaagattaacaagaccaagtttgttttctctggcgaaactgtgcccccaaaagagcgtgtcttgttatttgctaatcacagaaccgaggttgattggatgtacttgtgggatcttgcgttgaggaaaggccgtttgcagtgcatcaagtatatccttaagaaaagcttgatgaagttgcctatttttaactgggcatttcacattattgaatttattccagtagagcggaagtgggaggttgatgaaccattaatccgaagtagactttcggaattaaagaaccctaaggatcccctttggttggcagttttccctgaaggcacggattacacggagaaaaagtgtatcaagagtcaagagtatgcaaaagagcacggattgcctattctgaataatgtcctccttcccaagacaaagggttttcattgctgtctacaagagttgagggactccatggattctgtttgtgacatcacaatcgcatataagcatcggccaccgacttttatggacaatgtttatggtattgatccttctgaagttcacatacatgttaaaatcattcaagtctctgacatacccacctcagaagatgaagtcgccgattggctgatcgagagatttaaactgaagaacaagcttctgtctgatttctcggcacttggccatttccccaacgaaggaactgaagatgatctgtccacactcaagtgcatcgcgaattttgtagcggtaatcagcacaacgaccgtcctcacgtacctgaccctgttctcgtctgtatggttcaagattttcgtagcatttagctctgctttccttacttttgcaaccttatactccatacatctgccccagctgatatgctccccggaagctggtacccatgccaagaaatcctgaaagtatttgtgcaagtgtaaccctcagctgtgtattagcagaaagatattactactttgctcagaacccaacttgtgggttgtggcatcatcgccatgtatacctgtatatccaatgggatttgtcattggaa

SEQ ID NO: 99803 - DNA, 1270 bp, Oryza sativa
  Clone ID: PAT_MRT4530_97580C.1
ggctccaggcacaaaccaaacgccaattaatggcttgaccaaccaccgcgcgcgccgccgtctttcgccgacgccgaggaggccggccatggcggcgccgcccaggcccataccctccatccaccggcaaccgcccaagccaaccaccacccacgtcgcccgctgcttccgcgacccgcccaaagcccccgacaccaacagcaacaccaacccgctcctctccctcctctccgccgtgcccgactgggccgacgccgtctccgagcgccgcatccgcgaccgccgcccgctctacacccacgccgactggcgggagcaccgcagctcccgccgccacctgcgccacctcctctcctccctcacctcccgcgtcatcctctccctcgcgccccccgtctccgccttcaccgccttcgccgccgccattgccacctacaacaccctcctccccgcctacgccctcaccgcctcctccctcccctaccagctcaccgcccccgccctcgccctcctcctcgtcttccgcaccgaggcctcctacgcccgcttcgacgagggacgcaaggcatggatgcgcgtcatcgccgccgccgccgacctcgccgggatggccatgcgccaccacaacccccctgccacgcgcgccctcctcaactacattctcgccttcccgctcgcgctcaagtgtcatataatctgccattcggacataaaaagggaccttcagggtttgctctcagaagatgacttgaatgttgttctcagatcaaaacatcgtcctcgctgtattattgagttcatttcacagagcctctatatgttggatttcgatgaaaataagcggaatatcatggagtctaaactatcttgttttcttgaaggaattagtgtttgtgagcagctcattgggattcctattcctctctcatacactagactcacttccagatttcttgttctgtggcatctcacgcttccagtgatactctgggatgaatgtaaatggatagtcgttccagctacttttatcagtgctgcctctctattctgcattgaggaagttggtgttcttattgaggagccattccccatgctagctctagacgagctgtgcaagcagctccatgacagcacgcaggatgtgatgtcggtgcaaaatttggttcacaatcgactagccgccaagacaaaggaccaagacagtggcagcatgcgatgttcagacaacgggtggcctagctccaaaagcgaacaagcaaaaattgattga

SEQ ID NO: 99804 - DNA, 957 bp, Oryza sativa
  Clone ID: PAT_MRT4530_97581C.1
gaagatcgtgataatatattgcgctcacgggcaacaggcaaaggggccctaacagcccctttcccacttcttaaatctaatcaccttggtgtggtgctaacgttcactgtgtataagtatgatcttcctccagatgcaactccagaggagcgtattgaagctacgctgggttatcttggtgcctcatttgatgttccgtctctggtggagagactcctggagcaacttgctagcaaacaaaagatagttgttaggctgtatgacatcacaaatcatacttatcctactaaaatgtatgattcggatgttattgcatctgatgatctgcatattagtaatattgatttcggggacccgacacgcaaacacgtaatgcattgcagattcaagcatgcaccttcactgccatggtctgcaattatgatatcttcagcagtagctataattgttttgcttgttggctatattatctatgctactctgaattctcttgaagaggcagaagataattatacgacaatgagagatttaaaaggacgagctgaagctgcagatgttgctaagtcccagtttctagcaactgtttcacatgagattagaactccaatgaatggtgtactaggtatgctacagatgctcatggatacggaacttgatacaactcagcgggattttgtagttacagctcaagaaagtggaaagtcattgataaacttaataaatgaagtacttgatctcgctaagatagaatcaggcaaaattgagctggaggcggtgcgatttgatgtccgtgatattcttgacaatgtggtatctttgttttctgaaaaatcatgggctaagggcatagagttggctgtacttgtatctgatcaagttccagatgttctgatcggggacccgtggcggtttcggcaaatcattacaaatcttgtagggaattctatgaagcagtag

SEQ ID NO: 99805 - DNA, 527 bp, Oryza sativa
  unsure (1)..(527): unsure at all n locations
  Clone ID: PAT_MRT4530_97582C.1
gcagaatgctgcacaagaatccttccatgaaatgactgcggtcaaaaggtatctttttacttattctttcaatgtaaaggatagcaaaaaaaatagacatttgacatcccttacaatggtagctaggttgacaagggaacactaagttcccagaaatgagaatatcagaatattattcacagctaacaaatatgatgtgctgatgttagccaatagaacatcaataattagtatactaactatggctattctacttctgatgtgctacagtgacacaaatatgtcaggactatagttcaaagcaacagttgtacattttaagtttgatgagtgctgggttgaatataanagctgttatgtacttgcatccatcattgtattggtattcttttatgcattttatgctctgaatgaaaccaatatgaatacacaaattctattttattttcgttaattagcttttagaggaacttggctgcatggtactgaaagttcaagccagtgccttatcatgactcatgtggttg

SEQ ID NO: 99806 - DNA, 368 bp, Oryza sativa
  Clone ID: PAT_MRT4530_97583C.1
caattaaataatgaaactatatatgatagggatcaatatgcacatggtgcaaattcactaaactgtacatcccctcaagcattctgggattaaaaagcaccctaattaccaatttatcctgacctggttaacaaattaacttttatacatgctctgtaaatcttgagcaagcacgttaatgacactgcattcatgcaagtgcaagtgtaattaagctatagtccatcttgacggaggagtagatgagcctggtgaaccacaaacaggcttttaatccgattgtgcctttgaggacaaataaggcgcatgaggcaatgagcatgttttcgaagtagagcccgccagtgacgaccttggtgattgttcag

SEQ ID NO: 99807 - DNA, 594 bp, Oryza sativa
  Clone ID: PAT_MRT4530_97584C.1
atggcctcctcggcggcggcgcggcggcggcaggagatggcggcggaggggcagcgccacctggaggagaccatcgccgccgcgttccagatcctctcctccatgaacgacgagctctgcaaccccacgctctggtcctcctcctccgccgccgccgccgcggcgggcggcgccggcggactccagcaccacggcaacaaccaccaccaccaccaccagcaccaccaccaccacggcggtctccctccgccgccgccgccgctgcactccgcggactccgacgccgccgacgccgccgggggagggcccgggggcgcgccgggctccggcgggtcgctcgacgaggccaggcaccggtacaaggtcgccatggcggcgctccgcacgtccatcgccgccgtgtcgtcctgtgctcaggagatgggatcgacagaacacaaagctgatcaagctgagattgagagattggaagaacatgcatctgctttgagaaagaatttttccctgaaccagttggtaactggtgcttatttagccatgtcaatcccaaatatttcccaaacaacctgttttgaacataattgttttggatag

SEQ ID NO: 99808 - DNA, 102 bp, Oryza sativa
  Clone ID: PAT_MRT4530_97585C.1
atggcgcgcaccaaggaagacatcggcaccgggacgcccgctttggactttggagccattaccggcgcaccagtacacctggtcgaggccgaggccggttga

SEQ ID NO: 99809 - DNA, 148 bp, Oryza sativa
  Clone ID: PAT_MRT4530_97586C.1
ttaacgtgtcgagcggattgtttatgtgcgcgtaaaactcaagaggcggacccccaaccccactccgcgatggcaaacgacatctactcaccctttctgctgttctcatactatattactatgttttttatcttttctctttcatcca

SEQ ID NO: 99810 - DNA, 1677 bp, Oryza sativa
  Clone ID: PAT_MRT4530_97587C.1
tcagcgttccacatcatcactaaatctcagccgttcgatcggtggatgagatcgcatatgaaccgttggatgagaaggtccccgtgtgaagcccagcctatcacggcccatgtcctctctctccagggtttcttcaccctccaccgcatcacaacatctgccgccaccacaagcgctcgcttctcctcccccatccccgcgtgccagccgctgtgctcggcggacgcggacaagcggcgacgacggcggcggcggcggacgcggacgagggaggcggcagcggttgagggcgtggtggacgcggacgagggcggtggcagcagttgagtgcggtggcggtgacgacgacggcggacgcggacaagggcggcagcgttggtcacggcgaacgcggacgagggtggcagcggcggaggtcgcggacgaggacgccggccggcggtcgagggcggcgatggatgcggaagagggaggcggcagcggtcgagggcgcggtggacgcggatgagggcgggcggcggtcgcggacgagggtggcggcggcggcgacgacgacggtggacgcggacaaaggcagcagcgttggtcacggcgaacttggatgagggtggcaacgacggtatcctgaggagcaacaccacaaagattagttgccatcttctgaaggagagggattggacaactagcaggaccttccacttcagctgaatcttccataaaatctgattcttgcaaagaactccctgagaaaagaagccccgcttcatgagcaacctgcttcagttttttaacagacttacccctagggtttccaattctctggttaggatcaggctcaacaagatcatcatccttaaaaccaattttgtgtccatcagaaatagcaaggagtcttgaacttctccttaaacctgtagttacaataggggtgacagatccagctgccctcttcttataagaccttttagttggcataacaggatcctcaaaagcagtgagagccaaaaagctatctgaaggtggcacaacagcaagaggggtaggatcaaggacttcatcagaaccaacagaaacagaatcagaaacaatccttgaagcccagtcagaagaaccagaagcatttccttgaaaggagtgatgatcagaggttaaggcagaccaaaaggaagcatccttgacaaagttctcatcaaacataacttggggaaatctctgacataagagccttaaaagattagcatcaacaaaaaccttctgaaccatcaggctattgtcagacacatgctcaatagcttcatcactggagatactgatgacagagttagttgaattacccagtggcagatcatcatcaagaggaaaaacatcggcaaactcaccattcaaagtgtaaacataaatagtccaggactgaccattaggagcatttagttgctcccaagcaacatactgaggcacatcatctaagggcctatttgggggagcttctagctgctgctgcttctcctcatcataagcaatcggctgaccaagaactaaggcatcccgatgaacaggtgatctaatcttctcgccggcggccaccggagaagggcaagggggatcaagaacatggaggcgattgaaaaccctggcggcgagggaggcaccatggctaagcgctatcacgatcgccat

SEQ ID NO: 99811 - DNA, 483 bp, Oryza sativa
  Clone ID: PAT_MRT4530_97588C.1
cccaaaaaaaccaccaaaaagaaccccccgcccccaatttaattttttttaataaccataaccccaaacaaaaaaaaccaccccccaaccaggaaccggcaagctagaccaaccaaccatggaaaataaataaaccaaggcccaaataaataaataaaccccaaaggaaaaaataaatcaaacccagcccccccccaaacaggaggcagccaaagaacccgcccggggcctgaaggttgccccgcccgaatcccgaaagccccccccccacccgggaaatggccggggggcccccccccgggcccgggggcgggaaaacaacccggaaaacccgggccccctcctcgggaaccaccccggccacaaaaaccctaagggggggaaaccggccctgaatgggcccgggggaaaccccccggaagaacggttcaaaaaacccccgggggggttgtttgcggaagcccatccgccccccgggggggg

SEQ ID NO: 99812 - DNA, 2539 bp, Oryza sativa
  Clone ID: PAT_MRT4530_97589C.1
atgacgaccaaggccaccacccttctcctcctcctcgccgccgccgccgcggcgctcctctgccacatccacgtcgccgtcgccgccggcgaggacccggagccgtgcgacgacgggctctgcctcgtcaacgacggcctgcagatcgtgaaggggtcgccggtggtgttcacgtacgccgccagcgcgccggtcagcctcgccttcgacaacgcctcgccgcgagcagtgatcccgctggcgaggaagaaggggccaaatctcacggagaggatggttgctgcggaggcagagctcgtcgatctgaatcagcgagttggggagctcacgagcaacctcaacgaactcctggggtcgctgaccaagctggagacgtggattccatcggtggacacggggatccaagcgctgaacaaggccgtggaaggaatcgccgcaagagtgacggttttggagaacttacctgcagcggcatcggggatgacgaccccaacgcccatcgagcacggcgaaatcgagaatcaccagggagacgaatccaaagccctcgcggctcaggatcgatccctggtcaagggtaagtcccgattccccaactctcccatcacttttgatataggagagtcttcagttcagaatcaatccagcaataggttccaaggtcctaggcttcccaagtctgatttcccaaagtttgatggtaacaatcctaagctctggaagaactctaaaaagtattttgaaatgtatcaagtgtcttatgaaaattgggcaaaatttgctaccctccactttgttggaaatgctgccttgtggctccaaacttatgaggccctccatagtgttgaaacctggcctgaactctgtatagcagtgcatagcaaatttggcaaggacaaatatcaggaacatttagaagagttagaagggcttaggcaaattgctagtgttgaggagtattacaccaagcccaggactgttgatacggctttgtctcttgccaaaacgcaggaggaacttgtcttggagttgaagaagggtactcaaaagctgggttacaaagagagttacaagttagcggctgtgaagaataattaccagggcaagggaatattggggcatgctcctgatgatgctggaaaaactgaagagaaaccaaaatgggaggacagatttgagtccttgaaggcttccaggagagctaaaggagaatgtttcaaatgtggagaaaagtggggacctaaccataaatgcccaaaatctgttcagttgcatgtcttggaggaattacttgaagttcttcaaattcaagagaatcaggaagctgggcaagattgtgaatcagaaggcagtgatgaagaattggtagtctctgaatggagttctagcagttttgtggctcagcatctggtggatagtttgagtctggcagtccttgaaacagctcctgctcaagtggttattgctgatggaggcatggactggctagagcatttcagcccaatgtggattaactggcaaaggaaaaagttaaggtttacataccaaggaaagagaattactcttactggggttaaggaaaatctgtctgattgcaaatcagttactgctaagcagttaaaaggaatgttcaaatctagagctattgctcaagttgttcaactatgctcaattgaagaaattgaaacaaatgaacagttgcctcctgaaattagtgcagtattgcaagagtcccaagatcaatttcaggaaccttctaggttaccaccacatagagattttgatcataacattcctctcatgccaaatgccaagccagtgaatgctaaaccttataggaaaaatgtgcttgtgtttgtggacgacattcctgtttacagcaaaagcttggcagaacatgtgcagcatttgagacaggtgtttcagatactacagcaccatcagctgtttgtgaaggctagcaagtgttcctttgccaaacaacaattggagtatctagggcatataattggtgaacatggggtggcaacagatccagcaaaagttcaagcggttcaggaatggccggtgccaaagaatctgaaacagttaaggggatttcttggacttactggctactacagaaaatttataaggcattatggagttatcactcgaccactaacagagttgctcaaaaaggataagtcatacaattggacagatgctcaacaaaaggctttctgtcaagtcaagatggctatggtccaggctcctgtgtctgtgctggccatgctagatttttctcaagaatttgtgttggaaactgatgcctatgacaggggtattggagctgtgttgacccaaaatggacacccaattgcctatttgagcaaggcccttggagtgaaggctcaggcattatcaacatatgaaaaagaatgcttggccatcttaatggcagttcaaaaatggagggcataccttcaacattcagaatttgttattctaacagaccacaggagtttgactcacttgggtgaacaaaaactaaccacaa

SEQ ID NO: 99813 - DNA, 513 bp, Oryza sativa
  Clone ID: PAT_MRT4530_9758C.1
ccgggctagcaggaatacggcacgaggcacactacctactattacctacctaccatacgccaagaaccaccacgagcaataggcgtagctagtccataggccacaacgctagccgtcgctaggccggcgccgcaccggcggcgaggaagaggagcggcgtagacgtacgtaggaggggatagaacgcgtaacagcgggctacaaggcgctacaacaaggtagaccctagctacggcgtagcgcaagaccgccgactaactacgtacgccaaggtaggtaggccaagctagagccccgccggcgggaagagccgcggcggcgcgtacggggcgcagagcaacgccgccggtagagataatatcaggatacgccgacatacatagaacgggctacgtagcacgtacggcgtacgccgacggctaacgagctagctaccgggtaggaggcggccgacgaggagtacggagtaataggaccccgaacgagccataagcaggcagggcccggccagcc

SEQ ID NO: 99814 - DNA, 3112 bp, Oryza sativa
  Clone ID: PAT_MRT4530_97590C.1
ctggagacgtggattccatcggtggacacggggatccaagcgctgaacaaggccgtggaaggaatcgccgcaagagtgacggttttggagaacttacctgcagcggcatcggggatgacgaccccaacgcccatcgagcacggcgaaatcgagaatcaccagggagacgaatccaaagccctcgcggctcaggatcgatccctggtcaagggtaagtcccgattccccaactctcccatcacttttgatataggagagtcttcagttcagaatcaatccagcaataggttccaaggtcctaggcttcccaagtctgatttcccaaagtttgatggtaacaatcctaagctctggaagaactctaaaaagtattttgaaatgtatcaagtgtcttatgaaaattgggcaaaatttgctaccctccactttgttggaaatgctgccttgtggctccaaacttatgaggccctccatagtgttgaaacctggcctgaactctgtatagcagtgcatagcaaatttggcaaggacaaatatcaggaacatttagaagagttagaagggcttaggcaaattgctagtgttgaggagtattacaccaagtttgaggaattaatgcatagggtcttagtttataatcaggcctatgatgaaacctattttgtcacaaagtttgttgggggtctaaaaactgaaatcaaagcagctatatatcaagctgcataggcccaggactgttgatacggctttgtctcttgccaaaacgcaggaggaacttgtcttggagttgaagaagggtactcaaactgaagagaaaccaaaatgggaggacagatttgagtccttgaaggcttccaggagagctaaaggagaatttattgctgatggaggtgttttacaatgtaacaaggtagcaacaaaggttgattggtggtgccaagggcatagttttacttcagatctaaaggtacttcagcttgggggatatgatgtgatcttaggcatggactggctagagcatttcagcccaatgtggattaactggcaaaggaaaaagttaaggtttacataccaaggaaagagaattactcttactggggttaaggaaaatctgtctgattgcaaatcagttactgctaagcagttaaaaggaatgttcaaatctagagctattgctcaagttgttcaactatgctcaattgaagaaattgaaacaaatgaacagttgcctcctgaaattagtgcagtattgcaagagtcccaagatcaatttcaggaaccttctaggttaccaccacatagagattttgatcataacattcctctcatgccaaatgccaagccagtgaatgctaaaccttatagagggctgaatgacattaccattaagaacaaatttccaatgccagtggtggatgaattacttgatgaattggctggagcaaagtggtttaccaaacttgatttacggtcaggctatcacaagatcagacttttgcctcaagatgaacataaaacagcatttcgaactcatcaaggattgtatgagtttagggttatgcctttcggtcttaccaatgcaccagcttcatttcagggactgatgaacaaaatctttgcactaatgatcaggaaaaatgtgcttgtgtttgtggacgacattcctgtttacagcaaaagcttggcagaacatgtgcagcatttgagacaggtgtttcagatactacagcaccatcagctgtttgtgaaggctagcaagtgttcctttgccaaacaacaattggagtatctagggcatataattggtgaacatggggtggcaacagatccagcaaaagttcaagcggttcaggaatggccggtgccaaagaatctgaaacagttaaggggatttcttggacttactggctactacagaaaatttataaggcattatggagttatcactcgaccactaacagagttgctcaaaaaggataagtcatacaattggacagatgctcaacaaaaggctttctgtcaagtcaagatggctatggtccaggctcctgtgtctgtgctggccatgctagatttttctcaagaatttgtgttggaaactgatgcctatgacaggggtattggagctcattcagaatttgttattctaacagaccacaggagtttgactcacttgggtgaacaaaaactaaccacaagtatgcagcacaaagcttttgtgaggttaatgggccttcagtatagaattcaatacaaacaaggatctgaaaacaaggtggcatatgccctttcaaggagagatgctcagacagaattgttagcaatctctgttgggaggcccaaatggttggaaatagtggtagagcggtatgaacaggatgatgaggcaaagcaactattggcacaattgattttgaatccgactggtgttgagcatttctctctacttaatggggtcattcggttccaaggcagaatttggttgggtaaatttgaagatgcacattaagcagctttgctggctttacatgctagtggggtcggtggtcactcaggaataacagccacttataacaggaaactgttcaagttggccgatgtgaagctcaatatgagctcttcataccatccccaaactgatggacagacagagcgcttgaatcagtgtctggaggcttatttgcgttgtgctgttcattcttgcccaaagcattggtctaagtggttgtcgcaggttcagcattggtataacacagcttatcatagtgccttggataagtctccttacgaacgcattggagaggtggcatacaaattggacctgcccccacaaagtcaagttcatccggtagtccatgtgtctcttctcaagaaggcaattcgtcctgatgtccaagttcaagccgatcttccagcaagttgcatggcagaagatgcagcaattttccctgaagaaattttgcaccgtcaactcatcaagcgaggtaatgcagctgtgccctatggattagtccgttggacaggtttgcctgccgctcttgctacatgggagaatctatgacagctgcaatttcgtttcccatcttctccggcttggggacaagcctcttct

SEQ ID NO: 99815 - DNA, 1695 bp, Oryza sativa
  Clone ID: PAT_MRT4530_97591C.1
atggacatctctaggacaaatgaaggctacacgagctgcggcccggtagtcgagatgtcatggcacagggccggtgtcctgctgctgggggctcagtcctgcctacctgtcccgggggttccggccgtaggtggggttggccggaggagaggacgacgctgcgacgtcgacggaggagacagcgacgtcggtcggtgctcgggcacggcggaaggggctgccggaggtggtgcagtggcagcaacgccactgtttaccggcgaggacgcgtctccgatggtttccccacgaaacagaggcgacgtcggggaagaggatgcacctgcgaggccgagggtggcgacggcgcaaccggacggtgcacggtcgtggtgggaggtgcggctggaggagaacggaccgagggggttccattttagagatgaggggagggagccgaccatggcggaggtcggaacggaggtgggaatggcggccggcggccatggaaagcggcagggagttcgtcacaatctgattccgctggcgatgaagaaggggccaaatctcacggagaggatggttgctgtgaaggcagagctcgtcgatctgaatcagcgagttggggagctcgcaagcaacctcaacgacctcctggggtcactgaccaagctggagacgtggattccatcggtggacacggggatccaagctctgaacaaggccgtggaaggaattgccgcaagggtgacggttctggagaactcacctgcagcggcatcggggatgacgaccccaacgcccatcgggcacggcgaaaccgagaatcaccagggagacgaatccaaagccctcgcggctcaggatcgattcctggtcaagggtaagtcccgattccctaactctcccatcacttttgatataggagagtcttcagttcagaatcaatccagcaatagattccatggtcctaggcttccaaagtctgatttcccaaagtttgatggtgacaatcctaagctctggaagaagaactctgaaaagtattttgaaatgtatcaagtgtcttatgaaaattgggcaaaattttctaccctccactttgtaggaaatgctgccttgtggctccaaaccaatgaggccctccatagtgttgaaacttggcctgaactctgtatagcagtgcatagcaaatttggcaaggacaaatatcaggaacatttagaagagttagaagggcttaggctaattgttggtgttgaggagtattataccaagcccaggactgttgatacggctttatctcttgccaaaacgcaggaggaacttgtcttggagttgaagaagggtactcaaaagctggggcttccaggagagctaaaggagaatgtttcaaatgtggagaaaagtggggacctggccataaatgctaaaaatctgttcagttgcatgtcttggaggaattacttgaagttcttcaaattcaagagaatcaggaagctgggcaagattgtgaatcagaaggcatccatgtgtctcttctcaagaaggcaattcgtcctgatgtccaagttcaagccgatcttccagcaaattgcatggcagaagatgcagcagttattcctgaagaaattttgcaccgccaactcatcaagcgaggacgtgacaaatccacccccttacaggaatctcgtccccgagattcgaggaggctag

SEQ ID NO: 99816 - DNA, 656 bp, Oryza sativa
  Clone ID: PAT_MRT4530_97592C.1
tattaagtttgaaaaaaggaacttatggaaggctaaacaacttaaagatttcagaaaggctaatgggttatatttcaaatgtggtgaaaaatattccccttatcacaaatgctctttagctggaatagcaagggaaggagatgaagctgctgaactttgtcacatttcagtctttgctatagctggtaattctcatcccaggctatgaggttaatggctttggtttagaacaaagtggctaatggtgaattcattacctataaacatcatattcctaaattcacttggtggattcagggtttcacttcctcttataacatgaagttgctaccattggagggtcatgatgctatacttgtgatggattggttagctcaatggggtgatatgcagtgcaactgggctgaaaagtgtctttgaaatttcagtacaatggcgactggggttcagacacctgcctcaactaccaatttatctgaaattttcttgcagcaggttctgaaatggcacaagggttgtgatatttgggccactgctttggtagaacaaactgactaagaagacacggattctatttccaactctaataagaaaattattctgactcgaacctgcagccatgcgcgccgttcctgcatcccaagccggtcagcccc

SEQ ID NO: 99817 - DNA, 478 bp, Oryza sativa
  Clone ID: PAT_MRT4530_97593C.1
ggctgcaggaattcggcacgaggcaaatacaatcgaactacctctctctctctctctctctctctctctctctcagttcatccccttcctctctaattcaatccaaattccctagcgaattccggattagcttggcgtgacgccggcggagtctaggagttcgtcacatctggtatcagagcagtgatcccgctggcgaggaagaaggggccaaatctcacggagaggatgattgctgcggaggcagagctcgttgatctgaatcagcgagttggggagctcgcaagcaacctcaacgaactcctggggtcgctgaccaagctggagacatggattccatcggtggacacggggatccaagctctgaacaaggccgtggaaggaatcgccgcaagggtgacggttctggagaactcacctgcagcggcatcggggatgacgaccccaacgcccatcgggcacggcgaaaccaagaatc

SEQ ID NO: 99818 - DNA, 254 bp, Oryza sativa
  Clone ID: PAT_MRT4530_97594C.1
ttattagcataggctcatctagcatgctagagagatcatctgaactacatggcgggggctgcaagaactcccaaataatccattatctgctcccaccatcttagaggactcaggccattgatccctttcctctctcgatatatcttcttgaaggtggtccctcataccacttcattgaccgtgactagacaaattcttttcagcattaatttgggatccaatattaagctcaagctagcttagcttagcttctc

SEQ ID NO: 99819 - DNA, 999 bp, Oryza sativa
  Clone ID: PAT_MRT4530_97595C.1
atggacttcatcgaaggtttgcccaaatctgaagggtatgacacaatattggttgtggttgataaattctccaaatttgcgaagtttattcccctttcacatcccttcacagctttgcaagtggccactgcttttattaagaatgtctatgatatctttggcatgccccaagtgattatttcggatcgcgataaaattttcactagtgctctttggcaagaactgttcaagttggccgatgtgaagctcaatatgagctcttcataccatccccaaactgatggacagacagagcgcttgaatcagtgtctggaggcttatttgcgttgtgctgttcattcttgcccaaagcattggtctaagtggttgtcgcaggttcagcattggtataacacagcttatcatagtgccttggataagtctccttacgaagtgttgtttgctaggaaaccaactccatttggccttattgatgttggcgacagcatggtacctgatgtacatgtttggcttcaagagagggctcatatgaatgaagtgcttcatcagcaacttaccagggctcaacagaggatgaaataccaggctgataagcatcgttcaaaaagagttttcaatgttggggatatggtttatttgaaattacaaccatatgttcagatgtcagttgctaaacgtagttgtcagaaactgtgtttcaggtactttggtccatacaagattttggagcgcattggagaggtggcatacaaattggacctgcccccacaaagtcaagttcatccggtagtccatgtgtctcttctcaagaaggcaattcgtcctgatgtccaagttcaagccgatcttccagcaagttgcatggcagaagatgcagcaattttccctgaagaaattttgcaccgtcaactcatcaagcgaggtaatgcagctgtgccctatggattagtccgttggacaggtttgcctgccgctcttgctacatgggagaatctatga

SEQ ID NO: 99820 - DNA, 1669 bp, Oryza sativa
  Clone ID: PAT_MRT4530_97596C.1
atggaggagacctggctcttcctcctcttctccatctcgctcgtcgccgtcttgctcgccaccgctcgccgccgccgctctagcagcatcaaggcgcgcctccctcccgggccgtcgccgctgctcttcctcgccaagttcctccgcctccgccgctccatcttcgacctcggcccgctcctccgcgacctgcacgcgcgccacggccccgtcatctccatccgcctcttcggcaccaccctcgtcttcgtcgccgaccgccgcctcgcccaccgcgcactcgtccagggcggctccaccttcgccgaccgcccgccgctcccggagctcggccgcctcttcacctccgacacccgcgacatcaactcctccccgtacggcccctactggcgcctcgtccgccgcaacctcgcctccgaggcgctcagcccggcccgcgtcgcgctcttcgcgccggcgaggcggcgcgcgcgcgacgtgctcgtccgcggcctccgcgaccgcggcggcgacggctcccggcccgtcgagctgaggccgttgctccggcgcgccatgttcgagctgctcctgtacatgagcctcggcgccaggcttgccccggaggcgctcgaggaggtcgagcggctggagctatggatgctccgcgccttcaccagcttccccgtcttctccttcttcccggcgatcaccaagaggctcttccgcaacccgcgtgccgctcacgttgccgttcgccggagggtgggcgagatatacgtcccgctgatcaacgccaggcgcgccggagacggagacggcgacgacccaccctgctacacggactccctcctccagctgcgcgtggccgaggaaggcgaccggccgctgacggacgacgagatcatcgcgctctgctccgagttcctcaacgccggcaccgacacgacggtgacgttggtggagtggatcatggccgagcttgtgaaccgccccgacatccaggccaaggtccacgacgaggtgagacgccggccggagctaaccgaggcagacctgcaggcgatgccgtacctcaaggccgtggtgctggagggcctccggctgcacccgccggcgcagttcctgctgccgcacggcgtgcagagcgacgcggaggtcggcggctacgtggtgcccaggggcgcggagctgaacgtgtgggtggcggagttggggcgggacgaggtggtgtggacggcggcgagggagttcatgccggagaggttcatggacggcggcgaggtggaggtggacgtgacggggagcagggagataacgatgatgccgttcggcgtggggcggcggatgtgccccgggtacacggtggggacgctgcacgcggagtacctggtggggagcctggtgagggagctggagtggctgccggagacgaagggggaggcggcggacatggcggaggagctggatttcaccaccgtcatgaagcacccgctccgtgctcgcgtcctcccaaggccctcctccctctactaatcgtgcttccatggatgaatcatgcatgaagaataacatgccaatcgatagttttgtgatggttgtaaaagcatgtgtagttttatgatacgtactttatgtttaaatatgtgtaatactgttgatttttgaaataatatttcatcattgtctt

SEQ ID NO: 99821 - DNA, 474 bp, Oryza sativa
  unsure (1)..(474): unsure at all n locations
  Clone ID: PAT_MRT4530_97597C.1
gcacgagcaacgaacagcacatacaacttttttttactcaagttatttttaattgcctcatccaattttttctactgtttatcagtgtaactcaacagccaaatagcttgggcacttgacaagctatccgacaatagtcacgacgaaatttatctgctttaaactttctgaagagatggacaaccagcctatccatggtcaaaatttctcaagagcagaagcacattcgcaaaaggtgaatgtgcagcgagcctgcgacaggttgggtacccggtgtaaacaatggatgttcctatataactcaaaccttgctagtctcgagggggggcccggtacccaattcgccctatagtgagtcgtattacaattcactggccgtcgttttacaacgtcgtgactgggaaaaccctggcgttacccaacttaatcgccttgcagcacatccccctttcgccagctggcgtaataacngaa

SEQ ID NO: 99822 - DNA, 455 bp, Oryza sativa
  Clone ID: PAT_MRT4530_97598C.1
aaaaaagaaaaaaaaatttttttttttttttttttccccaaaggttacaattgcaaaattgggggtttgtggggcttttttttacttgcgaaccctttttttgttaaaaattttttaaaaaaccccccgaggggggaattggggttggggcccccaaaacccccggggggtacccctattttgggggggggggtaaaagcccaaaaattttttattttgggggctccgtggggggaccccttggttcccccggaaatttcgtaccggccccttgcagggaccccatttttttttttgggggagtgtttaaacatggtggaaaaaatgggcaatcggtttttccggggaaaatatttttccaccataaattgccacaaaaattaaagcgggggaataaaaggggaaaaccggggggtccttttggggggccaaactccattttttttgggggggtc

SEQ ID NO: 99823 - DNA, 1819 bp, Oryza sativa
  Clone ID: PAT_MRT4530_97599C.1
agagagaactagtctcgagtttttttttttttttttttagtataagtatgttccgtatgctattgaactgcgttatagatctgtcatcttctttgacaatacattgatgaatttagacacaaatgcatagagaatggagcaaactgccatcagaagcaggtaaggattgccatacaggcgcaacaagttgatctcacagccacaaggccacaacaaacggtgtttcagtctgcttccaacaagcaatgcacatttttcctaggtcggtttccttgatttaaacaaagggctattcacacatgtaatctacatcaccattggggatgtccttgggaagtagccatgttaaaaagccctcattggtgtctcctcttagcctctgggatgaatactccacaagcatgtcccacaactcgccaaccgtccacctatggcgcaatatccactgggtcacctcttctaatcttttcagtgattcggactcaaaagtgtagtagttaataaaagatcggagtgcctgtgatgcagcaatccattgaatcatgctcttgatttcagggtttccaccaaaagccccgcaaccccagtttccagttgaaactcctatgcattcatcaggaatgacacttggacagttatcctttgtatttaaatcctggacaagctttgcacagagctgatgatttgattgatccaaaaatccacaaaaagccttgttcacttcccttagaagaccactagattcaaactgtaacctagttggacagtccaaagcatcaattgccactatcctagttttccgtctacccatcgcatcaaagggtttgctatctaagtagtcaccagtaaaacggaatgaggaaccataccccatgtactgtgagaacctttctgcaccaacaatttctatagcttcattatcttccattgaaaccatgaagagcatgcccacgatcaattctgggtttatcatgaaccggatttcttcctgcacgcagcctctggaaagtgcgccacctcccaaatatctatttgcaaagtcaacttcaagggcttcttgttcctcatcttctatcaagcctgaggaaaatacccggaatgtgcaaaggggaacaccagatttcatccaagtatccatgtcagggtacgtaatgccatcagattcaggacggcgaggaagaaccttacgctcaaacgaaacggaaccagtaggtgtagaagcggtcaccctgtcaaaatagtgaacaaggcacctcaccttctgctcctggctttgcctcgaattataacacagtgccgcaaataggctatcgaaattgatcgccgggaggcacgcctcggccctatcggcggtggggaacaggcagaagagcgcgcaggcgagcagcgcggcggcgagctcctggctgaggagcacgagcccggcatcctgcgagctcaggatgcggagcccgcgagcctcgtcgccggcggcgcggtagtggccctcgagcagcgtggggaggcggaggaggaggcgggcgagggagggggcgacgtggtcgaaccagtcccgcgcctgcgcccgcgacaggaggtcgtcgaagaagagcgcgaagccctcggcggcgcggcgcgggagtgggtcgaggttgagcgcgaggcggaggtcggtgagggcgtcggcgaggacgtcgccggaggagacgcggctcacgtcggggcccagcgccagcgccttgagcgcctcctgcgccgccggcggccagaagagcgcgccgccgcggagcacgacggggaggtagggcaggatcgagcgcaggtcgccgcgcgcctccat

SEQ ID NO: 99824 - DNA, 1147 bp, Oryza sativa
  Clone ID: PAT_MRT4530_9759C.1
aaaaggtttataaaaagaaaaatctctaaaagtcttcttttcccccccttcctctcttgggccggctcggcccaactctccctccctctctctcctctccccgcggcccatcggcctcctccccgcgcgcgcgccgctgacaggcgggcccgcccgccgccctcgctgacgggtggggcccacctgtcatcgccttcctcccgccgctcccgccgctcgcccgtgccctagcgccgccgccgccgcggattccgccgcatcccgccgtccccgcgcgccataatgaggggggaatcattccccgcgatcccctctcccgtttccccctcttttccctctctctctccctcggattcgtccgatttgaattccgcaatcgtcgccggcgtcttcaatggagccgagatctccgcgcccgtttcctccctctccggccgcgctctccccctctcggcgctatatatttgctccccgtgcctccctcctccgtttccgccgttcgccgcttgctctcgccgtcggattcgtgctcgcgacgtccacctctctctccgccgtcgccgccgacctccggtacgccgccgacgtcgctccgggcttcctcccgtcagcggcgtcacctccatcggcttcgccgcgtcgtcgtcgacctcgtccgcccctccgcttcgctcgccgaccgccggaacgccgtcgtcctcgtcgtcccgagccgcgccgccgccttcttccgcttcggccgccgttcccgtcgtcgccgtcgatcggggtgagccgtggaccgctccgttcgcttcccccttccctcctctctctcgggtgccactccgccgcgccgttggtcgccggcggcgaccatcggggcgcgggtgcgccgttctcccgtcggccgtgccggcgaggccgccttcgggcgcgccctcgcggctgccaagtgggcccggccgtcagccgcccgcgcccgcgggtgcggctgacgcgtgggacccacggcgccggccgccgccagccgcgtgcgcccggtccaccgtggaccgagaggctgacgcgtgggccccactcccgtggacccggtccgcgcgcccctccctcggctcttgttcaccctagaataaacaaaaccctaactagtggacattatattcat

SEQ ID NO: 99825 - DNA, 170 bp, Oryza sativa
  Clone ID: PAT_MRT4530_975C.1
ggcggaggtgatgcatcagcccgtgccggtgttggaggtgccgtaccaccggtgcgtcgccaagggtgtcgaggaggtggccgtcgcggccccaaacatctaaactcttaatactattgttgctccattccaatgtctcaagttcactttcttactaattataactcgac

SEQ ID NO: 99826 - DNA, 726 bp, Oryza sativa
  Clone ID: PAT_MRT4530_97600C.1
atgccaagcgcgctcgccgccctcaccgctctcgcctccgcctccatgctgggcgtactcaccgccctcgccgaggtcgcaccgctcttgcttccgccttcatgccaggcgcgcttgccaacctcttcgccggtcatgccgccagtcacgccgctctcgcctccacctccatgcttcgcgctctcgcgccctacctacatgagagggtattgctttggaaagctcagagactggctagaagaattgagataccgtgacggggacaccttgttcggagctccttacgatttccgctacgccccgccggtccctggccaaacctccgaggtgtactctcgctactttgacgagctcatggcgcccgtcgaggcggcgaccaagaagaagcggaagaaggccgtcatcgtggggcacagctacggagggatggtcgcggtcgagttcattccgagcaccccacgggcgtggcaaggcgagcacatcgagcgcctcatcctggtcgcgcctacgctcccatatgggttcctaggctcggtggggtcgagttcgatcctcctcctgactgccacatccacggcgcggtccgtgaggcccatgtggaggagcttcgagtccgccatggcgaacttcccgtccccggctgtgttcggccgcgagccgctcgtgatcaccaagaagaggaactactccgcgtacgtaatggaggatttcctagccgccggttga

SEQ ID NO: 99827 - DNA, 325 bp, Oryza sativa
  Clone ID: PAT_MRT4530_97601C.1
cttctttcgtttcctcctcgtgagctcgcccctgcgcggccggggccgatttaaatcccgcgagcgtgcaccagcgcccggcgctggcgccgtcgctcgtcctgttgcttccccccgcatcctggcgagcctccatccgctaccctacgcgcaccctcttcctcatctctctctggtctcttcccacgcacttcttctcgaatttgcgaagaaccctatggattctgttctagaaagctgccttaatctgactaactagtcacagtttgtttgttcccccaagtagtttggggcttcaattgaacccccctgtcagacccacgct

SEQ ID NO: 99828 - DNA, 221 bp, Oryza sativa
  Clone ID: PAT_MRT4530_97602C.1
atgaggcgccagcagcagcaccgaagccgaaagggggatgggggagggcgatggactggcattggtggcgggtgcatagaaagcttgtggttaggaggtggtggtggatttggcggcgaggagccgtcggaggcaaggaagacagcggagcgagggcatctcgccaccgacggctcgaggaggaagaggggagggtggcaggaaggaggctggctggggag

SEQ ID NO: 99829 - DNA, 123 bp, Oryza sativa
  Clone ID: PAT_MRT4530_97603C.1
gtcacaacgaatacgaaataaccattgctcggacagggagtacagtacatcagcatccccattcaccggtctcgaaagctatctctacgcaatttatgagaacgacagcgcgcacagatcaaa

SEQ ID NO: 99830 - DNA, 2139 bp, Oryza sativa
  Clone ID: PAT_MRT4530_97604C.1
atgccgtgggagtacgctccctacgacccgtacccttcctccttcccgaacgtcacattccccaattattactacatgaaggcgagctcgacgccggcgaacacggtgtaccaagaaccgtacggctacggcaacttcgccgccaatgtctcctacaacgggtacgactacgggtacagcaacccaatgtacggcattccggtgcccccggatggggaacggctggccgaggatcgtgcccgggaggcggcggcggcggcggcaccggcgccgccgccgccgatgccaatgccggaggtctcgccctgggacttcttcaacccgtttgactcctacgactacaaccagcagcttccgcagtacaaggatgccaatggatcgttcacgagtagccccaactcgagcgaggtgagggaaagggaggggataccggagctggaggaggagaccgagcaggagtcgatgagggagtcgatcaaggcgaggaaggcggtggagagcaccgcgtccacccggattgacaatgccgatgcagtgaatgccaaggcgaagacggcgtcgatggagcacaaggagtgcgagatcgagagtgtggggagtgcttcggttcttgattctggagaggagagtgtgtgcagctgtgaatgtgatcatgccgatggcaatgccggagcaggagcagcaactgcggcgccggctggagatgatccaaggatggtgaagaaggtggcctcagaggagcactcgtccatggtagtggctgaagatgtgctgccgaagaacttcggcacaagggatgttgcagatgttgtgaatgagataaaggagcagttcaactctgtggtcgcctgtggagacgatgttgctaggatccttgaggtcggaagtatgcggtaccggcctcggagaagaattgtgagattggtattttcgcggttgatgggggcctttgccttgttgttttcttctgtatctgagccccctgtggagaatttggagcagacagcattaagtgcatctggaagaaatcataattcgagtcaaagaattggtagtgccagtgatattgagtttaatactctttcttcagtaatggataggttgtacgtgtgggagaagaggcttcataaggaaattatggaggaagaaaaattgaggatcacatatgacaaacaatggaagcgcctgaaagagttggacgacaatggtgcagaaccatataaaattgattctacacgggcctcaattagtacactgctcaccagaatcaacattacaattagatcagccaaagttatttctaggaggattcacatactacgagacgatgagctacatccacatcttgttaaacttattcaagggcttgtgagaatgtggaaattcattcttgaatgccatcggaagcaatttcatgccatactcgaaactaaatctcatgttcttatccctaagaatgggccagaaaggaactccaagattacactcgaactagaaatggaacttttgaactggtgttcctgtttcagcaattggatcctgtcacaaaaggcttatattgaaactctcaatggctggttagtcaaatggcttcctgaggaaaaggaggaaacacctgatgggatcgcaccgttttctcctggtaggcttggagctccagctgtgttcatcacagctaatgattggtgtcaaagcatgaaaaggataccagaaggtactgtcataggtgcaatggaggctttcgctgttaatgtgcacatgttacgggagcggcaggacgaagagcagcaacagaagctgaaagctgactatttatctagagattatgcaaagaggctcaaatcttttcaaaaggaacatggcttggctggacatcatgaagctgataagacggtgttgcctgttgccgaaaataacagagcagttgatagccgcattgtagctttggacgcattgcataagagattggatgaacaaagatctaggcatgaggaagccgtgaatcaaatccaagagtcaagtgcaacagatctgaaagcaggtctaggtccaatatttgaagcattggaatcttttacccaagatacgctgaaaggttatgaaaatgtaagaattccaatcaatggttgtggagcttga

SEQ ID NO: 99831 - DNA, 665 bp, Oryza sativa
  Clone ID: PAT_MRT4530_97605C.1
gaactaagggcgtgtttagctggggaaaagaaaatttttgggtgtcacattttttgggtgtcacatcggacgtttgaccggatgtcggaaggtgtcgacttttgatgtcacaattctggtatttgcatagtatggggatcgtcggtgctaggatatacgcgagacagtacaatatgtagggtagcctatctaactgttgtcgacatggcggtctgaaggtatgactcgtagtcgacaacagggtagccttcctcctcgagctcacgcccgacgaaatcagagaccgtgctagatccctacggccggcctctgaaggtaccggatatggtcgatccaggcatatctctgatatcgatatccggcagcttgtcttggcgcgccccgcggcgcgcgctgctcgggccacgtcgtcgcgggcgccgagcaccaccaagatgctcgcgatccagccgcatcgggagcagcgcgaccagaggtcacatgtgggcgatcggtttttggcctttcctgtccaagaaaggtcagcagctgcggtactagcctggggcgccggctcggatttccgatggatccagcagcgcggctccgtgtcgtcgtcctcctcctactactcctgctgcagagatgctcgtggcaacgtgtggcgttgcagatcatcacagtag

SEQ ID NO: 99832 - DNA, 3654 bp, Oryza sativa
  Clone ID: PAT_MRT4530_97606C.1
atggtggtggcggagggagagatcgagtcgctggggtctcgcgtcaccaagctcacctccaacctcaacaacatcttggggtcactccaaggactggagaaatggattccgaatgtggatgcgggcatcaagtctctccatcaagctgtggacgagatttcctcgcgtgtgacggcgttggagacgaagcccgcggagtcgccggcaacggcaactccaccacccttcgggcacggcgtgaacgatggctaccaaggtgacacttacgagatccctgcgatccaggagcgaaccctggtcaaggagagttgggcagagttagtcatggcagtgcatagtaaatttgggaaggataagtatcaggagtatttggaagaattagaaaatttgagtcaagtaactagtgtagagagttattacagtaaatttgaggaactcatgcataagttgctagtttacaacaaggggtttgatgagacattttttgttaccaaatttgtcggtggtttgaaaactgaaataaaggcagcaatcaagctgcataagcctcgaacagttgatgctgcgttgtccttggctaaaacgcaggtggaactacttggggaaatccacaagaagagttatcaacggcactcattcaaggaagttttcaagccggttaataagatgccatttcaagggaaagggattttgggagcagctcctgaggataacaagaaagctgaagagaaatcaaaatgggaggaacaatttgactctttaaaggcagcaagaagggcaaggggtgagtgttttaaatgtggggagaagtatgggcctgggcataagtgtccgaacttcaggaggatagtaaatctgaagaaggggatgcagaaagttcagaggaggaattggtattgtctgaatgtgcagctgcaggcacgatgggcaggaaaaccatcaagtttcatgggtaatacaaaaacaacagttgcttatcttagtggactcagggagctcaaaattgttcctgcagttgagtggtggtgccagggtcaaacctttgtaacagacttcaaagtattgacactgagtggctatgatatgattcttggtatggaatggctggaaacctttagtcctatgtgggtggattggaggaggaagaagttaaggttcacatatcacaaccagagactgacttttattggggtcaaagatcaaataaattctggcaagttgattatagcaaaacagatgcaagggctctacaaggatggcgctattgcccagattgtgcagttgtgccaggctgaggttccagcacatgcagggcagacatacccagctgagattgatcaagtgattgctgaattcaaagaaagggggttgaatgagatcactgtgaaaaacaaatatccaatgccagtagtggaggaattgttagatgagttggctgatgcccaatggtttacaaaactggatttaaggtcagatgatatactgatctatactagtaagtgctcctttgcccaacaacatttggactacttaggtcacgtcattggaattcatggggtatcaactgatccaaagaaggttatggctgtacaacattggcccattcccaagaatctgaaacagttgaggggatttcttggcctcgcaggctactatcggaaattcattaaggggtatggtattcttactaaaccgttgacagagctattgaaaaaagacgtcaaacacaaatgggagcaacaggagcagacagcttttgatgcagtaaaaatggcattgactcaatcaccagttctagctttaccagacttttctaagcaatttgtggtggaaaccgatgccagtgacaaaggaattggcgcagtgctgatgcagcaggggcatccaattgctttcattagcaaggcattgggtgttaaatcccaaatgctttccacttatgaaaaggaattcatggcaattttgttggctgttaacaagtggaggtcttacctgcaacatgctgaatttgtcatacaaactgatcacaagagtttgacccatttgaatgagcagcagctgggtacaagtatgcaacagaaggcttttgtgaagctcatgggacttcagtatgtgattaagtacaaaaagggggctgaaaatcaggtggctgatgctttgtcaagaaggggagaagaggaatgtgtggcaattactgtcagcaccccaaggtggatggagcttgtggtagaagaatatcataatcatccacagaccaaacaattattggcatctttgtgtttgaaccctgaaggggaggatgggtttcagttagtgaatggtgtcattcgcttccatggcaaaatttggttgggacatcatcctgaagcacagcaatctgttcttttagctctgcataacagtggagtggggggacattcaggcattactgctacatatcaccgaattaagggtttgtttgcctggcctgggttgaggaaggcggttcagacctatgtgtcccaatgtgaaatttgccagcaagctaaggttgagcattgcaagactcctggattgctccaacccttaccagtacctctgcaagcttggcacacggttacaatggattttgtggaaggattacctaaatctggagggtatgacacaattatgttagtggtggacaagttttccaaatttgctaagttcatacctttaactcatcctttcactgcatacacagtagccttggctttcattcaacatgtttatgatgtgtttggcatgccccaagtgattatctctgacagggataggatattcactagcgctttatggcaagaattgtttcggttggctgatgtgaagttaaacatgagctcttcttatcatccccaaaccaatggtcaaacggagcgactcaaccaatgtttggaagcatttcttcggtgtactgttcatgctataccaagcaaatggtctggatggctatcacaagctcagcattggtacaacactttgtttcacagtgtgttgggcaaatccccttatgaagtactatttgcaaggaagccaactcattttggcttagtggacactggtagtatcactgtgcctgatgttcagatttggttacaagagcgtgcacagatgaatgaggtgttgcatcagcagctcactcgagctcagcaaaggatgaaacaccaggttgacaagaggagatcagaacgtcaatttgcagtgggagactctgtctatctcaagttacagccatttgctcaaatgtctgtggcacggtgttcatgtcagaagttaagtttccgctattttggtccttttactattctggaacaaattgggaaagtggcatatcgtttggttttacctgcttctagtcatattcatcctgtagttcatgtgtcactcttgaaagtggctgtcaaacctgatgttgaggtcagtccagaattacctcttcaagaagctgaagttgcagttggtgtcctacctgagttgattcttcggcgcaatttgatcaaaagaggtaagacagttgttccatatgtgctgatcaagtggactggaatgccaactgaattggctacctgggagaatttgtgccaattgaaatctcggtttcctcatgcaccagcttggggtcaagctggtccttaa

SEQ ID NO: 99833 - DNA, 2066 bp, Oryza sativa
  Clone ID: PAT_MRT4530_97607C.1
ctgcaccccggcttgttgagcaggatgaggctacgactgcatttagaacccatcaggggcactatgagttcaaggtgatgccattcggccttaccaacgctccagccaccttccaacgacttatgaacactatattttctgcagtgataagaaagtttgtgttagtctttgtagatgacatactgatctatagtaagtcgcttgaggagcatgttgatcatctgagaacagtttttcagttgctgcagcaacatggtctctttgtaaaagctaataagtgctcctttgcccaacaacatttggactactcaggtcacatcattggagttcatggggcatcaactgatccagagaaggttatgactgtacaacattggcccactcccaggaatctaaaacagttgaggggatttcatggcctagcaggctactatcggaaattcattaaggggtatggtgttcttactaaaccattgacagggctactgaagaaggaagtcaaatacaaatggaagcgataggagcagacagcttttgatgcagtcaaaatggcattgactaaatcactagttctagctttaccagacttttctaagcaatttgtggtggaaactgatgccagtgacaaaggaattggagcaggggcatccaattgctttcattagcaaggcattgggtgttaaatcacaaatgctttccacttatgaaaaggaatgcatagcaattttgttggctgttaacaagtggaggtcttacctgcaacatgctgagtttgtcatacagactgatcacaagagtttcaactgggtacaagtatgcaacagaaggcctttctgaagctcatgggacttcaatatgtgattaagtataaaaagggggctgaaaatcaggtggctgatgctttgtcaagaaggggagaagaggaatgtgtggcaatcactgtcagcaccccaaggtggatggagcttgtggtagaagaataccagaatcacccatagaccaaacaattattggtatctttgagtttgaaccctgaaggggaggatgggtttcagttagtgaatggtgtaattcgattccatggcaaaatttggttggggcatcatcctgaagcacagcaagctgttcttttagctctgcataacagtggagtggggggacatttaggcattactgctacatatcaccgaattaagggtttgtttgcctggcctgggctgaggaaggaggttcagacctatgtgtccaatgtgaaatctgccagcaagactcctggattgctccagcccttaccagtaccactgcaagcttggcacacggttacaatggacttcgtagaaggattacctaaatctggggtgtatgacacaattatggtagtggtggacaagttttcaaaatttgctaagttcattcctttaactcatcctttcactgcatacacagtagccttggctttcattcaacatgtttatgatgtgtttggcatgccccaagtgattatctctgatagggataggatattcactagcgctctatggcaagaattgtttcggttggctgatgtgaagttaaacatgagctcctcttatcatccccaaaccgattgtcaaatggagtgactcaaccaatgtttggaagcatttcttcggtgtactgtgcatgctacaccaagcaaatggtctggatggctatcacaagctcagcattggtacaacacttcatttcacagtgtgttgggcaaatctccttatgaagtactatttgcaaggaagccaacccattttggcttagtggacacaggtagtatcactgtgcctgatattcagatttggttacaagagcgtgcacagatgaatgaggtgttgcaccagcagcttactcgagcacagcaaaggatgaaacactaggctgataaaagaagatcataacgtcaatttgcagtgggagactctgtctacctcaagttacagccatttgctcaaatgtctgtggcacaacgttcatgtcagaagttaagttttcgctattttggtccttttactattttggaacaaattgggaaa

SEQ ID NO: 99834 - DNA, 421 bp, Oryza sativa
  Clone ID: PAT_MRT4530_97608C.1
acagagaaagtgagctgagctatagctcgttgttggcagccggtcaagctctagttcatccgtgtcacgcccataaattcacgaaccagaatttctaagcttgacggcggcaacgaaaccaacttctctgagacagcccaactgagaagaacttcagctctggtgtggggaagagagagcaagattgagtactatccactgcactcagcaagtcataccagaagagaaggtatgatgcaagatatatccaaaggaggctaaaggtttatttgcataaagcaggcatttaaaagcagtagttgaaagcagtaaaactgtaatagtaattaatcaatattaaccaatcactgctcaacactacaccacgttgagacagggccaatccaccacctgaagctctagtgtggttcggttctattgt

SEQ ID NO: 99835 - DNA, 946 bp, Oryza sativa
  Clone ID: PAT_MRT4530_97609C.1
gggggggcggcacgagggctgcttccgctcgtttagaaaacgccaccaccaccaaagtcaggcacccccgccgagagagttagctagctgcgcgcatgcaggcgaggcggcacagaggattccggctaggccggaagctgctcgggctctggcgatgggcgctctgccaccggcggcggcggcgcggccgcggctacctccgcctgcagccgtgcccgggagctgcaggcggccgctcccctctgctggccgccgggagcgtcaagaagcagccgccgccgccgcagcagcagatcgtcgtgcatcagcgtggtggggagaaggcggtgctcaagtgggggcggtcgctggcgcggcggatgaggctcctgcggcggcggggatccgagcggctcctggaggaatcccccggggaggcgacgacgcccaaggggcaggtggcggtgtacgtgggcggcggcgagcccggggagtcgatgaggtacgtggtgccggtggtctacttcaaccacccgctgttcggcgagctgctccgcgaggccgaggaggagttcgggttcgcgcacccgggcggcatcaccatcccctgcgccgccgcgcggttcgagcgcgcggccgccgtggccgccgcgggcggcggcgggaggaaggtgcccacctggtggtagcacgtggccaggccgcggccggtgtacatacatacaccagcgtgtcatgtgtgctcgatcgagtaggactcaaacgtgtacgtgtattcttttttttttttggttttgttttttacttcttcttgttcctcccctttctctgtggatgcgcatccatctctgcatgcgatgtgaggaggcctagttagatttaccgaccggaggatgctactactagagtaatactataattctttttgactcaaaaaaaaaaaaaaaaaactcgagaaaaaaaaaaa

SEQ ID NO: 99836 - DNA, 4228 bp, Oryza sativa
  Clone ID: PAT_MRT4530_9760C.1
atgggagggttctgcacgttcgtggctgatgtatctcccccctactcaatttcttcgtggtcagacctgtggcagcagttcgtcgccaatttccaaggaacatacaagcgtcatgcgatcgaagacgatcttcacgcgttaacacataactcaggggaatctttgagggaatacgttcggcgctttaacgagtgcaggaacaccatccccgagatcaccgacgcttatgtaattcgcgcctttaagtttggtgtcagagatcgctacactacccaggagttggcaacaagacgcatcacaactactcgaagactattcgagatcgtggaaaggtgtgcccacgtggatgatgcactaaggcgcaagaacgacaagccgaagactgggggagagaagaaatcagctgcagacacatctgagtcaaacaagaagaaaaatcgcaaaaacgggaaaaggaaagctcaagcggaagtcctcgcagcagaatacgcgaaccctcccaagcacccggacccacaaggaagcgaaacaaagaaatcttggtgccccatacacaaaacagatagacattctctggaggattgccttgttttcaaaaagtcgcccgagaagcacatggcgtttgaaaaaggcaagcgagtacgcgttgtcgagaaaaacgaggagtcacctcctcacgaatcggacttcgcgtacccagactccgacctccatgtttcacacatcttcggcggctccatgacgtactcctccaagcgagaatacaagaaagtggaacgcgaagtttgttcgacatggcagggggctgcacccaggatgaagtggtctgagcagaagatggagttctcggaagcagaccatcccaaaacctcggttatcccgggacggtatccgatcgtggtcgaacccactattcggaacatcaaggtagcacgagttctcatcgacgggggcagctcgatcaaccttctttttgccaccactttggatgcaatgggaattccacaaagtgagctgacaccaactgatcaacccttccatggaattactccccaatcatcatccagacctttgggcaagattacgctgcctgtgacctttggccaagccaacaacttccgaacagagcagatcaccttcgatgtcgctgaattcgatacagcttacaacgccatcatcgggagaactgcacttgcgaagttcatggccgcatcccactacgcatatcaagtgctcaagatgccgggaccgaagggaacaatcactattcaagggaacgcaaagctggcggtgcagtgcaacaagcgaagcctcgacatggtcgagcaaacgcccactccacccgccatgtctgagccacccaagaaagaactcgcgctcatcgccttcctccgcgacaatgccgacgtgttcgcttggcaaccgtccgacatgccgggggtccccagggaggtgattgagcacaaactaatggtgcgacccgataccaagccagtaaaacaaagactgcggagatttgcaccagatcgaaaacaagccatacgagaagagctcgacaaacttctcaaagctggcttcatcagagaagtcctccatccagagtggctcgtcaacccagttatggtgcggaaagccaatggaaaatggagaatgtgcgtcgacttcacagacctcaacaaggcgtgccccaaggatcactttcctctccctcgaatagaccaactggtggattcgacacccggatgcgaactattaagcttcctcgacgcttactctggctacgaccaaattagcatggcgaaggaggacgaggaaaaaacaacgttcatcacactgttcggggtattttgctacgtcaagatgcccttcggattgataacagttgggaatactttccaacgcacggtccagggcgcacttagcaatcagcttggcaacaatgtcgaagcgtacgtcgacgacatcgttgtcaaaaccaagacaagcgactcattgattgatgacctccgggaaacgttcgacaacctccgacgatatcgcctcatgctcaatccagagaagtgcatgttcggagtaccgtcgggcaagctactcggattccttgtttctggcagaggaatagaggcaaatcccgagaagatcaaagcaatcgagaacatgaagtcgcccacaagactcaaggaggtacagaagctaaccggatgcatggcagcattaagcagattcgtcgctaggatggtagaacgaggacaaccttttttcgccttattgaagaaacaagacaaatttgtatggacacaggaagccgaagaggcatttattgcactcaagcgctacctatcaaacccccctgtactcgttgctccccaacctaatgaagaattattcctttatattgccgctacgccacactccgttagcactgtcattgtcgtcgagcgagagaaagtacagcgaccagtctattacgtcagcgaagctctccatgacgcaaagacaagatacccacagattcaaaaactgctctacatagtcattatgacatcaaggaagctacgccactacttccaagcccacagggtcacaattgtttcctccttccctcttggcgaagttgtcagaaacaaagacgttgtcggccgcatcgcgaaatgggtagtcgagctaagccaatttgatgtccacttcgtgccgcgaacagccattaaatctcaggtactcgccgatttcgtggccgattggaccatgccagataacaagtcagataaccaaggcgacaatgagacatggacaatggcgttcgatggtgcactcaatagccaaggagcaggcgctggatttatcttaacatctccatccggagatcaattcaaacacgcaatccaccttaacttcagagcaacgaataacactgcagaatacgaaggactacttgccgggatacgagatgcagccgcacttggcgccaagcgactaatcgtcaaaggggactctgagctagtcgcaaaccaggtgcacaaagactataaatgctctaaccccgagttatccaagtaccttgcagaagtcaggaagctcgagaagaggttcgacgggatcgaggtccgacacgtctatcgcaaggacaacgtcgagccagacgacctagcccgacgcgcatccagacgagaaccgctcgagcccagcacctttctcgacatcctgacaaaaccttcggtaaaagaagtaagcggcgaagttggcccaagcaccctcgacatcagctcggaggtcatcgcggcagaacgcgccgtggctgacattgaaacaacggatgactggcgcaccccattaatcaaattcatcagcagcgaggagttacccgaagacgacacagaggccgagaaaataacccgtaaagcaaaaatctactccctcaaagatgcatgcgacatggtccagcgatgtgaagcctgtcaattccacagcaaacacacaaagctacctgcacaagcgcttcaaacaatccctctgatttggcatatgtgggtcccacgccgccgaaaaacttggcccattcccacgaggacaaggcggctacaaattcctatttgtagcgatcgacaaattcaccaaatggatcgaagcagcacccactggagaaatcatggccgacaacgccatcaagttcatcagagggatattttgcagatacggactaccgcaccgcatcataaccgacaacggctcccaattcatcagcgccgatttccaagattactgcatcggcttaggagtcaaaatatgcttcgcctcggtctctcaccctcaaagcaatggacaagtcgaaagggcaaacgacatagtactagaagggataaaaacccgcgtctacgacagactcatgtcacatgacaaaaaatgggttgaagaactcccatcagtactatgggccgtgcgcactacaccgacaacgtccaataaggaaacactcttcttcctcgtgtacggctctgaagccatgctccccggtgagctacgacatcaaagtacacgagtacagaagcattccgacaagaagcaggatgaacagcgagacatctatgtaaaccttctcgaggagcatcgtgagcgagttgccgtgcgagcagcaagctaccaacaggccctccgccgttatcacgagaagcgcatccgagcacgcatactttcgatcggtgactacgtcctccgacgagttcaaacctaa

SEQ ID NO: 99837 - DNA, 529 bp, Oryza sativa
  Clone ID: PAT_MRT4530_97610C.1
aaatgatcgtaccagatgttcttctatagaacatcattcctttgcctgtgctgatcttctctggtacacgaagggtcatgctaaatgtaaattcttcctctggtttgcatttcagtagcactattggacggctgatctcctccagaagcgtggtattgatagccactcggtctgccccttttgcgcttagtagcttgagacggcgaaccacatcctcctcgactgcgtgtttgctcgtcaggtctggttacgagtgctgtcacctcctggctgggctgccatctctcccctccgtggcagctggctccaagacgagtggccatcttctagggcatgtttacttgatcacctccgtgccagctttaattccctggtccttctggtctcttggcaactgtggaaggaacgaaactccagggtttttgactttgcgcttttttcggtctcaatggttctagagtccatcctttcggagggctggttgtggtttttagcaggcgttgcttcctttggggatttgttgggagtg

SEQ ID NO: 99838 - DNA, 647 bp, Oryza sativa
  Clone ID: PAT_MRT4530_97611C.1
gccggtaggaattaagggatgcacctacggctagacaacttggctaccgagcaacggctaaagcggcgggtaggttaaagcggcacacagctgcgacacggtggcactagggcaacttggagacacagacagatgtctcaccgatcaaaaacgttcggagagggagggatgatgacaatgttcagcaacacacggagacgacaacgctagacgaaccacggattagattagattggattaaggaaaacctgacaggtgaacagcataggagcgattgtgtagccgaatgggtagatagcaaatctgaaccattcgtttgcttagctttaaaaccgtctccacaaaagtgtcggttaagcaaaaagaagtatacttttgattggaccatgtgagatcatattttcgatgatttgctaaaaaatgattatattaaattacatgatcattatgtcatgccatcacttccagatttaaaagaacaaatttattgtaagtggcacaattcattcgatcattgtactagcgattataatatatttcgtcagaaaatacaatcggctaataatgaaggccgattacattttgcaactccaagaaagtcatatgccaaggataacccctactggataaggtcaatcgatgactca

SEQ ID NO: 99839 - DNA, 558 bp, Oryza sativa
  Clone ID: PAT_MRT4530_97612C.1
atgtgggccccacacgcatcttctccctttcttcttcctcccctcccttctctctttctttctccctctcctctacggccgtccgtggggagcgagcggcggcggcggccgtgggctggagctgaagcggcggccgctcgccgttcctctcgcaccaccaccacccgcaccactcggcggccggcatcgagacgtcgtcggcggccgagcggcggcggcaacagcccacgggcagcggcggtgggcggcggcgggcgggagaagcagtgggaggacaaggggaacggcggcgggcggcagaagcagtgggaggacgaggggaacggcggcaggcgggagaagcaggccacggcggcgacttcgactttgactgctgaaatggcgatgggcggcagttgcgtggcagccgacgaagccaacggctcctgtgacgaggacgaagcgatgtcggcgaggggtggtggtggctcgtgctcgtggcgaggtagaggcggtggaagttgtgaattagtgaaactgcagcttgacctatatttgagggagtccgccgcgccctaa

SEQ ID NO: 99840 - DNA, 2900 bp, Oryza sativa
  Clone ID: PAT_MRT4530_97613C.1
atgtcggccgcggcgagctggaccgccgaggacgacgtcctgctgaagaacgccgtcgaggctggtgcctcattggaatccttggctaaaggagctgtatgtttttcccgcaaattcactcttcaagaattacaggatcgttggtcctcattgctgtatgactcagagacctcaggacaagcatctgccctcatagtcaagtatgagactgaactttcaacctccaacccgaccaaagcacataaacttttctacgtgaggagaaaacatctttctctcaggaagaggaaaattgagagtgtaaagaatcagtattatgcaatgagaaagagaatctgccatgatccatgtttggctgcagattttggttatgttatcacaccctgttcatgccctgtaggtagtgattgtgtatgtgatggattatttaacttgttggaagataatcatttgatccataacgttaatcaagctccagatgttgtaaatggctatggtcacataggcgaaagctatgctgatggacaagatgtacatgccaaagataatggacattatatatcccatagaaggcatgataaagctgctgggacagtggcaagtgatggaagcactaattgtgaaagtgcaaatggctgttctgatgtaggtaagttatatggatacaacttcatgccaaagaacattcagtcaagtgaaaggaatattgcctctccaaaggacctttctgatgtccaggactgtgtgcagcctcagcaaccaattctttgtgaagaatcagccaatggaatgacagggttaaaggctttactgaatactgatcaagattgcataaaacagaaccagttttctggtaacagcaatgaaatattgcaagacccaggctcgctaaaagcaatgagtgaacattggtgttctcaggcacctagtgctcctactaggaagaagtttcagggtgttaatgcacctgacatgctgacagatgtgcatcacaaagagcaagaaattcttgccttttctgatgacaagaaaaaggaaactactaacattgacacattttcatgcaaggtgaatgtggagaatggaatgtctggatctggcttagacgatgcaacagaaggtgaagttatgcactcatgcttaatggatgccagtcagggtgaagactttgagctacttaatagcgagaatattttggattcttctcttgacccaaatctggaaggtttaggcgatcgacatgctaatgttattctgaaggacatctccaaagagcaccttctggacattcctcatgtaagcagtgcctgtggtaacaacacagatccaatccatgagaagcatgatgtggcagatatttctggagtggacatgatatacacaacagaagtgccttttccttgtgctggtattgtgtgcatattaaacaccgaagatcctgaaatcccttgcaatgatgatatctttacacctgggcctgtagcatccacctctacttgtgaccagaattcacagcacaatatgcatttggtttctgccaaacctattcctccactaaatgctgctgacttgaatcacaccgacttggttagtgatgtccaaccattgttacttacaatgaagttggaaccttacaccttggaacaaaaggaaactttggtgggtcttaatgaatcttgtaccgtaagaagcaagtcacctgttatgcctgttgatgctagcaatgcaaatgcatgcacatcaactttccattctgctgcagaatttgttaaaaaatctacatgtggtttagtgcaacatgaatgttttgataacttggggagtgtgtctttggatgagtgtattggagtgcttgatgaaatgaattctaaggttcctgatgagtcaggaataagttgtgatgctactacccaaaacagcatttcagcgcatgcattgccagatgtggaatttcttaatcccataacaaccacttcaagcccagaagggggaggatctgacagtgaggacggtattccaaactatttcgacatagaagctttgatacttgatcaggatttaattccatgggatcaagaatctgatttcatccagctcgaagtttccaggtttcagtctcttgaaagtaggaaagacttgataagattagaacgaggtgcccgctctaatacaaacagatctattatgtcccatggtgcttttgcagttctttatggccagcatttgaaatactacataaaggatccagaggttacacttgggagagaaacaagtgaggaacatgtcgacatcgatttgggaaaagaaggaaaggcgaatacaatatcccgtcaacaggcaattatcaagatggataaaggtggatctttccacataacgaatataggaaaagctccaatcttcgtcaatagcaaagaagttccatgcaacgaatgcactcacttaatttctgatgcattacttcagataaggcacatgaaattcatttttcacatcaatcaggatgccgtgaggcaacatatagttcgcagtaggagaggaacctcccaaggcaagtacgcagtatttaattgggatgaaaagccatgaattaaggttacgatcaagctcatgtgtgaatttattgtcagtaatatatatcggcaggatagaagtatatagcaccatatctaattcggtcccatcctttgcatgtaaatcgttgtatatttccatgcttatcatttagtatataatagatatatgctcaattatcgtcttcagatccatattgttgtaaggtgccacggttttatgtttgaaatttggatttaaatttcatcgacaaaagttgttttagtggactgggaactgaattctcaaagatgaaccccttgcatgctttaaaaaaaaaaaaaaaa

SEQ ID NO: 99841 - DNA, 1707 bp, Oryza sativa
  Clone ID: PAT_MRT4530_97614C.1
atggcggctgatggtgatcactgccgcctccccgacgactccctcttcctcggcttcgattgctccacgcagtcgctgaaagccacggtgctggacgccggcctcaccgccgtcgcccacgacgccgtccacttcgactccgacctgccgcactacgccacccatggcggcgtcctccgggacccatccggcggcgacccgggccgcgtcgtgtcgccgccgctcatgtgggccgaggcgctggacctgctgctcgccaggctcgcgcccagggtggactacgcccgcgtcgccgccgtctccggcggcgcgcagcagcacggcagcgtctactggaagcgcggcgcggcggcggtgctcgcgtccctcgacccggccaggggcctggcaccgcagctcgccgcggcgctcgccacgacggagtcgccggtgtggatggacagcagcacggcggcgcagtgccgggaggtggaggcggcggtcggcggcgcgctggagctggccaggatgaccgggtgccgcgcgcacgagcggtgcacaggcccgcagatcaggaagatgtaccaggcgaggcggcgcgtgtacgacgacaccgagaggatctcgctcgtgagctcgttcatggcgtcgctgctcgtcggcggctacgcctgcatcgacgagaccgacggcgcggggatgaacttgatggacatcaccacgcgcgagttgcgcagggacgcccttgaggctactgctcctgatttagaagacaagattgggaagctagcaccggcgcatgctgttgcaggaactttatctccttatttcgttcagagatttcagttttcaagcaactgtctagttgttcagtggtcaggggacaaccccaacagccttgcaggtttaactttgagcgatcctggtgatctagcaatcagtcttgggacaagtgatacagtttttgggataactgatttacctgaaccatccctggatgggaacatcctccctaacccagtggaccccaagacatatatggttatgctttgctacaaaaatggctctctaacacgggaagatgtccgcaatcgttatgctgacgggtcatgggatgtgttcaacaagcatttggagaatacagctcctttaaatggaagaaaattgggatattactacaatgagcctgagattctgccaccacttccagttgggtttcaccgttacgttgtcagctcctcagccagtggatctttagatgagatggtggagcatcagataaaccagtttgatcctccttcagaagtccgtgcaataatagaagggcagttcctgtccatgaggggccatgctgaaaggtgtggtctgccagtgcctccaaagcggattatagcgaccggtggagcatcgtcgaaccagatcattctcaagacgatggcatccatttttggctgctcggtttacaccgtccaaagaccagactctgcctcactgggtgctgctcttagagcagcccatgggtggatttgcaaccagaaaggcaagtttgtgcctgtttcatgtctgcactcggacagactgaatagaacatcactaagcattaagctggctgctccatttggagactcggaggaggacattgaccttctgaacaactacacgttgttgatgaagaaaaggctggagattgaacagaagcttgtcgagaagtttggtcgacattcatga

SEQ ID NO: 99842 - DNA, 252 bp, Oryza sativa
  unsure (1)..(252): unsure at all n locations
  Clone ID: PAT_MRT4530_97615C.1
cgccgtcccacctcgccgcccgccgccgaggcggagctgcgccgatgaacacgtcgnagttcatggacaagcagatcctcggcctcgcggcctccgcctncacctcctccggcgtcggcgtcggtggcggaggaccggagctcctcgatctgatgagccccaacccgcaggaggagggcgaggaccgnctccgtcgccggcacagctcctccaacggcagngcngacgacgtgctgccagctacgacttgca

SEQ ID NO: 99843 - DNA, 759 bp, Oryza sativa
  Clone ID: PAT_MRT4530_97616C.1
atgcccgatcggcgaagcccccacgggccgtacgcgagaggcgctgtgcgttgcatgggcgccaggtgcgtgcagcagcaagggaggatacagctggccgcgcggccggccggtggcaggggaagcagatggctacagggcaaagaagaacacgacaccgtccacacatacggggtgcgcgaggagagcgagcgaaggagcagccatccatccgtacccgcgtcggcccagccgatcgatcaggcgccggtgtgggggcacacatcgatgcgtcgcacctgggcggcgacgtgcgcgttgctgtcagttaatagggaggcccttggcgctgcctgccgtggaggaggccgcggccagatcggggctatactccgctggtgcggcttggacgtattggaagcggcggacatcggatccggttacttggctgtgtacccagacagggagatattccagtgtagaggatggaagaccccggcgcaaaatgcagaaaagaggatggaagaccccgcaaaatgcagaacaaagagtgcattgagagtcagggtgacgttccaagaagaagaggaggccccgcaaaatgaagatcagagaaggccatggaacgcgccggtacagtcgtacagaggccctcatggccgtggcccgtgcgagctcatctgcctgcaaggcaaaaaaaaaaacaagaagaagaagtacacgcatggccgtgcccggctgctcccctacgccccgtcgcagcgcaaaccactcccctag

SEQ ID NO: 99844 - DNA, 1776 bp, Oryza sativa
  Clone ID: PAT_MRT4530_97617C.1
aaggaaattcgtatgcacaattattcattgacttgagaaaactcagttgatgacaattagaacagaacatttacatgagagaactcaggtggccctaagagcttcacattacagggattaaacataagaaaacccccccagcaacagccactggattgatcatacaagctgacacacagacactgcctccatagaactagaaaccagggtcattgaacaattaatttcaccctgccttcagttcagagtccagaggccaaccaataccaagttcaggaaaaatggctgccgctgatgaggctctcctcccttacgacaacgatcacaaaaccatgagaggatccatttttcatgcagtgatgaacatgcactaacaagagagaaactcactagatggaacagcaagaaaagaaaagaaaacttagttgaaaaggatatatatagagagacaagaatgatcattagatcattctgccttctgaactttgccatcgtcattcgtcagacacagcggcatctgatcagcagagcgccaccgcccggtcggcggcggctgcggcggcggccttgagcatcgccaagccgtacactccggcgtgctcgctcggctccggctgcggcggcggcaggagaaggaggcagcggcggtcgagcagcgcggcgagcgcctcgcgcatccagccgtagcgggagaggcggaaggcgtcggcggggggtagccagcggcggccgtgggtggcctgctccggccaccggtccatctcctcggtgacctcgagctcgaacatgtagcccttacacgcgccgccccgggggctccggctcgcctcgccgccgccgccgctctggctgcccgaggtgctcatcacccacatccccagcgacactctatatattgatatatactcgcaatattcaaatttatagtcaaaaatctctttgtctttaggggatgaaaggattagctgaatctgcttcagcttgaaaattttgatcaacattacagacactgacgtgtaggataataggaggttacaacctgcccgtatatcagtgattgtgatggtagtaacattattacggtagaggctcatcacgttgatgttgcccttgacgccggcctcctccatcgcctcccggcacgccgcctcgtacacgtcctcgtcgtcctcccacccgcccttggggaagacgaggtcggctcgattgggcgtggacaccatgagcacctccagctcgccgccgccgccgccgccgccggcggcgaccacacggtacggcacgcagccggcgacgaggcggtactcgccgtcgtagcgctgcctcagcctccccttcctcgccgccacgaccgcgacctcctcctcctctttcttcttcgacgacgacgccgccattgctggatcgatcgatcgatcgatcggagccgtagatcgatgcgacgagctagcgacgggatgggtgtcctcggcgaactctccttcccgcgcgatttatttaaaggggcggagaggcgggggtcgtcgtcgtcattgggtcaaccgccattaacgcacccccagcaacacacaaaattaaacaaagcaacaactcgattctttctcttcaactcccaagaagaggaagaaaagaaagaaagaagaagaagatggataaaagaaatcgtggaggaacgaattgggcggcgcctcgagccggcctatgattgagatcgaggaggtgctctgctcctgctggctattctattcttgcggacgcgtgggtcgacccgggaat

SEQ ID NO: 99845 - DNA, 1451 bp, Oryza sativa
  Clone ID: PAT_MRT4530_97618C.1
gaaacacagcgtgagcgagcgtgggcgtccttgattccggcgacatgaaggcccccgccgcggccgcggccgcggtcggcaacagggctggtggggtggatccgtcgattccgcggttcaagtgccaggagtgccaccgcgcgctcgtcgtcgtcggcgtggattccttcgccgataagctcccggctcaggccacctctgcgcatgcatcctctgttcatggaagtattatgggagctagcaggatggataattcttatgtcgtgctatccaagcaaaacaaatctcatggccatggaattcccccacgcccaccaagtgcagcagccccacatatcgaacctaaccagccaacaagagcgatggagggttcatatatagtgcttccacctgctgctgcttccatatacaagacatctacttctgaaggaggtggtgcgcagttgccaccaccaagtatcaattccagcagtttgttaccaggaaatagttttcactctaacgtgactgtattaaaacgggcatttgagattgctacgtcacaaactcaggttgagcagccaatgtgtctggactgtatgaggttgctctctgataagatggataaggagattgaagatgttaatgctgacattaaagcttatgaagtctgtcttcaacatttggagcaggaatcctacaatgtcctcagcgatgctggttttcagaaggagaaactgaagattgaagaagaagaaaagaagcttaacgctgctattgaagaagctgaaaagcaatattcagaaattagttctgagatgaaggatcttgaaataaaatctaaagaatttgaagaattggaagaaaggtattggcatgaattcaatagctttcagtttcagttgacatctcaccaggaagaaagagatgcaattttggccaaaatagaagtttcacaggttcatctggaattgctgaagcgaacaaatgttctcaatgatgcattctatatttcacatgatggagtaattggaacaataaacaacttccgactcggacgccttcctaatgtacaggttgaatgggatgagataaatgctgcttggggtcaggctgctcttcttttgcataccatggctcagtacttcaccccaaaatttgagtatccttgaaagattcaccctatgggtagctacccaagagtcacagatatccacaaaaatacatatgaactgtacgtttccccctggttaattagtattcctgtttttctttttctaaaatgaacttccagaagatttgtaatgtagcttttctaaggttcataatatgtttatctgatcattggtattgactataatttacaagaacattttgtagtagtagtaagaggaggaaggggttgtgccaaaaaaaaaaaaaaaaaaactcgagactagttctctccctcgtgccgattcctgcagcccggg

SEQ ID NO: 99846 - DNA, 432 bp, Oryza sativa
  Clone ID: PAT_MRT4530_97619C.1
caactatcaagcatctgaaactctgttaatagaaaatgggaaaaagacatgtaatgcaactatgcaagacataatattttacatctcaaaaatatgcctttacatatgttcttcctcgctttcctcctcaccatttcgatacatttgcaggtttaattttcagcagaagagactgttcaagctgtgactggagcttaattgcatccagggtcccatacactcgcacaaaacattgaagaatatgttacacaagtcgatcaatggtcaccaccctttacctatcaaccagagccaatcaagaatggccccgcaaaatatgcctcccaacagggaaagcacaagcaagttgcccaaagcattttgttctggtcccttgtaccctttgggtgcttcggtgaggatgcagacggtgagatatccgttgctcaaacc

SEQ ID NO: 99847 - DNA, 2893 bp, Oryza sativa
  Clone ID: PAT_MRT4530_9761C.1
ccaccaaacttgagaccatatagagtacctcactatcaaaaggcagctatggaaaatataatcactgatctagttgagtcgaaagagatacaagaaagtgagagcccttatgcctcactagctgtcatggtaaggaagaaagatggctcctggagattatgtgtcgactacagagagctcaattcacagacagtcaaaaacaaattccctatgccaatcattgaggatctgttggatgagcttcacggggctagaatattttctaagctagacctgaggttaggctaccattaaattaggatggctgagcaagatgttcacaagacagccttcagaactcacatgggccattatgaataccaagttatgccctttgggctgactaatgccccagcaacctttcagtcacttatgaaccaagtgctcaaaccattttcgaggaaatttgaattagtgttctttgacgatatactgatttatagtcggagcaaagaagaacatttggatcatttgaagctagtcctacaagtcttgaaggagaatgatctggttatcaggttgaagaaatgtgcttttgggctatctgaagtttcatacctggggcatgttattttacagaattgggtagccacagatcccaagaaggtggataagatctcaaggtggcctattccaactgatgttacagagctcagaaaatttcttgggatgataggttactgtagaagatttataaaagggtatggggtgatatgcagaccaatgcatgacatgcttcagaaacaaggatttcagtggggtccagagcagactgctgcctttaatgaattaaaaagtaaaatgtgcacaagcctagttttggccatgcctgactttagcaaggagtttttgttgaagctgacgcatgtggttcaggcataggtgttgtcctgatgcaatctggcagaccaatagcattcctaagcaagtctttaggacccaaagctgatgggcaatcggtgtatgagaaggaagcaattgcaattttagaagcaattaagaaatggagacattacattctcggtgggaagctggtaattaggactgatcaacaaagtttgaagttcatgatgaaccaaagattggtagagggaatccaacacaaattaatgttgaaactgatggaatatgattactctgttgagtataagcagggcaagcaaaattatgtagcagatgcactatcaaggatgcccataatccaagagaaagaggaggaatcttgtcaagccatcaccatagtagttcctgactggattgaggacatcaaaaggagctatgatgatgatgtccaggctcacaaattgctaagtttggtgggaactgaagctgatccaaatggggaatatagacaagaatctggattgctgaagtacaaagggaggatatatgttggccagggcactaacatcagaaccgaactgttgagggcatgtcatgcatcctcttttggtggtcactctagtatgagagcaacttaccacagaatcaaactgttgttttactggccaagacttaagaaagaagtagaaaactttgtcagggaatgcccaacctgtcaagtaacaaaaggggagaatgtgcacattccaggtttgttggaacctttggaaatacctgatatggcatggtcacatattacaatggattttattgagggacttccaatgtccaggggtaaagatgtgatatttgttgtagtggataggctgaccaagtatgctcacttccttgcactatcccatccttatgcagtggagcaggtggtggaggattttatggacaacatacacaagttgcatggaatgcctaatgcaataattactgacagggataggatcttcaccagtgggttattccacaaaattttcaaagcaaagaaagtacaactgaggtttagtactgcttatcactctcaaaccgacggccaaactgagagagtgaatcaatgcctagagtcatacttgaggaatatgacgttccaagaaaccaaaaattgctctccttggctggcactggctgagtggtggtacaataccacctatcacacagcaatccagatgactccatttaaggcctagtatggttactcaccaactcaaataaatgaattttctataccttgcaatgtgtcagctgagggaagaatgactttggaggagaaagaagctattttgcagaagttaaaggggagcatggagttggctcaaaaaaggatgaaatactttgccggcaagaacagaactgaaagagtttttgaaactggagacatggtttaccttaagttacaaccatatcgtcaaactgcccttaggatcagaggttctctgaaactaagatcaaaatattatggaccattcaagattattcaaaaagtagggaaagttgcatataaattgcaactaccagctgaagctcagatccaccctattttccatgtaagtcagctgaaaagacaccttgggactcatgcaattcctatggccaaccttcctgctgccggacctgatggacaaattaaaacagaacctgttgctattttgcaaagaagaatggtgcctagaagatggtagcagtaactcagtggttagtgttatggcaaaacttgagcccagcagatgcaacttgggaagatgcgacggtgattcagggtatgtatctagattttcatccttgaggacaagaatgttgccatggagggggactgaccaaactatttgatgaaggttcatgcaggcggcgcgaagcatatgcccaagctgcagtgtgctaccagcattgaccgtacgcggtgccaggccgatggtcgcctcagctttcgagaggtcctcaacctcgctggtgagtcctactg

SEQ ID NO: 99848 - DNA, 1318 bp, Oryza sativa
  Clone ID: PAT_MRT4530_97620C.1
atggtgtgcgctaagtgcgagaagaagctggggaaggtgatcgtgccggacaagtggaaggagggggccagcaacaccaacgagagcggcggccgcaagatcaacgagaacaagctcctctccaagaagaacaggtggactccatatggaaacactaaatgtgtaatctgcaagcagcaggtccaccaggacgccaagtactgccacacctgtgcatattcaaaaggtgtatgtgcaatgtgcgggaagcaagtgctggacacgaagctgtataagcaaagcaatgtgtaatgtcaactcctgtgccatccatgataatcttgtaatgccgtgtcaatgagatattgtacttggaatctagcggttgaaaaatagtgacatgtgttcaagaactgggacagatgagagggagtgacgccccggctcccgtcctccgtccccgccctccacagtcctctccatctccatctccgacttcctcagatctccaaggcgagaagccctcgaggcccgccgcgccgcacgcagggatgtcggcgagcagcgcgccggtggacgcatcgggggatccgatcccgacctcgtcggtgctgatggcggcgtcgaagcacatcgccgtgcggtgcaggccggagaacgtggccttcctcaactgcaagaagaaggaccccaacccgcagaagtgcctcgagaagggccgccaggtcaagcgctgcgtcttcgacctgttgaaagaacttcaccagaagtgccccaaggagatggacgcctatgccggctgcatgtattactacaccaacgaatttgacttctgtcgtaaggagcagcaagattttgagagtgcatgccccgtatctgagtagcctctcagggttttacttcaaatgaatgatcttcacaaataaggagaaaaagccgacaaaccaagttcatgatctcccatgtttgttgttgtcctcacagaatttttcttttcggatgactagcacgcctctgagcttttcatcctgcttgtcattattctcatgcaagattttctcaccaatcaacaacactgtttgagttggatggcaatcttgttgtcttgagtcagctgtagccctaagataagttgatcgatgatgttactcttatgatttgcaacgtttcatggagtctcattgtttcttaaaaaactcactctctgctcagtcctctggacctctaaaactttagctttccgtatgttgctatggagtatggactggagtatatatgttgctattgatggagtactgttactcgatactctaaaaaaaaaaaaaaaaaaggggcggcc

SEQ ID NO: 99849 - DNA, 1402 bp, Oryza sativa
  Clone ID: PAT_MRT4530_97621C.1
cccacgcgtcatgcccaatcctctcttcttcctcctcctccttgccgccgccgccgccgccaccgccggcgccggcgaaggcggcgccacgcggaaggacccgtgcgccggccgacggatccacatccgtcgcctcccgcctcgattcaacgcgcacctcctccgccactgcgacgccgggttcccgctcgccgacccgtcgacgccggccacctcgtccccgccctgcgagtcgctcgtcaaccacggcctcggcccgcgcacccactccagcagccgctcctggtaccgcaccgacacgcgcctcctcgaggtcttcttccaccgccgcgtcgccgagcgcggctgcctcgtcgccgaccccgccctcgccgacgccgtctacctcccctactacgcgggcctcgactcgctcccctacgtgctcgacccggcgctcctcgactcctccgcgcagcacggcgcggagctggccgagttcctggcgcgggacaggccgcagatcctggcgcgccgccatggccacgaccatttcctggtgctcgccgggtccgcgtgggactactcgcagccggtgcgcgccgccgccgccgccgccgccgaggcgaggctgtggggcaccacgtcgctgctccggctcccggcgctcggcaacctcacgttcctgacgctggagtcccgcgcgtggccgtggcaggagcacgcgatcccgcacccgacgtcgttccacccggcgtcgctgccgcggctgcgcgcgtggctggcgcgcgcgcgccgcgcccgccgccccgcgctgatgctcttctccggcggcgtgtcgcgcccctccaggcccaacatccgcggctccatcctcgccgagtgcgccaaccgcaccgacgcgtgcgtcgtcgtggactgctccggcggcaggtgctcgcacgaccccatccggtacatgcggccgatgctgcactccaggttctgcctccagccgccgggggacacgccgacgcggcgctccacgttcgacgccatcctcgccggctgcgtcccggtgttcttcgaggacgcggcggcgaggcggcagtacgggtggcacctgcccccggagaggtacgacgagttctcggtgtacataccaaaggagtcggtggtgttcggcggcgtcaagatcgccgagacgctggcggcggtgggcgagggcgaggtgaggaggatgcgggagcgcgcgctggagatggcgccgagggtgctgtaccggcggcacgggagcacggcggagctgagcgagacggccaaggacgccgtcgacctcgccgtcgacggcgcgctccgcaggatacggaggcgggtccgcgcgctggacgacggcgagccggagaggatatactcgctggaggacgacgccgtcgagtcctag

SEQ ID NO: 99850 - DNA, 207 bp, Oryza sativa
  Clone ID: PAT_MRT4530_97622C.1
tttatatcataagggtcatctggtgcatcacgggaatgttgaggatggacgtgcggttacatcctccagaaaccataagatgagcttttgtcagctggtgctatcaactcagataaactaaactagttgctgattcacctacagcatattcaataaccgtggagtaatctagagctatgtcactattagctcgaaatgctataagat

SEQ ID NO: 99851 - DNA, 1152 bp, Oryza sativa
  Clone ID: PAT_MRT4530_97623C.1
atggcgccggaggaggcactgcggtacgccaagaaggagataatggccgccgggccggtgatcgacgaccccgacctatacgcgcctctcttcaagaacgtctcccagttcaagaggagctatgaactgatggaacggatactcaaagtttacatttaccaggacggccggaggcccatcttccacacgcctcccctcagcggcatctacgcgtccgagggctggttcatgaagctcctcaaggagagccggaggttcgccgtcaccgaccccgccaaggcgcacctcttctaccttccctacagctcccagcagctcaggatctcgctctacgttcccgactcccacaacctcaggccgctggccgcctacctccgcgacttcgtcaaaggcctcgccgccaagtacccgttctggaatcgcaccagaggcgccgaccatttcctcgtcgcctgccatgattggggatcttacacgacgacggcgcatggcgacctgcgccggaacaccgtcaaggcgctgtgcaacgcggacagctcggaggggatcttcaccccgggcagggacgtgtcactcccggagacgacgatccggacgccgaggcggccgctccggtacgtcggcgggctgccggtgtcgcggcggggcatcctcgccttcttcgccggcaacgtgcacggcagggtgaggccggtgctcctcaagcactggggcgacggccgcgacgacgacatgcgggtgtacgggccgctcccggcgcgggtgtcccggcggatgagctacatccagcacatgaagaacagccgcttctgcctctgccccatggggtacgaggtgaacagcccccggatcgtggaggcgctctactacgagtgcgttccggtgatcatcgccgacaacttcgtgctgccgctgagcgacgtgctggactggagcgccttcgcggtggtcgtcgccgagaaggacgtaccggacctgaagaagatactgcaggggatcacgctccggaagtacgtggccatgcacggctgcgtcaagcggctgcagaggcatttcctgtggcacgcgaggcccctccggtacgacctcttccacatgatcctgcactccatctggctgagcagagtgaaccaaatcgagctccacgagtag

SEQ ID NO: 99852 - DNA, 977 bp, Oryza sativa
  Clone ID: PAT_MRT4530_97624C.1
gcgaaatctgcgccgcggtaatccccgccctggacgctgaacgcggaacgcctcctcgcatggggctgcacagaatcctcccgccggccaccgcgcaaacaccacagctgcatcgccaaccactatttcctcccccaaatcgtgtccctggcttcacaccgcgcccacacattccgccatcgccatttcctccgtcctagggcgaaggagagctcgcgactcgcgggaggcgtcctccgctccactacgccccggttgccgccacctccgcgttactaggggtgagtaactcaccgaagttctccctaagcattggagggcctgcaaccaacgtcgacgccctgtccacatggccacaacgccgcagccagactgaccaatcaagcatcccctgggccgttgccatcgcaggtcgagcagtcatgcaccaccgctgcctccgcgagaagatcagtaattgctaattttgtcttgaagcttttggtgtgctgggacccgtgaatgactatattttcttttaacattctaaagcaggctcaagagtgctatgagatcactatggagtattaagggagtcatgagcttgatgaacttggtaatatgttgacaagctgagagaatgacggctccactgtgatggccaaagctttctcccctgtgcttaatttggctaacttggctgaggaggtccagattgcatactggaggagaataaatctcaagaaaggtgactatgctgatgagaactccgcaccgacagaatcttgagattgaagaaacatttaggccttattcgttttgaaggattcctaaaggaaatctcaattcctttggaataagcactattcatgcattcggtttgtaggattcaaaagaaaattttccataggaacactatgccaatcctccaaaaatcctccaaaatgtactaattctataggaatgaaaacatccactctatcctaaaaaaaaagaaa

SEQ ID NO: 99853 - DNA, 234 bp, Oryza sativa
  Clone ID: PAT_MRT4530_97625C.1
acgagggcattctttcaccttctactgttgtacttgctggattgcatatagatttccattctagcgtcaaaacagagttgtcttcatttaaaaaaaaaaacagagttgtcttcctcattagatatcacagtaattgtgtgttttctgccaattggttgtctctcaggagttcaagaagccattccctgctatgccttgcaagttctaatgcatcttatcctttctttttttttc

SEQ ID NO: 99854 - DNA, 2688 bp, Oryza sativa
  Clone ID: PAT_MRT4530_97626C.1
gatcccccacgcgtccgccagttcgtcgtcctcttcgccgagctcgcgagctctcgcactctgtctccatccccgcatcgcatcgcctcgccgctgctgatctcgtcgcggtcgccggaggggagctacgaggattgcctaacccagaagttggtgcttcgagatagccatggccaccggagtggcaccagcgccgctcccacatgtcagggtccgtgatggtggcatcggcttcacgaggagcgtcgactttgctaagatcttgtcggttcctgctactctaagggtgggctcatcaagaggcagggtgcttgtggccaagagctcaagtaccggttctgataccatggagctcgagccatcttcagaaggaagcccacttttagttcccaggcaaaagtattgtgaatctatatatgagacaaggaggagaaaaacccgcactgtgatggttgggaatgtgccacttggcagtgatcatcccattaggattcagactatgaccacctcggataccaaggatgttgctaaaaccgtagaggaggttatgaggatagcagataaaggggctgattttgttagaataacagtccagggtagaaaggaagctgatgcctgctttgagattaagaacactcttgttcagaagaattacaacatccccctagtggctgatattcattttgccccgacagttgctttaagagtggctgaatgctttgacaaaattcgtgtcaacccagggaattttgctgatcgccgtgcccaatttgagcagcttgaatatactgaagatgattatcaaaaagagcttgagcatatcgagaaggtcttctccccgttggttgagaaatgcaagcagtatggaagagcaatgcgtataggaacaaatcatggaagtctgtctgaccgcataatgagttactatggtgattctccacgcggaatggttgagtctgctttggaatttgccaggatctgtcggaagctggacttccataactttgtgttttcaatgaaagcaagtaaccctgttatcatggtccaagcatatcgcttgcttgtagcagaaatgtataacctagggtgggattatcctttgcacttgggagttacagaagctggagagggtgaagatgggaggatgaagtctgccattggcattggaacacttctgatggatggcttgggcgatacaatccgtgtctccctcacggaaccacctgaagaagagattgatccttgccggagattggcaaatcttggcacacatgccgcagaccttcaaataggagtggctccttttgaagaaaagcacaggcgctattttgatttccagcgtagaagtggtcagttgcctttacaaaaggagggtgaggaagtagactacagaggggtcttgcaccgtgatggctctgttttgatgtcagtttccttggatcagttgaaggctcctgagctcctttataggtctcttgctgcaaagcttgtggttggcatgcctttcaaggatctggcaactgtagattctattcttttgagggagctcccacctgtagaagatgctcaagctaggcttgcactcaaaagattagttgacatcagcatgggtgtgttgactcccttatcagagcaactgacaaagccactcccacatgcaattgctcttgtcaatgtggatgaactgtcaagcggtgcacacaaacttttgccagaaggcactagattggctgtcacccttcgtggagatgaatcatatgaacagctagatcttcttaagggtgttgatgatataacaatgttactgcacagtgttccttatggtgaagagaagactggcagagtacacgctgctaggaggttatttgagtacttagaaaccaacggtttgaacttccctgtaatccatcacatagaattccccaaaagcgtgaacagagatgaccttgttattggtgctggggcaaatgttggtgctcttctagttgatggtcttggtgatggtgtacttcttgaagctgctgaccaggaatttgagtttttgagggacacatccttcaacttgttacagggctgcaggatgcgcaacacaaaaacggaatatgtctcttgtccttcttgtgggcggacactctttgacctccaagaagtcagtgctcagattagagagaagacctctcatctgccaggcgtctctattgctatcatgggttgcattgtcaatgggccaggggagatggccgatgctgatttcggatacgttggaggtgctcctgggaagatcgacctttatgttggcaagaccgtcgtgcaacggggcattgcaatggagggggccactgacgccttgattcagttaatcaaggaccatggccgttgggtggatcctcctgttgaggagtaggccgtagcatgtagttcatatatgtactcctccataaacaatgttgtagctgaggcacattgtattgtatccacggagtacataaatacacgttctgtacatcagtttagaaataaagtaggaataggggtggctgcaactttgtaacaccctcgtgaagcatcggcaaatccaaactagaagcgtccctgaaatcagtgaaaaagaattgatactgctattttttgtaccaattgaaaaaaaaaaggaacacatgatatgactaaaaaaaaaaaaaaaaaaaa

SEQ ID NO: 99855 - DNA, 175 bp, Oryza sativa
  unsure (1)..(175): unsure at all n locations
  Clone ID: PAT_MRT4530_97627C.1
atagctggtnactatctggcaaggcagccaaggcncggcagacactagatggtgggttgtcatagggcagccatggaatgtgtcgtncgaggagcacgctatgcactatgctgcctttctaagctgtgtcagctatgtgatgcagtgcgaaaatgctgctgatgctgcagctgtg

SEQ ID NO: 99856 - DNA, 2874 bp, Oryza sativa
  Clone ID: PAT_MRT4530_97628C.1
atggacaccttggcagttggcaccttgcagcctttcagacttgtccctctcctatcagaaatcggcaatctgttgataggtttcaggcgtgtgcggatgggtttcaaaaaccgccgggggcccggttaccgccacccggcggtacggcggttaccggcggtaaccgcgggcggcgcgtggaagcagagcggcgtggccgatcacgttggctacctcggcggcggaggcggggcgctggtcggccgcgcgcgacgggcgaggctgtgcctctacggcctcgcgctcgccttcggcgcgttcgcggcgttcctcgccttcgcgccctcgcttccggcgccgccgccctcctcgccggcggcagcgtggttcgacggcctcctcgcctccgcgtcgccctaccgcgcgcaggtctcgggctacttctcctcgctgttccccgccaactccacctccccggagcctcctggaggagcagcgacgaatcggcgaggatcgagcggtggtggtgggttctccgcgacgggtgggcaagcgggaaccaatggctccagtacagttgttgccggtgagcagggaagaggagttgaagtatcaagcagcaatgcgggaggtgttccgagcggcaactccccatccggcaacgctactgcggcgatgcagagcaacccgccgcccaatgatcaagcgggaggcggtgccgcagccaataactccaccacgggttccgccggcgaggctgcagttccaagccgcagttcagccagaaacggcacgatgaccaaagatggtgcccctgatcggatcaatggcaccgacgtgatcgcgagttcatctggagatgtcaccgcagtgaaagctaatgcaagaaatgctgccgggtctactcaccagctaggtggtgcaagtgcgatcgtagattcaagcaatggaactgctgctccatccatcaataagactgggaatgcagcagtggccacggacggcaatggcgctgcgcctcagagaggaggagccccaggcaagaaccagactgtcccaaatccgccggctgcactcgatcagaacaagagtggaagcagagctgctgcttcaggtggaagcaatagtacaatggatgctacaccacaggggattgctagtaacaccacagaggctgctgtcgatgccggtggtaagaagaagaaaacccattggattgaagcaatggcgagctgcgatatgttctatggaaattgggtccgagatgactcataccctctctatcccgagggatcatgtcctcacatcgatgagtccttcaactgcccgctcaatggccgccctgataatgcttaccagaggctccggtggcagcccagcggatgcagcattccaagattgaacccgagtgacatgttggagaggctgagggggaagaggctggtgtttgtcggtgattcgctcaacaggaacatgtgggaatccctggtttgcatcttgaggaattctgtcaaggacaagagaaaggtctttgaggtgtcaggcaggcaacaattcagagccgagggctcctattctttcttgtttcaggactacaactgcagcgtggagttcttccgctcccctttccttgttcaggaatgggagttccccgtcaggaagggtttaaccaaggaaactcttaggcttgacatgatcagcaactctttcccgaggtacaaggatgcggatatcatcatcttcaataccgggcactggtggactcatgaaaaaacttctctagggaaagattactaccaagagggtaaccgtgtatacagtgagctgaatgttgatgatgccttccagaaagctcttattacctgggccaatgggggccaatggaattcaggaggcagttgcgacaaggaaaccgagccaataacaaatgagaagttcctcacaccatacccacggaagatgagcatcctggaggacgtgctcagtgggatgaaaacacctgttgtttacctgaatatcacaaggatgactgactacaggaaggaggcacacccttctgtctaccgcaagcagaagttgactgaggaggagaagaaatcgcctcagatatatcaggactgcagccactggtgcctccctggagtacccgactcctggaatgagcttctctacgcacagattatggctctctcctccctgcatccctcctcagatccatccactgctccccagcctccaccaagaaaccatggacgttactggctctcggtagacaaggtggatgaggaggagaagaagtcggagcggttgcacttgcacccaaatgcggatcttgccgacgacgactcgtcggcggcgatgcgcgcggccgcggcattgccgttgttcccgcaggacaatgcggttgtggaatgcagcaagatcaggccccgtggtggtgcacagcagggagcagcagatggtcacaggagcctagagaatggccattacagcaagcctgatccggcgatcaggagtactacaggagagcgtctcgtcaacggcgtcgtccgggcaatgccagtggccgcgaacgcgaaggaagagaccaagaacgacggcggcggcggcggcggagccaagaagcggcgtggcccggcggtgctgatggaggggtcacgttgcagccgcgtgaacgggcgcgggtggcgctgcagccagccgacgctggtcggctactccctctgcgagcaccacctcggcaagggccggatgcggagcgtcaccggcggccgcggcggcgccggccagctcggccgcaccgagccgaggaagaacaccgccgccgccgctgtcgccgcggcgcccaaggcggcggcggcggtggctgagccgccggtcgtgcggccatgctag

SEQ ID NO: 99857 - DNA, 480 bp, Oryza sativa
  Clone ID: PAT_MRT4530_97629C.1
gaatgaaagttgcaagttggtattccaatatggacagtaacgcgccgtttcagatgactcattacacatgcaagatgcaaagatgttccataagaaacgaactgtatatatatgcaacacattataatggctaactattcgaagtctatatctttgaagtcttatttgtactgataggaacattttcctcagttttgctactcctatttcacaacataaaagtatacttgatgatgttttcttccaatgaaccgacacttagacaatatgaagtttcattggatgtaacaagaaaaaaaaattacagaactacaactaggaggttatagtccagaaaagaaaaaaaaacacctccactacgcactgacgccttcccacactactgagaaaagggctagtatagtaacaaaccgactaccgttaagaatggttgatcaatgctagaccaacaagaagctacagctgtaccccataacgcct

SEQ ID NO: 99858 - DNA, 659 bp, Oryza sativa
  Clone ID: PAT_MRT4530_9762C.1
tctgccagcccctaccttcgttagagttccttcaaggagctaactctaatgaggctagaggttgtttcttgtaaggtgataggttggtactagtaaaatatagaatcctttgttcattcttgtccttccatcacagtcgtttctacagtttggaccgctttccagcctttgaccgatggcatcgcctgcagcgccaacagcaacggagttcactcaggaagctgctcgtcagtctctcattgagatctctcagtccctcccggagaaaccttcagcccagaacctggaggtgaagtcaccgagcccacgtgcagcaaacgaagatcatgaagatggagcagagaaatacagatcaaagctgatctcaatctcctacctttctccggatgcccaaccgacgccgtgccctcccaagaatgtcctcacttaactgtgacgatgctcctactcgtgcgtgtgtggcacagtatatcagtgttatacctcacttttagctggaaagatggaaatggaatacttttgggtgcttatgtttctaaccctaagaaacattcagggggaaaaaaaagaacagatagttgtacagatgactttgtgacgaagaactatttaccaggaacaggcttgcttaatccttgcatgttattttgttgttgcat

SEQ ID NO: 99859 - DNA, 826 bp, Oryza sativa
  Clone ID: PAT_MRT4530_97630C.1
ctgcaggaattcggcacgaggcttctctctctctctctctccttctcctccccttctctctctctttctctctcatccatccatgaggatcaggaggcggcctcagtccctgcaggctctctcctccctgcatccctcctcagatccatccactgctccccagcctccaccaagaaaccatggacgttactggctctcggtagacaaggtggatgaggaggagaagaagtcggagcggttgcacttgcacccaaatgcggatcttgccgacgacgactcgtcggcggcgatgcgcgcggccgcggcattgccgttgttcccgcaggacaatgcggttgtggaatgcagcaagatcaggccccgtggtggtgcacagcagggagcagcagatggtcacaggagcctagagaatggccattacagcaagcctgatccggcgatcaggagtactacaggagagcgtctcgtcaacggcgtcgtccgggcaatgccagtggccgcgaacgcgaaggaagagaccaagaacgacggcggcggcggcggcggagccaagaagcggcgtggcccggcggtgctgatggaggggtcacgttgcagccgcgtgaacgggcgcgggtggcgctgcagccagccgacgctggtcggctactccctctgcgagcaccacctcggcaagggccggatgcggagcgtcaccggcggccgcggcggcgccggccagctcggccgcaccgagccgaggaagaacaccgccgccgccgctgtcgccgcggcgcccaaggcggcggcggcggtggctgagccgccggtcgtgcggccatgctag

SEQ ID NO: 99860 - DNA, 2271 bp, Oryza sativa
  Clone ID: PAT_MRT4530_97631C.1
atggacaccttggcagttggcaccttgcagcctttcagctgcacgcctgcacctgttgtgaatggctcaaaccttcttcagtttgtagtcatgattcgccgtctattgactgttgaccagggtttcaaaaaccgccgggggcccggttaccgccacccggcgtatcagatgaagggcggcgcgtggaagcagagcggcgtggccgatcacgttggctacctcggcggcggaggcggggcgctggtcggccgcgcgcgacgggcgaggctgtgcctctacggcctcgcgctcgccttcggcgcgttcgcggcgttcctcgccttcgcgccctcgcttccggcgccgccgccctcctcgccggcggcagcgtggttcgacggcctcctcgcctccgcgtcgccctaccgcgcgcaggtctcgggctacttctcctcgctgttccccgccaactccacctccccggagcctcctggaggagcagcgacgaatcggcgaggatcgagcggtggtggtgggttctccgcgacgggtgggcaagcgggaaccaatggctccagtacagttgttgccggtgagcagggaagaggagttgaagtatcaagcagcaatgcgggaggtgttccgagcggcaactccccatccggcaacgctactgcggcgatgcagagcaacccgccgcccaatgatcaagcgggaggcggtgccgcagccaataactccaccacgggttccgccggcgaggctgcagttccaagccgcagttcagccagaaacggcacgatgaccaaagatggtgcccctgatcggatcaatggcaccgacgtgatcgcgagttcatctggagatgtcaccgcagtgaaagctaatgcaagaaatgctgccgggtctactcaccagctaggtggtgcaagtgcgatcgtagattcaagcaatggaactgctgctccatccatcaataagactgggaatgcagcagtggccacggacggcaatggcgctgcgcctcagagaggaggagccccaggcaagaaccagactgtcccaaatccgccggctgcactcgatcagaacaagagtggaagcagagctgctgcttcaggtggaagcaatagtacaatggatgctacaccacaggggattgctagtaacaccacagaggctgctgtcgatgccggtggtaagaagaagaaaacccattggattgaagcaatggcgagctgcgatatgttctatggaaattgggtccgagatgactcataccctctctatcccgagggatcatgtcctcacatcgatgagtccttcaactgcccgctcaatggccgccctgataatgcttaccagaggctccggtggcagcccagcggatgcagcattccaagattgaacccgagtgacatgttggagaggctgagggggaagaggctggtgtttgtcggtgattcgctcaacaggaacatgtgggaatccctggtttgcatcttgaggaattctgtcaaggacaagagaaaggtctttgaggtgtcaggcaggcaacaattcagagccgagggctcctattctttcttgtttcaggactacaactgcagcgtggagttcttccgctcccctttccttgttcaggaatgggagttccccgtcaggaagggtttaaccaaggaaactcttaggcttgacatgatcagcaactctttcccgaggtacaaggatgcggatatcatcatcttcaataccgggcactggtggactcatgaaaaaacttctctagggaaagattactaccaagagggtaaccgtgtatacagtgagctgaatgttgatgatgccttccagaaagctcttattacctgggccaagtgggttgattccagtgtaaatcccaagaaaacaactgtgttcttcagaggctactcatcatcccatttcagtgggggccaatggaattcaggaggcagttgcgacaaggaaaccgagccaataacaaatgagaagttcctcacaccatacccacggaagatgagcatcctggaggacgtgctcagtgggatgaaaacacctgttgtttacctgaatatcacaaggatgactgactacaggaaggaggcacacccttctgtctaccgcaagcagaagttgactgaggaggagaagaaatcgcctcagatatatcaggactgcagccactggtgcctccctggagtacccgactcctggaatgagcttctctacgcacagattatggttaaacagcatcaaatgttgcaccaataa

SEQ ID NO: 99861 - DNA, 753 bp, Oryza sativa
  Clone ID: PAT_MRT4530_97632C.1
atgatccagctgatgttcacggtgctcacggcggaggccgccgtggcgatcgcgctgctgttcaagacgccggtgcggaagctggcgatgctcggcctcgaccgtctcaagcgcggccgcggacccgtcatggtgcgcaccgtcgccgccaccgtcctcgtcgtcctcgcctccagcgtccacagcatgaacaagatccgcggacgcgccgctggcgagctcgacggcgcgggggcggggacgctcacccccaccgaccaggtcctcctcgcccgccacctcctcgaggcctcgctcatggccctgaaactggttaacttgcttacatctgcgaagtacttaaacctgtacgggggaacaataaaaggatactccttattccttgctctggtcattgaccggctccataactatatcagagaagtacgagggctcaaaagaaatctggaggctgcgtcaaagctgaacaagacactagacgaagcaaagcttattggaagctctgatgagagcaagacataccagaaagacatagcttcattgaatgaggagattaagaagatgaaacgtcagctaaaagaaaaggcaaatgaggccaaggatgcagaggctaaagccctagctgcccaaaagcaatctgaaggtctaatgattgaatataaccacctagtggaggacaataagcatctccatgaccaactggagtcagcagacctcacggtgtcacgttctgatggcaagaagaatacttaa

SEQ ID NO: 99862 - DNA, 464 bp, Oryza sativa
  Clone ID: PAT_MRT4530_97633C.1
acggcacgaggccgcgtaccatctcctctcccctatccaccatgagcgccaccgccacccaagaaaccgctcccgccgccgcagccggcccgtaccggccggagaagatgaagctgctctaccaccacgccatctccaacgcgccgtacctcatgctggccgcggccgccgcggccgtggcgctgcgggcgtcgcggctggcccccgccgacgacctcgccacggcgcgggagctgctggcgacgaacctcccgctcgccgtggcgctcctcgcggcggcggtcgtgctcgccaccgcctacctgatgcggcggccgaggccggtgtacctgctcgacttcgcgtgctacaagcccggtcccgagcacgtggtgacgagggagacgttcatggagcagtcggcggcggccggcgcgttcaccggcgacagcctggcgttccagcggaagatcctggagcggtcg

SEQ ID NO: 99863 - DNA, 648 bp, Oryza sativa
  Clone ID: PAT_MRT4530_97634C.1
atcctatggggcctgagttgaaaataaataaatgtgattttttgcaccaatatatccttccttttttttctccacaaggaagattcaatagtgtctacactttgaacacactaattgtgaaattaactgataattgcatatatactccggaatttggtcactggcacctttccgtattaaattaactttagaagacaaacaaataagaatataataggtctgctgtgcaatattaattgtaatattttgcgcacttcattacaaatgcaacatagatgtggtggctgcagactcacaaccagtaccatttctttctgaagtatatacagataaatgaactattttaccctgtattgttgtctgttggttcttcatagtttggtttgaactggacaggagtttgacattctgaagactatctttcgagcatctgtgctaagggtgcacaaatccaaatttgcacagtttatcatgttttatgcctgctcactggatcctgaaatctgtggccttgaattcgctctcttcctctctgatatctttattaaaaaggaagaggattcaatttctagaatgtctgcagtttcatatgttggaagctatttgtctcgggcaaggttcatttcttgtgatacgggggttggtata

SEQ ID NO: 99864 - DNA, 2591 bp, Oryza sativa
  Clone ID: PAT_MRT4530_97635C.1
ccggaatttggtcactggcacctttccgtattaaattaactttagaagacaaacaaataagaatataataggtctgctgtgcaatattaattgtaatattttgcgcacttcattacaaatgcaacatagatgtggtggctgcagactcacaaccagtaccatttctttctgaagtatatacagataaatgaactattttacccttgattggtggctggtggttcttcataggttggtttggactggacaaaaacccgagccagggccgcctcctcgcccccccccgccccctcgcccccgcctccctcctcccctcgcgccgtctggtacggcgtctccaggcgcgcgcttttgcccctaggcacctgaggggccgcggcggctggccatgggggcggagctgcggcgcgacgacatggaggtggcggaggaggacatcagcgactcccaggcgttccggttcgtcgagcacgtgctccagtccgtgcggatggatccttttcaagttgatctaagggacaaagaagagtatgatagcttgctaagtattgtagactcttcaaagaaaaggagttacgatgacgaggctttgctagtgacaactttgaaagcactatcagaagcagtgtccaagatagatatcatgtaccatcatgctcttttgaacaatgctgcagtggcagatcagttcttaagagagtgtttgcagatgcttgtgaacaacttcactccacctggatcacttactgctttcatcggccaaccaaatcatcaagtatttaacaaggaaatctattctcagttgcatgagagtttgagaatgatctctgatactgtacccttagcaccaaggatgttaaaggatataatagataggagtatgccgaagttatttcaccacaaagcaaatttaaaggtgtttgtggcatccatagtgggtgatgataatgataggatgggcgacctcattggagcactattgctggcgaaagttgtggatctactgactgaattggatgttaacataacttgggaagatatactccaagatgaacataacaaaggtatatttgatatggagcttgaagatttgggtgaggatgaggacagccttggacaagaaggaacaaaggccctttttggaggaaatgcttgtgctgaaaagcttgatggtttaatggtgctagtggacgagcacccacctgaaatgaaggtcatgagtttagacgatcatattgagacattctgaagactatctttcgagcatctgtgctaagggtgcacaaatccaaatttgcacagtttatcatgttttatgcctgctcactggatcctgaaatctgtggggctgtaccaggcctcctcctctcagaccatcagtaagccccccatcataatgggtcctaagatcatcgccgccgccaagttgtctattgcgaccaagaaacaaccgtatgctgggagtgcaattaggatccagcttgtataagggtacaagtatcggatagaattggagaattggagctttacttcatagctggtagaagggtcgaacgacccatcttttgcgatgtatccagcccaactaggttagatatcttgacacacccactggaacctttaaaggtttgcttgcgaacgatagttgatgagttcctgaggcaggccaaggctgccaggttgttcaatgcatctgtccattcagaatttgaagatgcgcttgaatctgatttgtccaaaacttttggaggaatgaatagacttgacatgttcttcccatttgatccttatctgctaaaagaatccgacagatatatgcgtccaaattttgagtactggtccatggtcaagacgacatacaacaattataacagtgatgttgatgatgagctagtggacctcgatgcacctgaaatgaatgtcggcagtttagatgatcatgttgagatagatctcaacagtgatgatgacttggaatactccatgaacaagatgtccataacgccgaaccgctctttctttcatcaaattatggcaaatagtgacactggccttaccatgcctgcgaggatcagaccatcaataagccccccatcataatgggtccaaagatcatcgccgccgccaacttgttgttcacttcacaaaagaaacagccgtatgctgggagtgcattaggatccagcttgtataagagtacaagtatcggatagaattggagctttacttcatagctggtagaagggtcgaacgacccatcttttgcgatgtatccagcccaaataggttagttgttgggatgaaatgtgaagtacagatgtgttattaaaaacgaagcgggagtggttgtgactatagactagcaggtagccctctggtatgtaaaagacaggcctgttttgatgtagaacgatttaccaatattttttatatcggaacagcagctgtctaactttgatactaaatttggttggtcggtgctgtttcctgaatatgcgttgacacttgacgaattcctatatcgtccattcgtctgtgaagtgtcaacttgttcaattctgtttccttttcaccatacaaaaaaaaaaaaa

SEQ ID NO: 99865 - DNA, 1103 bp, Oryza sativa
  unsure (1)..(1103): unsure at all n locations
  Clone ID: PAT_MRT4530_97636C.1
tccggnaatttcccggngtcgacccacgcgtccgggagcttgaagatttgggtgaggatgaggacagccttggacaagaaagaacaaaggccctttttggaggaaatgcttgtgctgaaaagcttgatggtttaatggttgttttttgtgagcacctcaagtcatgtaaagaacatggtcgcttaccccaggagtttgacattctgaagactatctttcgagcatctgtgctaagggtgcacaaatccaaatttgcacagtttatcatgttttatgcctgctcactggatcctgaaatctgtggccttgaattcgctctcttcctctctgatatctttattaaaaaggaagaggattcaatttctagaatgtctgcagtttcatatgttggaagctatttgtctcgggcaaggttcatttctgctgatacggtggttggtatactcaaaaggttagtggactggtgtgttgactattgtgacctccagaacaacataaggataacaaccaagcctataaatcatcaaatattttacgcaagctgtcaggcagtcatgtacatcctgtgctttcgcttaagatctattatggactacccaaatcttaaggcacagctttttaacatgccatttggatatatcttgacacacccactggaacctttaaaggtttgcttgccatcgatagttgatgagttcctgaggcaggccaaggctgccaggttgttcaatgcatctgtccattcagaatttgaagatgcgcttgaatctgatttgtccaaaacttttggaggaatgaatagacttgacatgttcttcccatttgatccttatctgctaaaagaatccgacagatatatgcgtccaaattttgagtactggtccatggtcaagacgacatacaacaattataacagtgatgttgatgatgagctagtggacctcgatgcacctgaaatgaatgtcggcagtttagatgatcatgttgagatagatctcaacagtgatgatgacttggaatactccatgaacaagatgtccataacgccgaaccgctctttctttatcaaattatggcaaagtgacactggccttacctgcctg

SEQ ID NO: 99866 - DNA, 1248 bp, Oryza sativa
  Clone ID: PAT_MRT4530_97637C.1
tcactctcttttgccctgctgaggagcccatccctgtggctccgttcctctctctcgctctaggacatcaatcttaccgaacactttctcatacgcagccacaagccgaagaaagaagtatccaactgtgggtatcagaatgataacgagcatggtgaacttccccttcttgtcctcaggaaggcggtagccgatgttgtccaacacgccagctatgcccttgggtttctcaaggcttttaattattgtgctcatagacttggtaagcttggttaacatttccacattgccctcgctcaaagtaatcatgtgctcagcccaggtctgcatggctctagcaaaaatgcgcttttccaagttggacatcggcttgctgttcatcacgggcgtcgttccaccaaacccccccggggctcgtgacaacttggtatcagagctcatggcaacggacgaatcctccaccaacgcagccaccctcgcagccgcagctgcggtcgcagctccggtctccaatgctgacatcgccaagctccgcgagtccatggccgacgtacttcatggcatgtccctcctcgcatccaaaagtgacttggcggatctcagccgctcagttgccgtcgcctcatctcgccttacatcgctggagcagcagggtgctgcatcgacctcaactccgccccgactcggtggcgacggaatgttccggcgaccaccaccaccaccaccaccaccaccatcatctggctctcccccaccaccaccaccaccgccgcccccgccgccgcctccgcctcctccaccgctgttcacgagacggtctcatgcgccccaggacaacagttctggcacgggcgttcctcgcttctataaactggaatttcccaaatatgacggcaaagacgatcccctcaattggttcaatcattgtgaacaattcttccgaggacagaagacaccggatggtgatcgtgtatggctggccacgtaccatctcaccggtgacgctcaggaatggtattttcactacgagcagcatcacggacccccagattggtacgccttcaaggaattgtgccatgcccaatttgggccgccaatccatcgcaatgccctgggcgaactgaagcggctatatcaggcctcctcggtggctgcctaccagacaaaatttctggcattggcaagccggacgtcggagccccccgctgacgtgcaacaatgggaaaaagaaataaataaacctagtgc

SEQ ID NO: 99867 - DNA, 430 bp, Oryza sativa
  Clone ID: PAT_MRT4530_97638C.1
cagaagcagtgtccaagatagatatcatgtaccatcatgctcttttgaacaatatatttacgatgtctatctggtacttgaacagcgatacaagggatgctcttttgtcattaatcaccagattggctgcagtggcagatcagttcttaagagagtgtttgcagatgcttgtgaacaacttcactccacctggatcacttactgctttcatcggccaaccgagatggcttgcaaggaagaaggaaatctattctcagttgcatgagagtttgagaatgatctctgatactgtacccttagcaccaaggatgttaaaggatataatagataggagtatgccgaagttatttgacaacaaagctaagatggtttcgtttgctgagtgcatgctgggtcttgataatgataggatgggcgacctcattggagc

SEQ ID NO: 99868 - DNA, 839 bp, Oryza sativa
  Clone ID: PAT_MRT4530_97639C.1
aagtgatcttgtcccaagccgaaaaaatgaaaacgggccgagggtgaaaaaggcgacaaagactacattccctctaaaaaagggaaaacggcgccatggcgatcaaaacagcagccgaagaaaaaagataagtcaaaagacgacgaggtcccagctaagaccaccggctcaaagaaaagcgaaccgtcatcaaaggcgaagaaaattccagttcccggattgagcagaggcagttgtgaggaattgtgcactgcaaacactggacaagccctggcgtggttggaaaaacacattgaacaacaaatttgtgaagacgggtcgtccaccttttgcgacatttgccaacataaccccgaagtagtgggacgactgtgacgttgaagaactccctggaagaaattgaagggagcaaaaagtatgcagagttggccaagaagaacagatttcctcatcacttaggctccggggggtacgcaccaaaggtggagcggtggtcaaaagaggaggaggaaatgaggaaggcggggcttccagtaccaatggaggaatggaaccagagatctaggaactgggtaaaagctagaactcctaagatcacagaagaaggcaaagtatcgtttgaaaatctggagctacagggggttgccgataaaatagagactttatccagtgcatagaagataggatcttttaagcctaagagggagaaagatgtgctaagtacggtgctgggtactcctgatcacgggggtagggacgaaggggctcaggattttgaaaggaaaatgatggatttctgcggggatcctctagagtcgacctgcaggcatgcaagcttg

SEQ ID NO: 99869 - DNA, 199 bp, Oryza sativa
  Clone ID: PAT_MRT4530_9763C.1
cttcgatcagagtcaagctcaagcccaagctatgttggccctaaacatgccgtcaattgcggtatctacccaagctacaacactgctccctgtagcatcccaccgtcgggtatctggtattgaattgtagcagtatagtattacaggagagaaaataagtatgcatatggtgtgacagtgaacatgggtaacactataa

SEQ ID NO: 99870 - DNA, 441 bp, Oryza sativa
  Clone ID: PAT_MRT4530_97640C.1
aaaaaaggaaagaaaattttatttttatttatatcaccccaagtttcacatgtcacatacgatgatccctgggcttattttttcacttccgaactccaattttgggaaaattcagttcaagaccccgccaagggggggaatgctttcgggggccctataggaccaaggggggatcccatatgtagggggcaagttaaaagccaacagagcttgggcttgggccaaattccggtcaaaggggggatccccaaactcctggggttggagctgctgccctttggcctgaacaaaggtaatggcccgatagggggattggtgcccccccagcgcggggtgttgccagacttgggtggttttcaattgaaacccacttgtttgcaagaaggggcttgcccctttgccatactggtgccttacaaaattattatttgggcgggcccc

SEQ ID NO: 99871 - DNA, 323 bp, Oryza sativa
  Clone ID: PAT_MRT4530_97641C.1
cccacagcgtccgcacacgcgttcgacccaatacaacccaataccctactcatacactgccgctctgcagacatggacgtctgctgctactacctagaaaccgccatctgataatcctacggcaagcccctcggcatgatacaccccgtggcgccgcactaaatcaaaaatactccgctgcatccatcaccaggcccatgcgtctgtgcgcctacatatgcagatacgacctggccagcaccttggggtcacgccccacggtgtggaacatgcgccgcatgccggcaacaacgcgcccgacttggatgccgaggcagtcttca

SEQ ID NO: 99872 - DNA, 231 bp, Oryza sativa
  Clone ID: PAT_MRT4530_97642C.1
atggctgttggaggcatgtcacgagggccttcaaccgagcctgccgaaacaagtctacaatcgctaggacgaagcacgacagcaaaacgccaaatgtcacaaagacagaggctctgggcaaatcgtcgagcgaagccgaagaccttcgcccccaagccgagggattcaaggcccgagggggccaaccaaccaatggaggcccacttggcggcccaagaagaggcccaagga

SEQ ID NO: 99873 - DNA, 494 bp, Oryza sativa
  Clone ID: PAT_MRT4530_97643C.1
atgtttttgaccggaatcagaaagttcaaaaaacgccaaaacatgatttttggacatattgtagtgtattgggtgcgtacgtggcaaaaactcgcttcgtgattcgcacggcaaacttttgtcaattaatgccaatattggcacacgagagtgcgatgtttttgaccggtatcaaaacgttcaaaaaatgccaaaacatgatttttggacatattggagtatgttgcgtgcgttcgtggcaaaaactcaattcgtaattcgcgcggcgaacttttgtcaattaatggcaacaatggcacacgagggtgcgatgttttttgaccggaataaaaaagctcaaaaaacgccaaaacatgatttttggacatattggagtgtattgcgtgcgtacgtggaaaaaactcacttcgtgattcgcacggtgaacttttctcaattaatgtgaatattggcacacgagggtgcgatgtttttgaccggaatcaaaaagttta

SEQ ID NO: 99874 - DNA, 477 bp, Oryza sativa
  Clone ID: PAT_MRT4530_97644C.1
atgtttttgaccggaatcaaaaagttcaaaaacgccatttttggacattttggagtgtattgcgtgcgttcgtggcaaaaactcacttcatgattcgcacggcgaacttttctcaattaatgcgaatattggcacacgagggtgcgatgtttttgaccggaatcaaaaagttcaaaaaatgccaaaacatgatttttggacatattggagtatgttgcgtgcgttcgtggcaaaaactcacttcgtgattcgcgcggcgaacttttgtcaattaatggcaacattggcacacgggggtgcgatgtttttcaccggaataaaaaagctcaaaaaacgccaaaacatgatttttggacatattggagtgtattgggtgcgttaatggcaaaaacttttggcccaaataggggcgatgtttttgaccggaatgaaaatgttcaaaaagcgctaaaacatgatttctggacatattggagt

SEQ ID NO: 99875 - DNA, 325 bp, Oryza sativa
  Clone ID: PAT_MRT4530_97645C.1
acaaaacattccccggctaacagattattggtaagggggaacatttatcccccgggcaaaataactaagggaaaagaaacccccccttcccccaactttaaaggcatcacctataaaacaaggctaaaacaatacgcaaaggcaaaccattccttggagacgggggggtatttggtttttcaggaaaacttaggggggttttttttgatttaagaacaccaatttcccctccggacagacaatggaaggaaccttggggaaaaacaaggggggggggcaccaaaaaggtccatgaaaaaactttgcatgaacccgcccgttttgg

SEQ ID NO: 99876 - DNA, 1473 bp, Oryza sativa
  unsure (1)..(1473): unsure at all n locations
  Clone ID: PAT_MRT4530_97646C.1
caattttttttttttgtttatttnttttttttttttttttttttttttttttacttaacaatctttttcaaattaataatcaataatcattacacagcgtaaacataatcgagctagattgcaaaaaatacgagcatgcaatcaaatcaactacaggtgattaaattaacgaactgcttattttgttacgacgtcgatcaatcgcctccaaacggtagccagttactgttgtaaaacacacaattaaatgagcttagagttcgtcgtggtggcggtgctcctcgtcatcatcatcttcgtcgtcgtcggtgaccttcttgatcttcttgggcgccgggttcggcgaggtcttgatggggtaggatgcttccatggcgatgccgcagagtccctccttggcggacacgtcgcgcttcatccggatgtagcccttctcaccccagtctgcgccccacgagttcctgacgatccagtacttggtgccgtccaccgtcgtgccgtagcccaccgccgccacgccatggtcgagctccgtcccgcatttcccggcgaacaccccctccgagtagaactggaagtgcgagccccccgcctcgatcgccaccgacaccggctggttcgccaccgccttcttcagcgccgactccgagttcgccggcacgtcctcgtagccgtcgatggtgacggcgggggacgacgccgcggagctcttgcaggagctctggcgggcgcggtacgggtaggcggaggaggcggcgacgccgccgtgcttggcgatgtactggaacgcgttgtccatgaggccgccgtcgcagccggcgttgccggtcttggtgtcgcagtcgacgagctgctgctccgacagcgcggtgaggttgctggtgcggatggcgttgatcccttccacggcggcgatggtcgagaacgcccagcagctgccgcactggccctggtccttgaccgccccgacggcgcccttctcgcgccagtccaccgccgccggcaggtcgcgggcgccggcgtacatgaagccgctgcgcctctcgccgcggccgcggaacatgcggtggtgggagacgcgggaggaggcgtaggcgcggcggaactcgtcggcggtcatgtcgccgaagcggttgaggcggagcttgtagggctcgtcgcggcggttgaactcgtggatgaggcggacgttgtccttgaacacgttgaaccgccgcgccttctcgccgaggtcccgcgccacccggtgctgcccgcgccaccgctcgtacagctcccacagcgcctcctccgacgccacgtccttgtcgccgaactccatcgcgctcgccgccggcgccgccgcgcccagcagcacgacgacggccacggctaccgccgccgccgccacgacgaccactactctacccatcgcaacaacacttgtgatcacttaattgtcactagctagctagcttagtaggttgaataaac

SEQ ID NO: 99877 - DNA, 254 bp, Oryza sativa
  Clone ID: PAT_MRT4530_97647C.1
gcggatctgccgctggcggcggcggcggcgggggtgggggtgttggtggtggcggcggcggcggcgtggggcctactaggcggcccttcaagaggacggggaacagggcggagccctaccagccgcccaaggtactaacagcaactgatcgaacgtagggctagggtttgttgcacgccgattgcggaggagctgggcttccgattttcgacggcaaggcggctaaggatgtggatggatggtcgggtggtttt

SEQ ID NO: 99878 - DNA, 1777 bp, Oryza sativa
  Clone ID: PAT_MRT4530_97648C.1
gtagccgatgactggaggggttaatccaccaccatttggcaagaggcctggagaaaactctatatccctgccactgttgcttttgtgtggaggagaagattctgttgtccgagggacaacatcagagaacagatctgtcatatacatagaagccgactgatggaatatatgttgtttccacgctccccaccacctgtcaaagtttctgctcctaaaccttgccagctctatgctctcaatgctgcccaaaggaggccctgggatattgagtagccgattcatcatcagggttgatgaaatttctcctcagcattggattttatcggcaaagaacaagccgattggtagctgtcccattccaaactgtctagcagagctcattgggtggtaaaactcataaaaaacctgtatgtttcttccttgatgaatgccaataggaaggatgcatgggctgatagcaactgagaagacttctctggacttttggtatctctcatgattgatgccttcaaatctgaaatctgctaggagttcaagacttactgagtcttcataagggaaccaaacccaagcatctttctaaaacccttcataaaagctgcggaaccaatccttgagcaactcagccgataattttgctccagcatcggctggtgtggatgcatactctccgtaggacatacacctgtgatgggtgcgttcttctccatcattgtctgtaatcggctccaatcttgggaattcagcttttgtcacagatggtcgattgacagctttcatggctaccagatttagccaagtttgcagcagccatcatggtcctcctgcaccaacgattgagccgacagcaatcttggctgatgcattgttcagtgtttgatataggtagccgagaaggatcttgcgtagaggaaattgcctttttgattctagggcttcggctaaaaactgctaattggttgtagggccgcaactagatccacagaaaaggaacttttcaagtcacatcagtaggaaggccacatgttctgggggagtgacaggtcctttgcccatatatgctgccacataaccagaccaaccacctatgctctaggtcctgaagacgaattggttcttggtgttcaggctcataggattagccgatgaagttacatctaatccagtaatcatggttatgtcgatcagagttggggtcatcggcccttggttggacatgaaggcattgatggtgttggacccgaaataggtgacagcggccatcaagggttcatccttggctgaatttgctatagtgagggcgagtgcctggctgattcgattttatcccagtgagcctgtttgctagccgatacccgtttgaaccaccagcccaacttttttcgggtgaagttttctcaagagatggccaagacttgaaagtgtttttccagtgacctagattggggttggctaatctaaaggcgattctgttggttccggcaatgatgaattcagtggggtcgagctcgccaatcaaaccaagaaagtagtggttctcgtgtgatagactgggaattgctactagattggacaagtgctctacctactcggccgacggcgtggtcgacgggctggcggaagtcgacatcaccgggagcggaaatctggtcggaaggggaattgcctcgaaatcgcgtggtgcgtcaaggggatcgccggagagagagaagacggagttggcttgagcggtgtaaacggaagtgacggtgtgaagtttctcgggggcaactgttag

SEQ ID NO: 99879 - DNA, 709 bp, Oryza sativa
  unsure (1)..(709): unsure at all n locations
  Clone ID: PAT_MRT4530_97649C.1
gacacagttaaacaagtttaaggatctcgatgcgcgttttgcaagttcgtggacataagtgaaacttcgttacaagtttaagtaccgctagtgtaatttactcttctgtggcaaaaattgtttaggttattttatctgtcattgatgtatgcctgtggctgagaaaaactggtgctcaaccgaatcctgagattgcaaccttctgtcagccaggttcattccagtgtctgctagctgtcaattgtaactcttgctaccttgcttcctcactcatctgtgaggagaatactatccagaacagcaaatcctgcagcaactccaccttcgtttgatgaagaaactttggtgcgcatcaagtaaccacactgattattcaggactaccttatctttgttccgcaaataggctccaaatatcccaagctcagatattgtaaggtcctcaaagcaaacgccaccctggaccagatgagtaagagaagctcttggaaaaatcctttgcatcagtatgtaggctgcaagtgcctctccctgctccttctggagtctgaccagcgtttctcgcagatcataaccatatatgttgtttcctccgccttctcgctgaggtttcaggacaaacaagtcaggtttttctattgcagncttcactatttcttcattatctaaactccataagcctgcaaagcattttccgtagcttggcaatg

SEQ ID NO: 99880 - DNA, 589 bp, Oryza sativa
  Clone ID: PAT_MRT4530_9764C.1
ctgcaggaattcggcacgaggtctcgagtttttttttttttttttttgttccctatatgctggtttgaattttgtggggtagcagagtttatgcttacaatttatttcatggcagacaaaaattccttttactgttgtagatgttgcccattgtgcctcaaaagagatactctcctcaagtaccttaagggatataaacgtaaagcctcgatagaaaagcaacaggctccggcaacaaagcggctcaaatcacctattgtataaatcgttagatctccggagattaggattgtgatgtcaccgtctccatcttttgaggaagcaattgaagaggaagcaattaaacttgacaatgtaagtattttgatccgaaagacataatctttttctttacttattttttttcatgtaattctactgctatttattcatgcaattgatgcatataatttaattgaccgcttggttcgatcatgtgttttaatgtatgcttaattcaaataattaggtttatcatctataactaaaaacacaaattaacatcaactatatgaaatgattttgatccaatatatgatggtgatgcgct

SEQ ID NO: 99881 - DNA, 334 bp, Oryza sativa
  Clone ID: PAT_MRT4530_97650C.1
catgaaattttcggaaggaccaatgcgtgctacgcatcacacatgctgacgtacgaatcgatgctcagcacattataggccgacgtcgagatctgatacaagcagactataacagtgaccggctagctgagcaatgtcctgtgctacaggtacacattgaagctgacatggcctgagctcgccatcaacattgtcatccagggtaccacagtgatcctggaccgaacaagggcatgatagctgatccaggccagggcgaagaaagtcataattactgcttcggcgaaaggtggggacattactacctacgagctgggagtaaaataaggaaagt

SEQ ID NO: 99882 - DNA, 261 bp, Oryza sativa
  Clone ID: PAT_MRT4530_97651C.1
atgcttctaccacgatcgacctccgttagagccatctcagactccttcggcgcggcctcaactgacgcttacaccagctcggactccttcaccatggtctccaccgaagcaacctccgtgggctctgcctccttcgccgcagtctcacttgcgttcgcaaccgccgccgacgaggtggggagagaggttgggggcgtggtggctgcgattcacggtggaggcagccaagagatgcggtctcatgggatgaggaagcagtga

SEQ ID NO: 99883 - DNA, 1803 bp, Oryza sativa
  Clone ID: PAT_MRT4530_97652C.1
atggcgatggtcgtcgcggggagccatcggccgccgccgccgccgcagtcgctgcggctggtcccgccaccgccgccgcagcctcctcctcctcctctgacgtacaggcaccactgcaaggtgtgcaagaaggggttcatgtgcggtcgcgcgctcggcggccacatgagggcgcacggcatcggcgacgacaacgacacgatggacgacgacgacggccgcgatgatgatcattcgctgtcaccgtgcgatggtggtggcgagccgtcggaggcagccgggagcccgacgacgacgacgacgaaacgtatgtacgcgctgcggaccaatcccgggcggccaaggaactgcaggacatgcgagaactgcgggaaggagttcacgtcgtggaagacgttgctggatcatggcaggtgcggccttgacgaggaggacggtcgcctcgacgtctcgctccgttcgccgccgcttcacgacggtggcgacgaaaacgacggcgaggaggaggaggagggggacgacctcacactggctgcgggcgggtggtcgaaagggaagcgctcgcgccgtgctaaagtgatggccgtcgggaccggctccgtgtccgagctacagctgccggctccgtctaccgaagaggaagacctcgccaactttctcgtgatgctctcttcttcttcgtcatcatcgtcgcgtgttgcacagccagccatcgtcgtcgacgacgcggaccaagagtcctgcgcatcagcccccatgatggctcagatgacagtgatcgctccgcaagtggtgccacagcacatctcgaccgtgccacgtggcatgttcgagtgcaaggcatgcaagaaggtgtttacatcgcaccaggctcttggcgggcaccgtgccagccacaagaaggtgaaaggatgcttcgccgcgaagctcgagagcagccgcaacgagactagtcagactcagactcagcagcaacacgtctcagccgctcctcatgacaataccagggccaccacctctcatgtcatcaccagcgatatcagcatggatgcaaacacgatcggtgccagtgctgatgctgacggcaaggcagcggcaagcggcgttggcgcaggtgaaattgtcctcgccggagcttcgtcgacggatatggccatgatgatgtcggtcgaggacttcgcgccgacaccgttggcgccatccgccgtctcaccgttcaagaagaaggggaaggtgcacgagtgctccatctgccaccgggtgttcacgtcggggcaagcgctcggcggccacaagcgatgccactggctgacgtcgggcgcaacggacccgctcacgaagctccagcccgtcgcccaagaccacgccatgatggccgccatgtgccaccagctcacgctcgggcgcccaatattcgaccctaccgaccagcggatactagaccttaacgtgccgacgaacccactggcagaagcggtcgcggccaggcagcagcagcagcagcaggtcgccgctctcaacgacggcgcactctgcctcaacgcggcggcgtcggtgtacctgcagtcctggacagggcacagcaacgggagccacgtgaacaagaccaccgcgacgagcagccgcatcaacgacgcggccggcggcgtgaccacggaggacgatgaagcggacagcacgagcgccaagagagccaagatcggcgacctcaaggacatgaaagtggcaggggagtcgttgccctggctgcaggttggcatcggaatttcatcagagagcaaagaaaagaacactcaagagtga

SEQ ID NO: 99884 - DNA, 654 bp, Oryza sativa
  Clone ID: PAT_MRT4530_97653C.1
atgccccagatctcctctttggtaccctcctttcccccgagccgccgtgccctagccacctctccccgcgagattgcactctctccgccgccaactccggccacgttgcgtcgcgccgcccctctggtcgacgccgccttgcgctgtcgcctccttcggctgcacaaggacaagtgctacctcggccgccggctcccttgcgccgaagaccgccggaagccgcttacccaaacgaacccgagcgccgctgcctcccgtcgacctccagccgtcacccaccgttgttcccgccattccgaacctttgccgtcgccatccccgtcatcgcagcgccgaggagaagcccgtctaccccttcgatgccgcggcccgtcgccggaaagccgccgcctgcgccgacccgagctcgccgccctttggagctcgccgccggtgtctcccttcgccatgtgtcatcgtgtaagtagtggtaaggatcgcctcggtcccttcttcctccccgtgccctctgtttccgccggagcaccaccgttcgccggcgaccctcggttcctaagccggcccgcgtcgatcccgcatggcttccacgtcgttgccaaattaccaccacctcagcgccacgtcatcattctgtccacgtgggagccgatctaa

SEQ ID NO: 99885 - DNA, 2251 bp, Oryza sativa
  Clone ID: PAT_MRT4530_97654C.1
ctaacgaccatagatggccttctgagaggatgactctagaaccccacagggtggagagagggcagcccaaccagaagacgacagcacacggagccagacttgccaagcgaacacgcagtcgagcagaatgtggttcgtcatctcaagctcctgagcacaaaaggaacagaccgggtgactatcgatgccacgcttctggagaagatcagtcatccagtagcgcggcctaggagatctgcttagctcctgtgcaggaccaaagattgatgagatgcgggcgtgccagtcagtttgctccggcctaggagatctgcttagctcctgtgcaggtacaaagattgatgagatgcgggcgtgccagtcagtttgatcctgcagccagggcaacgactcccctgccactttcatgtccttgaggtcgccgatcttggctctcttggcgctcgtgctgtccgcttcatcgtcctccgtggtcacgccgccggccgcgtcgttgatgcggctgctcgtcgcggtggtcttgttcacgtggctcccgttgctgtgccctgtccaggactgcaggtacaccgacgccgccgcgttgaggcagagtgcgccgtcgttgagagcggcgacctgctgctgctgctgctgcctggccgcgaccgcttctgccagtgggttcgtcggcacgttaaggtctagtatccgctggtcggtagggtcgaatattgggcgcccgagcgtgagctggtggcacatggcggccatcatggcgtggtcttgggcgacgggctggagcttcgtgagcgggtccgttgcgcccgacgtcagccagtggcatcgcttgtggccgccgagcgcttgccccgacgtgaacacccggtggcagatggagcactcgtgcaccttccccttcttcttgaacggtgagacggcggatggcgccaacggtgtcggcgcgaagtcctcgaccgacatcatcatggccatatccgtcgacgaagctccggcgaggacaatttcacctgcgccaacgccgcttgccgctgccttgccgtcagcatcagcactggcaccgatcgtgtttgcatccatgctgatatcgctggtgatgacatgagaggtggtggccctggtattgtcatgaggagcggctgagacgtgttgctgctgagtctgagtctgactagtctcgttgcggctgctctcgagcttcgcggcgaagcatcctttcaccttcttgtggctggcacggtgcccgccaagagcctggtgcgatgtaaacaccttcttgcatgccttgcactcgaacatgccacgtggcacggtcgagatgtgctgtggcaccacttgcggagcgatcactgtcatctgagccatcatgggggctgccatcgagattggctgcggcaccaagaacctgttcctctcctcgtccttgctacctgatgcgcaggactcttggtccgcgtcgtcgacgacgatggctggctgtgcaacacgcgacgatgatgacgaagaagaagagagcatcacgagaaagttggcgaggtcttcctcttcggtagacggagccggcagctgtagctcggacacggagccggtcccgacggccatcactttagcacggcgcgagcgcttccctttcgaccacccgcccgcagccagtgtgaggtcgtccccctcctcctcctcctcgccgtcgttttcgtcgccaccgtcgtgaagcggcggcgaacggagcgagacgtcgaggcgaccgtcctcctcgtcaaggccgcacctgccatgatccagcaacgtcttccacgacgtgaactccttcccgcagttctcgcatgtcctgcagttccttggccgcccgggattggtccgcagcgcgtacatacgtttcgtcgtcgtcgtcgtcgggctcccggctgcctccgacggctcgccaccaccatcgcacggtgacagcgaatgatcatcatcgcggccgtcgtcgtcgtccatcgtgtcgttgtcgtcgccgatgccgtgcgccctcatgtggccgccgagcgcgcgaccgcacatgaaccccttcttgcacaccttgcagtggtgcctgtacgtcagaggaggaggaggaggctgcggcggcggtggcgggaccagccgcagcgactgcggcggcggcggcggccgatggctccccgcgacgaccatcgccatgatcgcgcgcggtcgatcgacgacgctttatttgggcagtgggcaggcatgcggggccggtgcggtcgag

SEQ ID NO: 99886 - DNA, 388 bp, Oryza sativa
  Clone ID: PAT_MRT4530_97656C.1
cttggatcctcaaagacaccgttgccacgagcagccagtcgatacgtactaatgccagaagtaagcagtggcggagccaggatttcaaagttgggtattcccgtctaagcgctgagccgttgcccgcccctgcccctcgcggccgccggccacccaaccgacctgaccgccttagcttggcggagtgtcgggcgccgcccgccgtggcaatggcctccccctccacggtagcacggtccagctcccgccgccgattgccgtctcgccgcgccgccacctagggtttgcaaatggggagtggcgcgagggagccgagccagggtgggatgggtcatggagggagagcgagagggggctgtctggaagagtggtggctaagtgggtcaac

SEQ ID NO: 99887 - DNA, 552 bp, Oryza sativa
  Clone ID: PAT_MRT4530_97657C.1
atggatcatgaaaaacaaaagcttccacaaatctgttgcaataccacccacagccgcgacggctacgggcaaacggctcgccggcgcaggttggcggcgaggggaagatggcagcggaggacggattccggcgacggtgatcaggttgtgaccgagaaaattttggcgcgccgtttcaattcaccgcttcacgcgcgaattgagaggcaagcggatgagttagggcgcagaagctgcgagacagagatacttggagtgggtgggcagggcgaaggcgaagtcgccggcgccatggccgtggccctcggccgccgcagccgcaaatccgcgacccttaccctctcctcctccactaatattactcctactcctatcctaccggctatcttcccaagggagaacaaggaggcgggccggccgtacggtgcggcgtgcggcgtggacgtacggacgccacaccgtcgccggagcggtagacaccccgccggcagcggcgaggaagtggacgttggattgctagcacagcagcaagcggtggaggaaacgaagtga

SEQ ID NO: 99888 - DNA, 1308 bp, Oryza sativa
  unsure (1)..(1308): unsure at all n locations
  Clone ID: PAT_MRT4530_97658C.1
atggcgccgccaccggccgctcacgccgctggcctccgcgtcctccgcacgacgcgcgtcgcgccggcgccgcccgccggccagcccgcgctgcccaagcgagccctgcctctcatcttcatggacgtgatgtggctccgcgcccagcccgtcgagcgcgtcttcttctaccgcctcggccccgacgacgatgtcgacgccgtgctgtcccggatggaggagtcgctgccacgggcgatccacgccttctacccgctcgccggccgcgtccgccccacgcccggcgagaccaaccggtacgagctcctctaccagcccggcgacggcgtggcgttcaccgtcgccgagcacgacggcgtcggcgtcggcgtcgacgagctcgccacggacgagccgagggagctcgccaagatcgcgccgctcgtcccggagcttcccgagggcggcgcggagctcgcgctgcaggtgaccgtgctgccgcccaagcgccgcggcctcgctctcggcgtcatcgtccaccactccgcctgcgacggggtgggctcgacgcacttcctccacacctgggccgccgcctgcgccggcgaccggaagctcccggagccgcccgtcatcgaccgcacgctcatccgcgacgtaccggagatgcacgacgaggcgtcaaggacgccgtcgccgccgaggccgcacgtcgcggcgttccgccgcctcggtgcacgtccctcgtggcgatgtacggcctcatgtggcactgctaccgccgctccagacgggaaagcgacaacgggcggagcggncgngcccccnccgccccccactttatcttctccgtcgaccaccgggtcgcggctggtgccccgcgtccccgacaagtacctcggcaactgcgtcggcccgggcttcgtctcggcgcccgaggaggagctcgccggcgccgccgtggcgggcggcgtcttcacggcctgcgcggcggtggccgccgccatcgacgaggcggtgcgcggcgagcccgcgtactgggaggggtggaaggagcgcatcgtggaggcgtgcagggacgacgcgccgttctcggtggccgggtcgacgaggttccgcgtgtacgacgtcgacttcgggttcgggaggccggcgaaggtggagatcgtgtccgtggcgaagaccggcgcggtgtcggcggcggaggatcgttctggcgccggcggcatcgaggtgggcatagctctgctgccggagcgcatggacacgttccggaggtgcctcgccgacgccatggcttggttttcctcgtcttcccaatgcaactag

SEQ ID NO: 99889 - DNA, 1754 bp, Oryza sativa
  Clone ID: PAT_MRT4530_97659C.1
tttgtattgtattataggagtagaagcaaagctccatcgctctgcagctaagccacgagcaacacaaaccacacctgttctgcggcgagaccatggcgccgccaccggccgctcacgccgctggcctccgcgtcctccgcacgacgcgcgtcgcgccggcgccgcccgccggccagcccgcgctgcccaagcgagccctgcctctcatcttcatggacgtgatgtggctccgcgcccagcccgtcgagcgcgtcttcttctaccgcctcggccccgacgacgatgtcgacgccgtgctgtcccggatggaggagtcgctgccacgggcgatccacgccttctacccgctcgccggccgcgtccgccccacgcccggcgagaccaaccggtacgagctcctctaccagcccggcgacggcgtggcgttcaccgtcgccgagcacgacggcgtcggcgtcggcgtcgacgagctcgccacggacgagccgagggagctcgccaagatcgcgccgctcgtcccggagcttcccgagggcggcgcggagctcgcgctgcaggtgaccgtgctgccgcccaagcgccgcggcctcgctctcggcgtcatcgtccaccactccgcctgcgacggggtgggctcgacgcacttcctccacacctgggccgccgcctgcgccggcgaccggaagctcccggagccgcccgtcatcgaccgcacgctcatccgcgacgtaccggagatgcacgacgagttcgccgcacccacgaacgaagccaaagatctgttcaaggcgcccgacgccggcaagttcctcgccaccttcaccctgtccagagagcacctccagggcgtcaaggacgccgtcgccgccgaggccgcacgtcgcggcgttccgccgcctcggtgcacgtccctcgtggcgatgtacggcctcatgtggcactgctaccgccgctccagacgggaaagcgacaacggcggcagcggccgtgccgccgccgccgcccacttcatcttctccgtcgaccaccggtcgcggctggtgccccgcgtccccgacaagtacctcggcaactgcgtcggcccgggcttcgtctcggcgcccgaggaggagctcgccggcgccgccgtggcgggcggcgtcttcacggcctgcgcggcggtggccgccgccatcgacgaggcggtgcgcggcgagcccgcgtactgggaggggtggaaggagcgcatcgtggaggcgtgcagggacgacgcgccgttctcggtggccgggtcgacgaggttccgcgtgtacgacgtcgacttcgggttcgggaggccggcgaaggtggagatcgtgtccgtggcgaagaccggcgcggtgtcggcggcggaggatcgttctggcgccggcggcatcgaggtgggcatagctctgctgccggagcgcatggacacgttccggaggtgcctcgccgacgccatggcttggttttcctcgtcttcccaatgcaactagcgtgggaactgcaacacgtacgtcgagtagatttctttagagagattcggttttcatgtctttttactggcttatactctctctgtgaaaaaagaaatcaaaacctgggatgaatccacacatgtatgttaatattcatcccttgggtttgatactttttagaactttataatttaattttggtgattgtatttttatgcctactacttttaaaattctagtaataattattgacctataaatcactttttttgcttt

SEQ ID NO: 99890 - DNA, 383 bp, Oryza sativa
  unsure (1)..(383): unsure at all n locations
  Clone ID: PAT_MRT4530_9765C.1
ccaacctcgacttcaccttgggaagaatgtaatttaaccatccatcgatcgtcgacgacatttcgatcgatcgatcgatcgagatcgcatcggagattgggtgaagagggctagctagctagctagtacatacatgatacatcatgtgtcaaaactaagtagggcagaatatgagaatgaagtgaagatcagatgcacaaacacacacacgcatgtgtgccccatttgcactacgaagctgaggatcagagaggagatcgaccaaagctagctagagagaagaaattaaagcaaacaagataactgaggctgaggaataagataacactgcaaccgttgatccaggaacaaaggcaaaagggggggggggggggggngggggg

SEQ ID NO: 99891 - DNA, 323 bp, Oryza sativa
  unsure (1)..(323): unsure at all n locations
  Clone ID: PAT_MRT4530_97660C.1
gagaacaaaaaaaaaatttatcagagtttttgggcaaatatttttttcaacattttccaagaatgtttatattcaaaaggtacattattaccaaaatatatttcaattaaaaaagtattgctatttcttttaacaatatatttattttccctgactacagtgggaacacggaaggcataacctaaccttacagcctgccaggattttatataaaataaattttatatctggatataagaaaaaaggttactgtatatatgctaatgatntaaaaaataaaatcattcccttttaagcacgcttaaccggcctctgaaaataaa

SEQ ID NO: 99892 - DNA, 1005 bp, Oryza sativa
  Clone ID: PAT_MRT4530_97661C.1
atggcgtcgcaaccggccgctcacgccgctggcctccgcgtcctccgcacgacgcgcgtcgcgccggcgccgcccgccggcgagcccgcgctgcccgagcgagccctgcctctcatgttcatggacgcgatgtggctccgcgcccagcccgtcgagcgcgtcttcttctaccgactcggccccggcgacgacgacgacgacggtggtgtcgacgccgtgctgtcccggatggaggagtcgctgccccgggctatccacgccttctacccgctcgccagccgcatccgccccacgcccagcgagaccaaccggtacgagctcctctaccagctcggcgacggcgtggcgttcaccgtcgccgagcacgacggcgtcggcgtcgacgagctcgccacggacgagccgagggagctcgccaagatcgcgccgctcgtcccggagcttcccgagggcggcgcggtgctcgcgctgcaggtgaccgtgctgccgcccaagcgccgcggcctcgctctcggcgtcatcgtccaccactccgcctgcgacggggtgggctcgacgcacttcctccacacctgggccgcagcctgcgccggcgaccggaagctcccggagctgcccgtaatcgaccgcacgctcatccgcgacgtaccggacaggcatgacgagttcgccgcacccatgaggagctcgccgacgccgcgggcggcgtcttcacggcctgcgccgcggtggccgtcgccattgacgaggcgggacgacgcgccgttctcggtggccgggtcgacgaggttccgcgtgtacgacgtcgacttcgggttcgggaggccggcgaaggtggagatcgtgtccgtggcgaagaccggcgcggtgtcggcggcggaggaccggtccggcgccggcggcatcgaggtgggcatagctctgccgccggagagcatggacacgttccggaggtgcctcgccgacgccactgcttggctttcctcgtcttcccaatgcaactag

SEQ ID NO: 99893 - DNA, 291 bp, Oryza sativa
  Clone ID: PAT_MRT4530_97662C.1
atggcgttcgcggcggcgtattggcttgatcatattttggcgtctttctcctgggacctaggcgacgtcggtggcgcaatggctcagccagggatgagaaggaacttcatgttcccgtggttggagtgcggtgaagctcaccagagaatacgtgacatggatgaaactccttcgggtgaaaagagtaagtggaagttcttggagattccgagggacccttttagattccgtgcaggcagcaactcgtcgcttttggaaaaatcagctcattttcacgtgcggtccttttaa

SEQ ID NO: 99894 - DNA, 471 bp, Oryza sativa
  Clone ID: PAT_MRT4530_97663C.1
agatccaaataataacagatacaatcagaatacaacaaaattcaaacaatagttcatctcagattcaacctaataaattatacaatctcatattcaaaagaattcatctctgcttccagaatcaaacaatagttccacagcaagcaacaaaaatttgtgtagcaaaaccaagctatttgagaaattgatcttccatatttgaccctgagcttgcatgcagatagctttcaggattccttcagttaggtccacaggaagacctttccttttttcaggcgatatcttcgggagagcgtgctggatagcacactctaagtacccagctgccttgagaaatatttcaactgaaaggtaaaaaaggaaaacagaaaggtaaaaaagggaaacacagatcagtcaaaatgctgcaatggacacctagtattatagcagctgagagtataaaaacagcactgaaatattccctcgtgc

SEQ ID NO: 99895 - DNA, 445 bp, Oryza sativa
  Clone ID: PAT_MRT4530_97664C.1
atgaataccaactttactttatatctgagttatgttgattatactgctagcttatctgggagatgcaatggtacgggtataatgtttgcttatgcaattactctatgtcatgacgatgatattagaatagtatctagtagtttaggcatggtgtctagattaccaggtactattatttggggtgacagctcaatacgggtattcctccgtgcgtgtatataatcctaagttaatttcctaaggagggtattcctttgtatttagccccggttgtatggtcatgacgggctgtcgtaagaaactcgacagtcaggggtggcttctcgaagtaccaggagggcatcggaaagaggacatggcttcttcaatgtcagaggatcatatatggtttgcttcaacctataaattgctatgtgctgtgacaatagcttctattcatctagtt

SEQ ID NO: 99896 - DNA, 380 bp, Oryza sativa
  Clone ID: PAT_MRT4530_97665C.1
ccgatgccctcttggtacttcgagaagccacccctgactgccgagtttcttacggcagcccgtcatgaccattcaaccggggctaaatacggaggaataccctccccaggaaattaacttaggattatatactcgcgcggaggaatacccatactgagctgtcactatcagcggcccaccgctcttccacagcatataaccccaaataatgatacccagtaatctagacaccacgcctaaactaccagatactactctaatatcatcgtcatggcatagagtaattgcataagcaaacattataccgcaccattgcatctcccagataagctagcagtataatcaacataacttagatataaagtaaagttggtatttat

SEQ ID NO: 99897 - DNA, 103 bp, Oryza sativa
  Clone ID: PAT_MRT4530_97666C.1
atgcagctcccataacagtgagatcgtgcgcatcgccacgaacgacggctgccgaatcgcaggaaagcgatgggagcggggtagcgcggttcgatcggcctga

SEQ ID NO: 99898 - DNA, 267 bp, Oryza sativa
  Clone ID: PAT_MRT4530_97667C.1
tttcacggaatttccgttacgacccagctgtgctggctatatcaccagcattagatacatgagcagaaggaaatcacgccttcagttgtgacatgatgggcatggaatgacagctgcagcactgcagagagccgcaaggtgtggaccatgctccgacgatcagcggctgcttagtctggggaacatcgtgaggacaacattaactactgatggtcgcgccttggacggcggcgacgacgttggaggctatgactatgtgaggaagag

SEQ ID NO: 99899 - DNA, 397 bp, Oryza sativa
  Clone ID: PAT_MRT4530_97668C.1
ataattatgaaaacttcttggtttggtgtacaaagcaaaccacaccaatacactattgattaatttcactaaaaataacccggtttcattacatcacacaaattcatacgttgatacacacatattttcctaatcacccacctgtttaattaatccataacacacgggtttaattaatcaataattatcacacacacaaaccacactcatatgggtggtttttattgtggactaattaaggaaggtaactccccggcggctagtgttcggttacttagtaacatttacttgccatacttgcagtcggtgcaagatcaccttgtaccacactttcaacctccgttatcctctccggcggggaccttatcgaaatggttctttttggctttaactatta

SEQ ID NO: 99900 - DNA, 423 bp, Oryza sativa
  Clone ID: PAT_MRT4530_97669C.1
aagggatacccccgcggaggcaccccgtggcgagctcgtgtgtattcaccaacagcccgacgtctcaagcgcgtctgggaccccccgctcgtgccggcggacccgacccaaacccgcgtaaaccgcagcaccctacgcataaaaatgcaggcgaaaccgcgacgggccgtaacatacaaccacaactctaacccctgcgcggcacacgggcgtcagccctcatcgcgggacgcaaaaaacgcgcctgcgtgggtggatgcatctccgaccagcgtccgccccctcaggactccaccaagtcttttgggcggtcctgcgcctcccgccagacacgcctcgccgcggcccccccccccccgcccgtacctcatcaccctgcatcgggcaaccccggggcgaactcaacgttccttccgggactaa

SEQ ID NO: 99901 - DNA, 493 bp, Oryza sativa
  Clone ID: PAT_MRT4530_9766C.1
ctacacccagagcgcgccggcgtcgcggaggagcgggacaaggccgccggcgacgtggagcgacatgacccggtcggtggagccgacgagcctgccgccgatgaacactgtcggcaccacgacgccgcggccgcggccaccgccgttggcggcggtgccggcgagcaacatcccggcgagcgcgttctccatgtcggcgccggcgggctcctcgtcgagctccaccacgcgggcgtcgacgccgagctcccggagcaggcgcgtcacggcgtgggacatgccgcacgagctcttgctgaacaccaccaccgccttctgcgacgccagccttgtcaccctgtccatctctatatatgcaaatgtctatgtgcctagtgtcttcttccccgtctccggcgactacgacctggccgcggaatgcgccgggatctttggctggatggatgtcaccggcggtgatcgcccgattgatcgaggttgtgtcacttgtcag

SEQ ID NO: 99902 - DNA, 1094 bp, Oryza sativa
  Clone ID: PAT_MRT4530_97670C.1
atggccgctatgggagtattcttccttttgcaggttttctttttcttggactgggtgaagtacctgctgaatgatgccaaactattcaagtcattcctgagaatcaccctgacatgtgtgataactgttggcaccctagctcttggaattggtaccgcgtcaggttacatctccccttggacagggcggttttactccctgcttgatccaacctatgcaaaggaccatataccaatcattgcatcagtatctgagcatcaaccaacagcgtggtcttcgttcatgtttgatttccacatccttcttttcctgttcccagcaggcctctacttctgtttcaagcgcttgtcagatgccacaatatttatagttatgtatggcctcacgagtatgtactttgctggtgtgatggttcgcatcagctacaataaaaaatctgactaccttgttcggacaaaaagcaaaagtccacaaactgtctctggaaaatcatctggctcaaaggcagctgcaaagggtgcagttgatcaatccttgcctttccagcagaatgtggccattgctttacttctgggtgctttctacttgcttagtagatatgctgtacactgcacttgggtgacatctgaagcttactcttctccttccattgttctggccgcaaggggtcataatggaggcagggtcatatttgatgattatcgtgaagcgtattattggcttcgtcagaacactccttctgatgcaaagattatgtcatggtgggattatggataccaaatcacagctatggggaacagaactgttattgttgataacaacacatggaataatacacatatagctacagttgggcgtgcaatgtcatcctatgaagatgaagcgtatgagataatgcagtcactggatgtgaattatgtgcttgtcgtatttggtggtgttactggttattcttcagatgacattaacaagttcttatggatggtgcgcattggtggtggagtttttcctgtaatcaaagagcctgattaccttgttaatggggagtatcgtgtcgacaagggggcagcaccaaaaatgttgaattgcttaat

SEQ ID NO: 99903 - DNA, 594 bp, Oryza sativa
  Clone ID: PAT_MRT4530_97671C.1
atgggcggtgtcccggcggaggcggcagggcgacgaccgcgcccccctccaccagatctagccggaggggaggcagcagacctcggcaaaccaatggtggtggaggaggccgggcgcaggataaagaagaatagggtgattctgaagttagactttgagaaagcttatgacaaagttgattggatgtttttacaacaatcgttgcgaatgaaggatttctcttctaagtggtacaattggattgactcgactattagggctgggagtgcggcagtcaaagtaaatgatgacattggcagttattttcaaactaggaaagatatgctagccattttaatgcagagggcaaaagatcagggtagattcaaaggagtggtacctcacttagttgataatggtctctccattttaaaatatgccaatgatactattcttttaatagatcattatcttgatgaagccagagatctcaaacttgtactaagtgcatttgagaaattatcttgtttaaagattaatttccataagagtgaattattttgctatggcaaggcaaaatgtggagaacgagtacgtcaaattattttggtgtga

SEQ ID NO: 99904 - DNA, 2779 bp, Oryza sativa
  Clone ID: PAT_MRT4530_97672C.1
ctcccagatccacggcacgaggaaccaagcggccgcggcgctctaaaacctctcccgctccacgcgcggggcgcatgaaaccctagcgagaggctccagatctcccgcatccggatcgccgccatggccgccgccaccgcgctggactcgctgccggcgccgctccggtcgctgcggctgaagacgaagcagcaggagctcctgctccgggtctcggcgctggcgctcatctacgtgctcgcgttcgtcgtccgcctcttctccgtgctccgctacgagtccatgatccacgagttcgatccctacttcaactaccgcaccacgctcttcctctccgaccatggattcagcgagttctggaactggttcgatttcgagagctggtacccgctcggccgcgtcgtcggcggcaccctcttcccgggcctcatggtcaccgccgcgctgctccaccgcctcctccgcgcgctctccctcgccgtccacatccgcgaggtctgcgtcctcaccgcccccttcttcgccgccaacaccacgctcgtcgcctacgccttcggccgcgagatctgggactccggcgcgggcctcgtcgccgccgcgctcatcgccgtctgccccggctacatctcccgctccgtcgcgggctcctacgacaacgagggcgtcgccatcttcgcgctgctgctcaccttctacctcttcgtgcgcgccgtcaacacgggatctctcgcatggtcgctcgcctcggcgttcggctacttctacatggtctccgcgtggggaggctatgtcttcatcatcaatctgttgccgctctacgtgctcgtgctgctcgtcacggggaggtactcgcagaggctctacgtggcctacaattccacgtatgtgcttggaatgctacttgcgatgcagatccggttcgttgggttccaacacgtccagtctggggagcacatggccgctatgggagtattcttccttttgcaggttttctttttcttggactgggtgaagtacctgctgaatgatgccaaactattcaagtcattcctgagaatcaccctgacatgtgtgataactgttggcaccctagctcttggaattggtaccgcgtcaggttacatctccccttggacagggcggttttactccctgcttgatccaacctatgcaaaggaccatataccaatcattgcatcagtatctgagcatcaaccaacagcgtggtcttcgttcatgtttgatttccacatccttcttttcctgttcccagcaggcctctacttctgtttcaagcgcttgtcagatgccacaatatttatagttatgtatggcctcacgagtatgtactttgctggtgtgatggttcggttaattcttgttgcagcgccagctgtttgccttattagtgccattgcagcatcagctacaataaaaaatctgactaccttgattcggacaaaaagcaaaagtccacaaactgtctctggaaaatcatctggctcaaaggcagctgcaaagggtgcagttgatcaatccttgcctttccagcagaatgtggccattgctttacttctgggtgctttctacttgcttagtagatatgctgtacactgcacttgggtgacatctgaagcttactcttctccttccattgttctggccgcaaggggtcataatggaggcagggtcatatttgatgattatcgtgaagcgtattattggcttcgtcagaacactccttctgatgcaaagattatgtcatggtgggattatggataccaaatcacagctatggggaacagaactgttattgttgataacaacacatggaataatacacatatagctacagttgggcgtgcaatgtcatcctatgaagatgaagcgtatgagataatgcagtcactggatgtgaattatgtgcttgtcgtatttggtggtgttactggttattcttcagatgacattaacaagttcttatggatggtgcgcattggtggtggagtttttcctgtaatcaaagagcctgattaccttgttaatggggagtatcgtgtcgacaagggggcagcaccaaaaatgttgaattgcttaatgtacaagctttgttattaccgttttggagaactgaccacagaatatggaaaacctccaggatacgatcgagtacgaggagtggagattggcaacaaagacattaagcttgagtacttggaggaggcattcacaacttcgaactggatagtgcgcatatacaaggtcaaacccccgaagaataggtcttgaggagaggaatcatctcttggttagtatctggtgctattaccttgaggtacattgtgtcaagtcaaaacgtattggagttcctacaggagacgggcaattgatttgaaaatctgcatcagctgcccccaagtgcgatcttttgttttggtgagactgacggaagtagaccataggtcagtttgaagtaacgatcatccgtcttcccctatatcattttgttagatgtaatcaggtgccattcagaactagcaattgcgacgaccgagtactttttgattgctgagcatggtatgacagtactccagatgtttttgtaagcacaacagcttatttgcgtagtaactttagatcgggttacacgggacacttgcaattttctggtgttgaagacaacaatgaataacttaactgtggttgctctgttttcctcaaaaaaaaaaaaaaaaaaaaaaaaaaaaaaaaaaaaaaaaaaaaaaaaaaaaaaaaaaaa

SEQ ID NO: 99905 - DNA, 816 bp, Oryza sativa
  Clone ID: PAT_MRT4530_97673C.1
atgccggccgacgacgacgacgcgtcgtacctcctatgcgccgaggacgccggcgcggccgtcttcgacgtcgccgttgacatcagcacatgcaccacggaggacgacgagtgctgctccgtcggcggcgaggagctgtactcggcggcgtccatcgccgagcttatcggcggcgaggccgagtactcgccgcggtcggactaccccgaccgcctccgctcccggtccatcgacccggccgcccgggccgagtcggtctcatggattctcaaggtgcaagagtacaacggattccttcccttgacggcctacctcgccgtcaactacatggaccggttcctctccctccgccatctgccggagggtcaaggatgggcaatgcagttgctagctgtggcctgcctctcattggctgccaagatggaggaaaccctagttccctccctcctggacctacaggcaagtagagtgctcaagcacatttctaatgcaatggtgcaaaatgcaaattcagacatccagttcttggatcactgcccgtcgtcaatggctgctgccgcagtgctgtgcgccaccggtgagacaccgtcgctcgcattcgtaaaccctgagcttgcagtcaattggtgcattggccttgcagaggaagggatcagcagctgctaccaactaatgcagcagctggtaattggaaatgtacagaggtcagcagcagcagcagcagcagttaacctgttctcagatgagggtctgtcatatgattcctcctcacctcccccaccaaagaggaggaagaggtcaccaccaggcacatga

SEQ ID NO: 99906 - DNA, 1767 bp, Oryza sativa
  Clone ID: PAT_MRT4530_97674C.1
atggacaaacccacccaagagcaacccacgggtgacaagggcaaggaaactcagctagtcatggaggaagatatttgcatgcaagtagtcgcggaggaatcttcgttgtctagctcaagtgaaccaggcagtggatcgtatcactcgtcgagtgacccccatccttctcctgcaaagaagagaaagggcggtagcgacaatgaagttgactccgactacgttcctcccgaaccggtgttgaatgctccacgtcgctccaaaaggaaagaccaagccgcaactaaacctgaagctgaagctacagctgtcgtgcgcacaacagcttcaagcaaacccaagaaaaggagggtcgagcgagggaagaacatgctgttgaaggaagtaagcgttctgacgcggatgagtgagataggggaacccctgtcaccggaatactcatgttcgaagtatagcaaccaatgtggggcggtggtcagggatatcgtggagatcacatggaaggattggaagaaagttccagagagtagaaagaacagctgttggacgtcgctgcaaagcaagtttgaatatccagaggggacagatgacgataaagccaaggattatgcgttgaactgggtgcgtgcaagaacaccggtcttcacccctgagggggatgtagtattcaaggatcagaagctcaaggaagtagctgtcaagatgaagaacatcgtcatgcagcaacaggccgggacgttcgtgccagatagagaccgggacgagctgatctatgccttgggcaaaccggagcactctggctatgtacggggagtttcctcaaagactagctggaaggatggattcaaacaggatgcttatacctacaagaagtgtgatcgctacaaggaagagattgactctcaggctagggcagcagctcgtgacgaatgcaatatatactggagtcagaatatgatgcacggtgctgctgttttagagcctgagctgagctatcctttcgatgatgcttaccggatgcacgagctcgactttccaactactgagcagattgtgtaccttggagatgccgtcgaccaattcatactatggcacaagaatgatattgaactagggtcaacggatggaattgatcgtccaccaaggatatcggtgtcaccgtcgcgtccaccagtcgtagccagtccgagggatagtcctattgcttcacgccctagaccagagccactagttgcatcaccttcaggaccagagccaccagttgcatcacctcctagaccagagcctcctgttgcatcacctcggaatgaaaaggatgcagaagaacaatcggtgcttgcaaagcaacaatcacagctagcaatacaggaaatgtctcccgcacaaccatcagagcctgtacaagcagagcctacaaagctagcggcgggtgaaatagaagcggtgcctgagcagccaatgcccgaccaaccagagcaatcgcaatcagagccatcgcaaccagaggaacctaagggtgccgatgtgccagtgatggtaaggacgcacaagcacaaagcaaaaagtgcgtccaagaaacattatatggtaacggcattccgaggaagggacaaagatatcgtaaatgccgaatttgataacagaaaattaaaagggttcaagcagacctttgatgactatctcaactatatcaattccccagacgtgccacacgagtttgagaatggcaaaccattcatttacgactggcaactaagagaaggaccgtag

SEQ ID NO: 99907 - DNA, 2142 bp, Oryza sativa
  Clone ID: PAT_MRT4530_97675C.1
atggacaaacccacccaagagcaacccacgggtgacaagggcaaggaaactcagctagtcatggaggaagatatttgcacgcaagtaatcgcggaggaatcttcgtcgtctagctcaagtgaatcaagcagtggatcgtatcactcgccgagtgacccccatccttctcctacaaagaagagaaagggcagtagcgacaatgaagttgactccgactacgttccccccgaaccggtgttgaatgctccacgtcgctccaaaaggaaagcccaagccgcaactgaacctgaagctgaagctacaactgtcgtgcacacaacagcttcaagcaaacctaagaaaaggaggggcgagcgagggaagaacatgttgttgaaggaaaaaacagacctgaataagaaatatgtccagaagggactcacgccgtttaaggactacggaaggataacacaggcccagtgggatgagtttgttgcccttaagacatcggcggaagaaaaggagaagagccagaagatggctgagctagcaagaaggaatgaatatccacatcatttgggatcgaccggttaccgggcgggaaagaaaatactcgttgcaactgggaggttcataccaggccacaggtttcattgccaagacattccggatgactacgtcaaggtagaggtccggacggtcattgaggcttaccggatacacgagctcgactttccaactactgagcagattgtgtaccttggagatgccgtcgaccaattcatactatggcacaagaatgatattgaactagggtcaacggatggaattgatcgtccaccaaggataccggtgtcacagtcgcgtccaccagtcgtagccagtccgagggatagtcctattacttcaccccctagaccagagccaccagttgcatcacctctaggaccagagccaccagttgcatcacctcctagaccagagcctcccgttgcatcagctcggactaaaaaggatgcaaaagaacaattggtgcttgcaaagaaacaatcacagctagcaatacgggaaatgtctcccgcacaaccatcacagcctgtacaagcagagcctacaaagctagtggcgggtgaaatagaagcggtgcctgagcaaccaatgcccgaccaaccagagcaatcgcaaccagagccatcgcaaccagaggaacctaagggtgccgatgtgccagtgatggatgaattacgtggaagccgaagcgatgaaaaagcctgtcgcctacctaaacccgtgcaggataatgaccattggatagtctttcttctctatctaaagtacaatgaagtcatcgtcttggattccctcgacaaagatagcaacacctatcaggaatttctaagaattcacgatctcttccaaaattccccaagtctgaaaaacagctcgatgatacttccattcacaacattcaggcggacatgtgctacttcatccaccggatggtcagtgaacttctattggtttcaaaggaggatagagatccattggggcaggctcgaaagtgtgtcgtcacttgcatggtttatgtcgaaccaggagaccagctttgtgacaataggacagagggtcctagctaatccattaaaggtacgatttcactatggacatcctgatgtgttcgacaggatttttaacattacaagaggaggcattagcaaggcttcctgtggtataaatttaagtgaagacatttttgctggagctagaggaaatgcatctcaggtacaccaattagtaggggtcaggagggacaaaaaagatatgctgttctctatcagtcccaagcggataccccccagcttccacggtccgcttaccgaggaagagatgcgggaggaccaagggccagagcaagttgggttggggtatagagccgtaagcgcggtgggggtgacagaggatgtgctcgtacggttcatagttgggtatgatattctcgtggattgttgggaacgtcctctatattcgaaatatgcctttctaggagcattacgatctgcagctcaaatggtcccttatgaagtctctattggtcttattcttattgtgcgccttgtgagcacgtttggatccgcgaaggcaatcgctcggatcttcccctaa

SEQ ID NO: 99908 - DNA, 1554 bp, Oryza sativa
  Clone ID: PAT_MRT4530_97676C.1
acgaaaatggcgctcccagcaaccgttagccacacgacctgcgccatccagcggcggcgccgctccaccgcgccagctcgccgacgaggcccaccttctcgccgccatccccactccggcgcggccctcaccctccgcgccgcgccgccgccggccacccagcccaccctggaccgcgtcctctccgacctcgggtcccacccgcgcctcctcacccccgacctcctcgactccctcctcgccgccctcccgctccacccctccccgcgccgcaacctcgcccgcctccgccgcctcctctccgtctccctcctccgccgctaccccgcgctcgcccgccgcctcctccacctccacgcctctctgggcctcgtctcctacgcccaccacctgttcgaccacctgctgcccgcgcgcgcccgggaggacgccttcccgtggaactgcctcatcgccgggtacgcgcgcctcggccgccacgaggacgcgctcgcgctctacctccagatggaggaggagaccgtcccgcgggaccgcttcaccttcacgagcgcgctccaggcctgcgccggcgtcggctcggtcgagctcggccatgccatccaccgtgacgtcgtgcgcgccggtctcgcgtccgacgtgcctgtgtgcgacgccctcgtggatttgtacgccacattcggcgacgtacggagggctctccaggtgttcgatgcaatgccggacagggacggcgtctcatggaacatcatgcttgctgggtgcctgcgacatgggctctcccagcaggctctggagctctggagaagaatgctgagagaagaacatgagcccgactccattacattatcaacaatgctgtcgatactgccgttggtttgtgacaatggtaaatggggactggagattcatgcctgggcaattcgtcatggtctcgagacagagctgtcagtagcaaatgctctgatcaggatgtactctgataagaacgaacagagccatgccctgttggtgtttgagtcaatgacgatgagggatctgcagtcctggaatgctataatctctgctcacctccaggactacagaattctcatgatcttccgtcgaatggtggattccgggatgcgaccagatgagaccacctttgcgttggtgttctcagcttgtgacaatttagggctggtggagggtggcatgagattgttctctgagatggagaatgagtacagaattccccctactatggaacaatatacctgcatggtgaacatgctaggcaaggctgggatgatccatgaggcttacgagttcatgtcgaagcggaagcctctcgacaatgaacagactgttttgagggctctactgcaggcttgcttgatgcatcgcaacgccagggttggagagatcattgcgaagaggttgatcgaactggagcctgacaatgagcacaattttgtaaagttgatggagatctatcaaaatgtgggaaggttggtagaggctgaaaaggtgaagaagacgatgagggatagaggactgtcatgtcaaagctga

SEQ ID NO: 99909 - DNA, 2077 bp, Oryza sativa
  Clone ID: PAT_MRT4530_97677C.1
ctcatatattcaccttcaaaggatatcaatggacaaacccacccaagagcaacccacgggtgacaagggcaaggaaactcaggccgtcatcgaggaagaaatttgcacgcaagtagtcgcggaggaatcttcgtcgagctcaagtgaaccaggtagtagatcgtatcactcaccgagtgacccccatccttctcctgcaaagaagagaaagggcggtagtgacaatgaagttgactctgactatgttccccctgaaccggtgaagaatgctccacgtcgctccaaaaggaaatcccaagccgcaaccgaacctgaagctgaagctacagctgtcgtgcgcacaacagcttcaagcaaacccaagaaatggaggggcgagcgagggaagaaaatgctattgaaggaagtaagtgtgctgacacggatgagtgagacaggggaacccttgtcaccggaagactcatattcgaagtatagcaaccaatgtggggcggtgacgtcactgcaaagcaagtttgaatatccagaggggacagacgacgataaagccaaggaatatgcgttgaagactatggagaagctgtggcgaaactggaaaatagacctaaataagaaatatatgtagaagggactcacgccgtttaaggactacggaaggataacacaggcccagtgggatgagttcattgcccttaagacatcggcggaagaaaaggagaagagctagaagatggctgagctagcaagaaggaatgaatatccacatcatttgggatcgaccggttaccggcaagcggtgaagaaatggcaaaacaagatgaagagatggagaaggctgggaaaccgattcctatgaaaaatcacaacccacgaagcaggaactgggtgcgtgcaagaacaccggccttcacctctgagggggatgtagtattcaaggatcagaagctccaggaggtagctgtcaagatgaagaacatcatcacgcagcaacaggcctggacgtttgtgccagatagagactgggacgagctgacctatgccttgggcaaaccggagcactctggccgtgctgttttagagcctgagctgagctatcctttcgatgatgtaacggaggatactccgtgcaagctcttgattccggtcggcagggcgggaaagaaaatactcgttgcaactgggaggttcataccaggtcgcaggtttcattgccaagacattccggatgactacgccaaggtagaggtccggacggtcattgaggcttactggatgcacgcgctcgactttccaactactgagtagattgtgtaccttggagatgccgtcgaccaattcatactatggcacaagaatgatattgaactagggtcaactgaaggaactgattcttcaccccctagaccagagccaccagttgcatcacctccaggatcagagcctcctgttgcatcacctccgactaaaaaggatgcataagaacaatcggtgcttgcaaagcaacaatcacagctagcaatacgacaaatgtcttccgcacaaccatcagagcctgtacaagcggagcctacaaagctagcggcgggtgaaattgaagcggtgcctgaacagacaatgcctgatcaaccagagccatcgcaaccagaggaacctaaggatgccgatgtgctagtgatggtaaggacgcacaagcacaaagcaaaaagtgcgtccaagaaacagtatatggtaacggcattccgaggaaaggagaaagatatcgtaaatgccgagtttgataaaagaaaattaaaagggttcaaacataccttttatcactatctcaactatatcaattctctagatgagccacacgagtttgagaatgacaaaccattcatttacgactggaaactaagagaaggaccgtggcaactaagaaggcggcacgattggtacattagggcaagcaccatgaaaggcatttcatcattcacagttgctgtgggggagaacatcttctagagaggtctttgtctactctaagtccatttctccgatatgcattccctctactgtaggaagaggctggacgcca

SEQ ID NO: 99910 - DNA, 2388 bp, Oryza sativa
  Clone ID: PAT_MRT4530_97678C.1
atggacaaacccatccaagagcaacccacgggtgacaagagcaaggaaactcagctagtcatggaggaagatatttgcacgcaagtagtcgcggaggaatctttgtcgtctagctcaaatgaaccaggtagtggatcgtatcactcgccgagtgacccccatccttctcctgcaaagaagagaaagggcggtagcgactatgaagttgactctgactacgttccccccgaatcggtgttgaatgctccacgtcgctccaaaaggaaagcccaagccgcaactgaacctgaagctgaagctacagctgtcgtgcgcacaacagctttaagcaaacccaagaaaaggaggggcgagcgagggaagaacatgttgttgaaggaagtaagcgtgctgacgcggatgagtgagataggggaacccctatcaccgcaagactcatgttcgaagtatagcaaccaatgtggggcggtggtcagggatatcgtggagatcacatggaaggattggaagaaagttccagagagtcgaaagaatagctgttggacgtcgctgcaaagcaagtttgaatatccggaggggacagacaacgataaagctaaggattatgcgttgaagacaatggggaagttgtggcgaaactggaaaacagacctgaataagaaatatgtccagaagggactcactccgtttaaggactacggaaggataacacaggcccagtgggatgagttcgttgcccttaagacatcgacagaagaaaaggagaagagccagaagatggcaaaacaagatgaagagatggagaaggctgggaaacccgttcctatgaaaaatcacaacccacaaagtaggaactgggtgcgtgcaagaacaccggccttcacccctgagggggatgtagtattcaaggatcagaagctccaggaggtagctgtcaagatgaagaacatcgtcacgcagcaacaggccgggacgttcgtgccagatacaaaccgggacgagttgacctatgccttgggcaaaccggagcactctggccgtgtacagggagtttcctcaaagactaactggaaggatggattcaaacaggatgctcatacctacaagaagcgtgatcgctacaaggaagagattgactctcaggctagggcagtagctcgcgatgaatgcaatatatactggagtcagaaaatgatgcacggtgctgctgttttagagcctgagccgagctatcctttcgatgatgtaacggaggatactccgtgcaagctcttgattccggtcggcagggcaggaaagaaaatactcgttgcaactaggaggttcataccaggccgcaggtttctttgccaagacattccggatgactacgccaaggtagaggtccggacggtcattgaggcttaccagatacacgagctcgactttccaactactgagcagattgtgtaccttggagatgccgtcgaccaattcatactatggcacaagaatgatattgaactagggtcaatggatggaactaatcgtccaccaaggataccgaccttcgatgactatctcaactatatcaattccccagatgtgccacacgagtttgagaatggcaaaccattcatttacaactggcaactaagagaaggaccgtggcaactaagaaggtggcacgattggtacattagggcaagcaccatgaaaggcatcgattcattcacagttgccgtgggggagaacatcttttggagcggtccttgtctactccaagtctatttctccgatatgcattccctctaccataggaagcggctggacgccaatttgattgccatctggtgtctgatgaattacgtggaagccgaagcgatgaaaaagcctgttgcctacctaaacccgtgcaggataagtaaatcgaaccaaacatacacgctagacgagaagaagctaccggaacacatcaaggcaatgactcccgaagagaggaaagcttacatagcacaaaagcattttgaaaaggtgctcgatgttgctactgcatttaaaaggtattaccagcgagatggacaatgcaaaaactcaagagaacgcatattcgtccgcaataagtggccgtgtcacaagcaaccggtgggaacagtactatgcggatattactgttgtgagttcctaagggttaatgggaaatattgtacgaattacgacgagcttccaaaatttcccaagtctgaaagagagctcaatgatacatccattcaggacattcaggcagacatgtgctacttcatccaccgtgagtgcgcacatcagcttgggcggttttttgacaacgaaggagtcttagccctgccggagaacgaatccctgtctaactggaccaggcatataatatag

SEQ ID NO: 99911 - DNA, 3036 bp, Oryza sativa
  Clone ID: PAT_MRT4530_97679C.1
atgtctaacatcatccacgtggaaaaaccgccagcgcagaaaatcgtgggggtgggggtcaagggccgccagcggaaacacatcttcgctagcggtctatttaagaaggccgccagcgaagataggatggaagagatgttgcgtcatgctgaacctgaggatgttgctgggtccgctcgtgggttggataactttgatgcattgaaaaaggcagcgaatgatcttttgtacgatgaggcaaagggctgtgagaaggatttcacattgttgcggacagtgcttgagcttatgagattgaaggccagaaatgatgcaagacagtggaaggaatttgacataaagtatcataagtttgtagaggacccaagaaacggaccacaacaacctggcaatgacatggatgtgtttctagagcctttgctggaggatatgcgcgatttgtgggaacacgggatccgagtttgggacgaattcctgcgggagtacttcacgctacatgcaattatctttgtcaccgtcaacgacttgcccgcactgttttccctattgggacagatcaagggaaagacgggttgcattatttgtgtggatggtaccgtgtacaggtatcttaagcgatcgaagaagctagtgtacatgcggcaccgacgtttcttacgaaagaatcactcgtaccgctcccaagcagaatatttcgacggtactattgagaaaggtgtagcaccagaaccatggaagggtgataaagtgttcagaatgaccaaaaacctgaaggttgtttttgggaagaccaaggatgggctaaaatcacgtaaggacctcgtggatatgcaaataaggaaagggcttcatcctgtggatgaagccggcgtgtctgtggacaactttgggctgacaatagttgactttgaaaatgtaggccacaaggatgacccatgggctgccaaaatttcgagcgccgccgccagcgataaccctagcgcccaccaccgccgccgcctcctcctccatttgcgccatcctccattcggacacagctcctccattcgcgcctccaccgccgccgccggctccttctcctctcggcccgccgccgccgccgctagatccattcgcacctcctctccaccaccgccgctagatccagctcctctccgaccgacggccaccgcatcctcctcctctccgccgcctcctcctcgattggcccaccgtctctaccaccgccgccgccagatcgagctccacctctcccccggctcctccttcctccacctcgggagttgtcgccgccaccgggactcgtccgctggctcctcttctccgccgccgccgccgactcctcctcctaccgccgctgccaagaccgccgccgggacctcctcttcctccgccggttcctcgtcgtcgacgccgcctccacctcaggagtcatcactaccgccgggtcctcgttgtcgacgccgccgccgccgggtcctcgtcgtcgacgccgggaccagctccgccgcctcttcctcctccgcgccaccgccgtcgccgccgcaccggaactccacggtgagccgtgacgagaagccgagggatatcgtggagatcacatggaaggattggaagaaagttccagagagtcgaaagaacagctgttggacatcgttgcaaagcaagtttgaatatccagaggggacagacaatgataaagccaaggattatgcgttgaagacaatggggaagctgtggcgaaattggaaaacggatctgaataagaaatatgtccaaaagggactcacgccgtttaaggactacggaaggataacacaggcccagtgggatgagttcgttacccttaagacatcggcggaagaaaaggagaagagccagaagatggctgagctagcaagaaggaatggatatccacatcatttgggatcaaccggaacaccggccttcacccctgagggggatgtagtattcaaggatcagaagctccaggaggtagctgtcaagatgaagaacatcatcacgcagcaacaggccgggacgttcgtgccagatagagaccgggacgagctaacctatgccttgggcaaaccggagcactctggccatgtacggggagtttcctcaaagactaactggaaggatggattcaaacaggatgcttatacctacaagaagcgtgatcgctacaaggaagagattgactctcaggctagggcagcagcttgtgacgaatgcaacatatactggagtcaaaaaatgatgcacagtgtagctgttttagagcctgagccgagctatcctttcgatgttgtaacggaggatactccgtgcaagctcttgatttcggtcggcagggcaggaaagaaaatactcgttgcaactgggaggttcataccaggccacatgtttcattgccaagacattccggatgactacgccaaggtagaggtccggacggtcattgaggcttaccggatgcacgagctcgactttccaactactgagcagattgtgtaccttggagatgccatcgaccaattcatactatggcacaagaatgatattgaactagggtcaacggatggaactgatcgtccaccaaggataccggtgtcaccgtcgcatccaccagtcgtagcccgtccgagggatagtcctattgcttcaccccctagaccagagccaccagttgcatcacctctaggaccaaagccactagttgcatcatctcgaggaccagagccaccagttgcatcacctccagtaccagagccaccagttgcctcacctccagtaccggagcctcctgttgcatcacctcggacaaaaaaggatgcagaagaaccatcagagtctgtacaagcagagcctacaaagctagcggcgggtgaaattgaagcggtgcctgatcagccaatgcccgatcaaccagagcaatcgcaaccagagccatcgcaaccagaggaacctaagggtgccgatgtgctagtgatggacaaggagtgtgtttatgccccatatgcctttgagtaa

SEQ ID NO: 99912 - DNA, 893 bp, Oryza sativa
  Clone ID: PAT_MRT4530_9767C.1
ttatttttgaacaggaaaaaggaattattgcgtcagcggctagggtttgcggtggaccgggtgcacggcggcggctcacggaaacgaacggccgagatcgatcctatccaaaacggacggccgagatcgaacggtccacggccagaccacgagagacgacgacgatgacgtcagcgacgacgtcaccaccggcggcggctcgggcgcgcatgctcaccggcgaacgacggcgtggcggcgcgaacggagagcacctacgggtagcggacggcacggcaaactcaccggtgaccaaagaagaagcggcggcgaccttcggcttgacgacgacggcggtgttccggcggtcgacagcaacggcggaggggcggacgaggacggcgacgcgacggcgaccacgatggcgaccttcccgagcgacgacgacgactggagcgacggcggcgcacggctggagcggcggcgacgacggcggcgcgaggtctcacggggctagggcgctacggacgacgagagacgaaggcaagggtggcgacgggggttggaaggcagcgtcggaggcccacggtgaccggcgacggcgaaggaaggtctagggttcagaggagagagatcgatctgaatcgaactcgaatccgcgaatttccaaacgaaattagccgacgattccataagagaaaagatagaggggattccgaagatcatttcccctctattgatttcaccggagaaggaaaggcgcggtggggcccacctgtcagcgggagagagagagaggagagcggcagctcggttgcgggccggcttgggccgaggagagagagaaaaagagaggggttttgggccgactttcggcccaaagcaaaaagagacttttaaaaacctttttcaat

SEQ ID NO: 99913 - DNA, 391 bp, Oryza sativa
  unsure (1)..(391): unsure at all n locations
  Clone ID: PAT_MRT4530_97680C.1
taaacctgtgttctccgcggtttacccacaagtgtgtttacacactggtgtgcaccnnataaggggctcaaaataccacaggacggctattaagcgatttcgcacaaaggaaaatgtgattgctgtttgctgcttgctaatgtggtgaaagccgctgcacctaatgtggacccctggattggatgttttcccctcccggctccctgatccctcctgggtncaaatatggatcattattccttgttccgtggatggctgtcggctggttggtcatgcatagttttttggtagagaatacatggtaaagatccttttgtgaatgaatccgaatggataatgtttgttcaagaaatatagngtcatgttgttcttttttgccccagtaaaaaaa

SEQ ID NO: 99914 - DNA, 2506 bp, Oryza sativa
  Clone ID: PAT_MRT4530_97681C.1
ctatattatacggatagtccagttagacagggattcgttctccggcagggctaagactccttcgttgtcgaaaaaccgcccaagctgatgtgcgcactcacggtggatgaagtagcacatgtccgcctgaatgttctgaatggatgtatcattgagctctctttcagacttggggaattttggaagctcgtcgtaattcgcacaatatttcccattaacccttaggaactcagaacaataatatccgcatagtactattcccaccggttgcttgtgacacggccacttattgcggacgaatatgcgttctcttgagtttttgcgttgttcgcctcgctggtaataccttttaaatgcaagatcgataattcttagaaattcctgataggtattgctatctttgtcgagagaatccaagacgatgacttcattgtactttggatagagaagaaagactatccattggtcgtcaaaggcatatggggcataaacacactccttgtcctgcatagattcaagcgcaatagctacgtacgtagcgacatcgagcatcttttcaagatgcttttgtgctatgtaagctttcctctcttcgggagtcatcaccttgatgtgttccggtagcttcttctcgtctagcgtatatgtgtggttcggcttacttatcatgcacgggtttaggtaggcgacaggctttttcatcgcttcggcttccacgtaattcatcagacaccagatggcaatcaaattggcgtccagccgcttcctacggtagagggaatgcatatcggagaaatggacttggagtagacaaggaccgctccagaagatgttctcccccacggcaactgtgaatgaattgatgcctttcatggtgctagccctaatgtaccaatcgtgccaccttcttagttgccacggtccttctcttagttgccagtcgtaaatgaatggtttgccattctcaaactcgtgtggcacatctgcggaattgatatagttgagatagtcatcgaaggtctgtttgaacccttttaattttctgttatcaaattcggcatttatgatatctttctcctttcctcggaatgccgttaccatatactgtttcttggacgcactttttgctttgtgcttgtgcgtccttaccatcactagcacatcggcatccttaggttcctctggttgcgatggctctggttgatcaggcattgtctgttcaggcaccgcttcaatttcacccgccgctagctttgtaggctccgcttgtacaggctctgatggttgtgcggaagacatttgtcgtattgctagctgtgattgttgctttgcaagcaccgattgttcttatgcatcctttttagtcggaggtgatgcaacaggaggctctgatcctggaggtgatgcaactggtggctctggtctagggggtgaagcaataggactatccctcggactagctacgactagtggacgtgatgataataccgatatccttggtggacaatcagttccttcagttgaccctagttcaatatcattcttgtgccatagtatgaattggtcgacggcatctccaaggtacacaatctactcagtagttggaaagtcgagcgcgtgcatccagtaagcctcaatgaccgtccggacctctaccttggcgtagtcatccggaatgtcttggcaatgaaacctgcgacctggtatgaacctcccagttgcaacgagtattttctttcccgccctgccgaccggaatcaagagcttgcacggagtatcctccgttacatcatcgaaaggatagctcagctcaggctctaaaacagcagcaccgtgcatcattttctgactccagtatatattgcattcgtcacgagctactgccctagcctgagagtcaatctcttccctgtagcgatcacgcttcttgtatgtatgagcatcctgtttgaatccatccttccagctagtctttgaggatactccccgtacacggccagagtgctccggtttgcccaaggcataggtcagctcgtcccagtctctatctggcacaaacgtccaggcctgttgctgcgtgatgatgttcttcatcttgacagctacctcctggagcttctgatccttgaatactacatccccctcagaggtgaaggccggtgttcttgcacgcacccagttcctgcttcgtgggttgtgatttttcataggaatcggtttcccagccttctccatctcttcatcttgttttgccatttcttcaccgcttgccggtaaccggtcgatcccaaatgatgtggatattcattccttcttgctagctcagccatcttctagctcttctccttttcttccgccgatgtcttaagggcaatgaactcatcccactgggcctgtgttatccttccgtagtccttaaacggcgtgagtcccttctacatatatttcttatttaggtctattttccagtttcgccacagcttctccatagtcttcaacgcatatt

SEQ ID NO: 99915 - DNA, 378 bp, Oryza sativa
  Clone ID: PAT_MRT4530_97682C.1
atggacaaacccacccaagagcaacccacgggtgacaagggcaaggaaactcaggccgtcatcgaggaagaaatttgcacgcaagtagtcgcggaggaatcttcgtcgagctcaagtgaaccaggtagtagatcgtatcactcaccgagtgacccccatccttctcctgcaaagaagagaaagggcggtagtgacaatgaagttgactctgactatgttccccctgaaccggtgaagaatgctccacgtcgctccaaaaggaaatcccaagccgcaaccgaacctgaagctgaagctacagctgtcgtgcgcacaacagcttcaagcaaacccaagaaatggaggggcgagcgagggaagaaaatgctattgaaggaa

SEQ ID NO: 99916 - DNA, 315 bp, Oryza sativa
  Clone ID: PAT_MRT4530_97683C.1
tcacaacatgttcttccctcgctcgccccttcttttcttgggtttgcttaaagctgttgtgcgcacgacagctgtagcttcagcttcaggttcagttgcggcttgggctttccttttcgagcgacgtggagcattcaacaccggttcggggggaacgtagtcggagtcaacttcattgtcgctaccgccctttctcttctttgcaggagaaggatgggggtcactcggcgagtgatacgatccactgcctggttcacttgagctagacgacgaagattcctccgcgactactttcgtgcaaatatcttcctccat

SEQ ID NO: 99917 - DNA, 360 bp, Oryza sativa
  Clone ID: PAT_MRT4530_97684C.1
atggccaccttctccggcaccgaccgtctccgcgacctccaggccttcgacaacaccaaggccggtgtcaagggcctcgtcgacgccggcgtcaccgccatcccctacttcttccgccaccaccctgaccccctccccatcgccgcgccgtcggaggccgccgcggccatcctagtcatcgacctcgccaaggccgacgtcgaccgtggccacgtcgtctcccagggcccagaacttcctggtgatgaacatcggaacttcctggcagtgatgagcagcccaaaacttccggagttcttgagcccagaacttccgggcaacagagataaacgaaaatatgagaagaataacaggtcctag

SEQ ID NO: 99918 - DNA, 537 bp, Oryza sativa
  Clone ID: PAT_MRT4530_97685C.1
atggcgagcagcgtgggcgagacgcagatcgtcgccgtccccggatttggtgggcccgctccatccccgggtcgctggtggccgatggatggggcgcacgaggcgtggctccgtgtcctcgccaacctcccgcctcgcgctgcatccgacggtgatggctccatcgtcttcttcaccggcaccggcattgtctccgccaccgtagccagcttcgccttcgccgccgccgctgaacagagagaaaaaggaacaaattcagaaacaggaccagagaacataatcacaaacatagaacaagaaccagagctggggccgaataacactgaaaaatggaccatcatcagccaacgaacggttgctcgctttctggaagaagcaaaagcacagacggccaaaaatatcacgtaccacgccaaaatattccgaggatttttcataaaagaaaacgagaaacaaatggtaggagcctgcgttaagggtaaagaaggtgagctaccaagaccaaatctgtacgaacatcacaaggaaaaaagatga

SEQ ID NO: 99919 - DNA, 168 bp, Oryza sativa
  Clone ID: PAT_MRT4530_97686C.1
aggttggtaaaacgtgggcgtagccaagaaagtagtagtgggttcccagggtgtttcccctcgtttgcgtaggaggaggttgttgtacgggtgtcgtaggtgggagtaaccagtacagttagcagtgtgtttggaggtagcggacagagcggttggttgtgactcagt

SEQ ID NO: 99920 - DNA, 523 bp, Oryza sativa
  Clone ID: PAT_MRT4530_97687C.1
tcactcgtgcatgcaggcgcaagtgcggagcggcggtcggacgacggcggcgctctggggcgggcggcgaacgacggcgagtgggagcggcgcaagtgcgcacggaggcgcggagctgcggacgacggcgacgcgtgggggcgcacggtggaaggcggcgcacgggggcgggcggcggacggcgaccagtaggagcggcacaagtgcgctcggcggcccggcgccgctgaaaacggcggttcgtgggggcggtccgcttaccgggtgcctgtagtcttcgccgctcccctcccttctcccatatgggcgtttcttgacgcgcggatgactcttttgacgcgccgtgccgacgcagggtcgtctagcgtaccatgttgagtttggccccggcgcgtgggttgcgcggtgatccgtttgtgttgccgttgccgtcactgccccctccttaaattcttgccccgccctggctgcgctcgcgaggctgccttctctcgcgttatgcccttttgtgagcttcccctct

SEQ ID NO: 99921 - DNA, 433 bp, Oryza sativa
  Clone ID: PAT_MRT4530_97688C.1
ggtggtttgtgacgtcagggggcaagtgctctaagaaaaacacgagcaacagcaccgagaggatttgccaccggtgcatgacggacactctgcaaagccagcaccacagccatcgcacagcaacagctccctgcagaaggaatccgctttctgtataagaatttatctcatcaagtttagcaggaggctgttgggatgctgcgctgcactgatcgatccatgttgacaacaccatccctttgatgccatgatgcttccgctggttgcgacatagctctctcgctttctatcagcttgggggtttctgatgttctcccaactccaagcagagggtgagtcggagaaggagcgacgcaggagaggtgttgttctgttggagagcctgaaaaggacgacggcatttcagtagcagcatctcttgtcagatggctag

SEQ ID NO: 99922 - DNA, 2052 bp, Oryza sativa
  Clone ID: PAT_MRT4530_97689C.1
ttttttttttttttttttttttttttttttttttagatcagaaccaagcacttattgcatcttccaacagaagttaaaaacattccaaacacatgtccacaacggtgcaggttggttttttgctaaaatcacctctaagcaggtgatcgattacagacagtggcagctgcgataaccctaataggtactggatctcaacaacaccaggaggggttcgtggaaatcatcacttgggcagaatgggatgcacaaaaatgggacagcactggatggaaacgtgcggtgaaacagttgcacatagggggtttttggatagtgtactagggagttaaattgggaggtccaggcccctacgaatgcacacgcatcctctttacatcgttctctggtacatttgcgtccgccccgttgcctcgtgccgtgccttcacctgaatttggaactttttcatcaggaacaatggcatatctttctgatggcgagacccagactttggctgcaaatggtacagctgttgatggctctaatttcttgcagccaggaccatccgggcttaaggcatcaatcatcacaggtttgttcctgtcaactatttcaccatgaccaagttgtccgctagtacccctcccccatgagaaaacatttttcttttctgtaaatgcaagagtatgcctccacccgcaagcaacttgggcaactttctgatcctctggaaacttgacctgtactgggaaacagtgatcatcagtatcaccaactccgacttgcccaaacttgttccacccccaaccataaagctttccatctgatgtaagcgccattgtatgcctccatccacctgaaatctgcgatatagagctatcctttaaggcctctagtttatgtggaactaaatgatcttcaaaatcaccatgccctagttgaccatatttgctccaaccataagtatacagtgtaccagtggaagaatcagtaattgtatggctagatccacatgcaataagcaccatctactcaccctccacagaagatactttctcaggtaccaaccgatcattgcgatcaccaagccccaagtttccatatcgaccccagccccatccatagaggtcaccatcttcagttactgcagcggtatgttcagcaccagcagcaatcattttcacacaaactccctcaaaagattgaatcttttgtgggagcaatgagtcttcagtggttccaagaccaagctgtccgttttggttgcgcccccaactttgcacttcacctgccatagtgacggcaagacaatggctatcgccgcaagctatctgcttgatctttatcccctgcagggccttgactggctgaggagtgaacacgtcgctggagttgccatggccgagcctcccgaagtctccccagccccagctgtacacctgctgctcgtcctcggagtaggcggtggtgtggtcggcgccgcagatgaccgacgtgatccccggcgcggcggcgtcgaagccgctcagcaccgtcggcaccagccggtcctccgcgtccccgtgcccgagctgcccgtcctcccctctcccccacgagcacagcacattgcccgcgaggagcgcgacggagtggctggcgccggcggagacgagcaccacggctggcggtgggtcctcccggccggacgccgcgcccgcgtcgtcggcggcggacatgaccgcgtccatgcctcgatcacccccggccgatccggaggcacaagcaagcacccagataatccgcggccacaccacccgcgctcccggcctcttgctagccttagctacactaccaaaaagagctagctcgaccggcgatggcggcggcggcggcggcggagctaagctctagcgcggcgagcgagctgcaaccacggacaggagggagccgcggggatttaagcggaggagacgcgatgggatgggcgacctgccgtattaatggctagtgtacaagagcccaccccatgtgacgctaatggcgcactgcctgcctgcctgcctctccagcccccagcggccctcgtgc

SEQ ID NO: 99923 - DNA, 2163 bp, Oryza sativa
  Clone ID: PAT_MRT4530_9768C.1
atggagctcgacaagtccacttctaccagcgcgtcgctgaagaagttgcaggaggaaggcgctctccccggtcgcaggaccatggagagggaaccaggaggggtagagccgtttcttgacctctttcgcttctactatgagttgcgttggatggaatccaacagggtgtcaggatgcgttggttttcgacttagggatggcctgaagtcgcgctatatccccttccagtgcccctcttctcgtagtaaatggcgggtgaggtggttagaaaattcggatccggtcttggttgttcccgaggagcaaccgaacaatatttcgtcttggactgccaagcccgccttgaccccctcccttcagtctttcatcgatgtcatcgatgacctccgagtgcgagggttgtcggggtatgaagtcgctgctgacttcatcggtttgaacagcgaaactgtagagcgccgcgttggtcaagtgatgatcagcggccctacaacggcgagcaacgtccctgttgctctttgcgagaagggggcagccgaacgcgaagccaccatcaatgcggcggcgtggctgaaggagaacgtcgccaaggaggtgtctgatgttgctgctgctgctgccacaacgagtggcggcaacatcccgagaagggggaggaaattctcctccgtgatcggaaatcgtcggaaaacgcccaccccctcgataagctctcctggtcgttcatcgcgtagtcggaaagcttccacctcacatcatgcccgttatactccaggcctcggatgcgtctccccgcctccgcgacggcagcggcttgtgacgcttggcgagaacctttcacagggcggcgcgggcgaaggcggcataagacggatctggagggacttccagcgcgtctcctgccgtgaggagctccaggtcaagatggggcgcctcctcgaggctggtgctcgcggcattagccacgagatcgtagaggcgagggcggcggcggcgtcgtcggcgaacgagcgcgccgaccggctgacgcatgatttggcggaggtttgcaaggacctccagaagatgagggaattggtggccggcaacgagcgacaacggcaggggctcgagcaccgtatgtcggagctcgagaacaacttgttggaaatctgtggctcgctgcgggtcacctacactggtctgcaccagctcgccggggagtgcggtgtcaagaccaccatccctgcgaatcccaatgaattctcgctgatgacttcgcttgcggaactggcgacggcgatggaggcgatcccctccaagcacgcggccaggatcgaagaggagatgtctaacgggatttataccggggcgtgccatgtccttgcgtgtgtgaggctggcgcatcctgaactcgatcttcggaagatcctggatcagggggtggctagcgacgcgcgcaaggatgtgatggaggaagtcagagacctgggggagtctgtcctccccctttttgaagaagatgtcggtgtcgagaatgtccagcagcgcgggcagcctgaattgcttgaggttgcttcgacacttgagctcgagccgtacatgccgcgggatggcatagaccaggatctgcccaaggagacggacgtggtgtcgacttctttagacctcgagagtgtgcttgctgatcacgaccgtcgcatccagtattggaggacgaagtttgaggtcgccgaacttgagaggactatattggaggtgaagagggatcgggctgtggaggcgctccgaggtcgcgaggtatggttcaactcgtacctcaggagttgttgcataaccatggccgttgtctgcagagagctccgagtacctcgcggggatcccgaggagtcagcggctggctacatctcgtggctgaacggggcttgcgctcagcttgaaggcatcggcgggtgtatcgacgaggccctaaaacaggaatgtcgtccatcgagtcgatacgccggagggcacatactggcgtgtatacgagatcatcgtccgcagttgcacctcgagttccttcacgaagggttttcccgttctcggaggaaccctacggagatagacaacctagcgaagttgatggctccgctagctgagaaaatcttccattcaatggattggcattggccttcttggtag

SEQ ID NO: 99924 - DNA, 465 bp, Oryza sativa
  Clone ID: PAT_MRT4530_97690C.1
atggggagttcatccaaggcgacggccagcaatccgctcggtggaagcacgatcttggagaaactctccaagaccaatcacgcgctcgacgacaactttgagccggtcatctcatccattgtcagtaaaaccgaaccgatgattaatttctgggagaggcatactcctagtggcttggctttgagcagtgcctggcccgtcgacaaaccaccgaagcgacagtcaatatggccaatcgaggacgtggcggctaacagagcaggcacaatggcaaccatgaccacgggaacaatggaggctacaacggtgcaaaccgcgaccgagatcatggaaacggtgccaccggcgggtgccaaggaggagttgatactagacgcaagtgctaactctgctataaaagaggacatatataccaatcttggaatttacttttcactaatacagatatgtggaactagtacttga

SEQ ID NO: 99925 - DNA, 252 bp, Oryza sativa
  Clone ID: PAT_MRT4530_97691C.1
atgtggctggctggaagcacagagagcaggaggcctacaaagaagcgagcaggaccaagtgccattggtggggcagcagagcagaggcatgacggaggagcgaatagagtgagcgagtggcaggtcggtagtggcaaaggtcgccccggaagaaatcccaaacctcttctggttgaaacagcatgtgaggaaatagacaaagataaagaagttcctctttttaaaagagtaatatgttcccctttttcctaa

SEQ ID NO: 99926 - DNA, 408 bp, Oryza sativa
  Clone ID: PAT_MRT4530_97692C.1
gcttgcaatatttgcatggcatatattcaatctatattcaaatacctccaaaatatttgactcccctgacccaaccataccaaatgcattcacataaaatctgtttgttcagataccattttagttaatagacccatctattagaagaagatgaaagaaaaaaggtaagtctgaccgcattgattcaagcagcaggtccaatacatctgcaaggagacggttcgaaaggtaagtcgccacattgactacaaagagcagagccaacagatcctttgcatctctgtctcatggatttcccaaattcatgagatacatcaaatgtaccgagcagaaagttttcttcaacatgttaatcacattatcccttgtcctggtcctatgactccaattaaagaaggcctggtgaca

SEQ ID NO: 99927 - DNA, 432 bp, Oryza sativa
  Clone ID: PAT_MRT4530_97693C.1
atgcagcggaaagaaagaaagacaacaggagttaagccttggctagaactgcagcgggaacaccactccacaggcatcctcgacggcacggacgaagcctactcctcggagaaaccttcatctgacacatactcgtactctggggggcccaccggtcagcgactcaagggggagggcggttcaccgtggaccgggaccacacgggtggtccacggccggtccacggaaccgacggcccagatcgccctcggggtcgatcggacgggcagcggcgtcccggctcggctcaaggccgaccgaccggccgtggcgacggcgacggcacgcgcacacgcgaacgcgttaccggcgacggcaaccggcggcggagacggcggcgcaaaggtggccgaaagcgacggcgcgcgtcttgaagcggcggcgcggcactag

SEQ ID NO: 99928 - DNA, 565 bp, Oryza sativa
  Clone ID: PAT_MRT4530_97694C.1
gcacgaggagaaataatcgaacctcatatagcattattgagttaatcgtcattaattcatataggtggggattttggatagatggctgcatgccagcagcagatttggcaagaagggaagcagcagcagcatctgcaccacggtggctatgatgatctttcttcagtgtacagaggcacggttgtgctgccacggcggcagggcggcctggcgcgggagccgccgccgccgcggccgtcatcgtcgtcggggaggagcgcggcggctcaggcgacggcgatgaggatccacagcgaggctgagaggcggcggcgggagaggattaatgctcacctggctacactgaggaggatactccctgatgctaagcagatggacaaggccaccttgctagccagcgtggtgaaccaagtgaagcacctcaagacgagagccaccgaggccaccacgccgtcgacggcggcgaccatcccaccggaggccaacgaggtgaccgtccaatgctacgccggcggcgagcacaccgcggccgcgcgcacctacgtccgcgccaccgtcagctgcg

SEQ ID NO: 99929 - DNA, 942 bp, Oryza sativa
  Clone ID: PAT_MRT4530_97695C.1
ctaacgactattgtaccagcaatattgaggatcaacgtgcgtgtgcacgaccgccgtcgagtaacgcgactccatcatcagcctctgcctcttgctcctgccgccgccgccgtacaccgtctccggcaacgccaccttggccagcgcctgcctcacggcctccttgagaggcctagcctccgccgcagcatcctcctcctcctcctcctccctgcagagcacgaaggcgtgccgcgtccggccgccgaggcagctcatgtcggcgctcagcggccgcagccggaggcggcggaacgtggcggcgatgtcggcgaggaggcccggccggtcgtcgcagctgacggtggcgcggacgtaggtgcgcgcggccgcggtgtgctcgccgccggcgtagcattggacggtcacctcgttggcctccggtgggatggtcgccgccgtcgacggcgtggtggcctcggtggctctcgtcttgaggtgcttcacttggttcaccacgctggctagcaaggtggccttgtccatctcttggaacatttcctctgagtctatctctctcatctgattcctgcgtttttcctgtggtccaatcaaacggcaattcctgtgttttgtaatcctctgttttacaattgtattcctgtcagaatcctgcttagcatcagggagtatcctcctcagtgtagccaggtgagcattaatcctctcccgccgccgcctctcagcctcgctgtggatcgtcatcgccgtcgcctgagccgccgcgctcctccccgacgacgatgacggccgcggcggcggcggctccggcgccaggccgccctgccgccgtggcagcacaaccgtgcctctgtacactgaagaaagatcatcatagccaccgtggtgcagatgctgctgctgcttcccttcttgccaaatctgctgctggcatgcagccat

SEQ ID NO: 99930 - DNA, 381 bp, Oryza sativa
  Clone ID: PAT_MRT4530_97696C.1
atggctccactatcacagcaaggctcagcgcccatgacatggaataaatttcggagcgacaaggggaagcaagtcatgtcggtcgaagaggtccaaatcctccaaaaaaaactccaatgcaagataggggacgatgaagggttcattgtctccgagttctactcggagactaaggcaactcacagtataaaaggcacaccccctaaggggttcggatcatcgaatcatagtaccgatacactcaccatagtttacgaagccggaggacgcgaaggctactcgccgggagatctcgtcgaacccttccacggtcgaactaccagaatgtctagaaatgtagagcttaaagtagaaaggctcttttggatggaaaaactatga

SEQ ID NO: 99931 - DNA, 209 bp, Oryza sativa
  Clone ID: PAT_MRT4530_97697C.1
cccccctttcgatttaaggtctttgagacgcacgtcgaggataaggtaggccttcgtcggggataatcgtctcatgcccaaaatttgcctcggatttaatggaagtcttggctactatagttttggctactgaaagactcaacactttcatcagttttggttaatacggacagcaagcctcaagactaagcgaacggagagggcgaaag

SEQ ID NO: 99932 - DNA, 631 bp, Oryza sativa
  Clone ID: PAT_MRT4530_97698C.1
acggcgaccgcagcgggctcggcgatggcggccgcagtgggctccgcgacggcgacaacgaccgcggccgcgggggctcgacttggcgacggcggggggcttgactcggcgacggcgaccgctgggggcttggctcggcgacggcgactgcgggaggctcggcgacagcgaccgtggaggctcgatgaaggcgaccgcgggggctcggctcggcgacagcgacgacgaccgcggtcgcgggggcttggctcggcgacggtggggggctcggcgacggcgaccgtggaggctcgacaacggcgaccgtggaggctcgatgacggcgaccgcgacggcgaccgcggggggctcagcgacggcgaccgcgggggcctggacgacggcgaccggcgggggctcagcgacggtgactgcggggggcttagcgacggcgacggtggatctagtggtggggagggcggtggaggcggatccgcgtcctctgcctgctcgccgccggcttgctcctccaactgcacccctgcttgcccgtccgttctcctcctctgttcgtccacctgctcgcaatattgcgccgctcctcctcgccgccagccatcgtcgcacctccgctcgctctcctctttctcgc

SEQ ID NO: 99933 - DNA, 1529 bp, Oryza sativa
  Clone ID: PAT_MRT4530_97699C.1
atggagatcgtgagatcccaccggcagatcgcggcggaggcggcggccggcgtaggatgtggcggcggggcgggaggcctgccaacctaccgggtggcgccgcagctggaggtgcggttggaagagtttgagctcttcgccatcgaccgcctccgaagactgctgctgtgttggtcagtattgaaggggatcgccgacgggctctcgcgagggaagagaccggaggaaatggagaaattggtcaaggaattgtggaaagcccatatgaggcaccaggatcctacagagactttgaacaaggacataatatctcactttgttctccgtcttgtctactgcagaacggaggagctgcggaagtggtttctctccatggagactacgctttttcgctatcgctttcggctcgagagtcctgaatcacagaggatgcttatgagtgagtttcgacttccatacaaagcattgccacactcggaatttgagcacaatggtgcttcagtcagtgcagttgaatctgtgttcttcaaggtgccttttgaagaagttccagatcttgttgccagccgccgagtatttctttcaaaaggatatgcttatgttgcgatgagtcaggttgtttcgcttgtggttacccaattccgctgcaatatctcgaaggcacttgttttaacaaatagaaaatggacggccaccattaaggaacaagaaaaggataggttgactcctattgtcgaagcattgagtaatgcatattttggacctgattactctcagttgagagaaaaccatcatctgaagcatgggggcagaatgcagtttggtcttttccttaagggagctggactaaagttggaagatgctctagcattttggagggcagagttttctcagaaggttggctctgagcgatttgacaaggaatatgcctacagtatcaggcataattatggaaaggaaggaaaacgaacaacaaatggctcctccaggattacactccgtattcatgtcaaaagattatctctgcaacacctggtgttggtgatcaccatggttgcccttatcgacattttgggtataatctcattctaccatgccattaacagagtagttaagcatttatttgttttatgtgaagacaacttgagagcagctctcaataaaatgggaatcagtggtcatccattagaagagataatggataaagtgaagaacaggcactaccagctagcttgcacgatgacttttgaggcagaacatggtgtctcatgtgatactggaatcaatcatcctaatcagtatttcagtgaaagccagaaagtcttgaaagcaaagatttgcgttaattgtgtaatcatgcccaaaaacagcatgcagaatttttgcatacaagggggagttgtgaacacctcatcagttaagttgcgctgtaatgtttctgtaatcgaaaacttgttcgacaaaacaattgcgcttccagatatgcaatttcattaattctattgctttgcacggtttcagaattccaa

SEQ ID NO: 99934 - DNA, 742 bp, Oryza sativa
  Clone ID: PAT_MRT4530_9769C.1
atggcggcggccgacacgggaggcgacgggaacggcggtccgacgacgcccgaccatggcggagccgcggccgagggccggcaagacctagggaaattattggagcggttagggagggaaataggcgaccggagcggcgagaataccacgccagagaggagaggaatggtggggctcaccggcgaccgagaggtggtggcggcgcagcgcggcagcgacgggagcggcggtggcgggcggctggagatcgccggcgagcggcggcgaaggggatcggcgtggagagctcgggggcgaggagagggccggggagcggcggatttcgaggggaagtggggcggcgtcgtgggggtgtggcggctcggcgtggcgttgattcccgcggggagagagggggagtggggcgggatgtggtcgcgaggtggaaggggtctcgggtccacgccggttgggacgaggggagccgtcgtcggagaggaggaggaggaggaggaagaggaagaggaagaggaagaggaagaggaggagtgggagatgaagaaggaggcaggggcagggagcaagctggggaggtggctgggggcgccggtgcgggcgctgtcgagggcgtgcgactcgtacgtgcggaagatgtctgcgtgcgcggggcacatgccgacgcacgcggcgggcgccatggggcggggcgggttcgccccgggggcgatgcaagtggcgacgttcaactcgctgtcgccgggcg

SEQ ID NO: 99935 - DNA, 727 bp, Oryza sativa
  Clone ID: PAT_MRT4530_976C.1
ttttttttttttttgttcaatgaacaattaacaaaagttcaaagtacttttattggcaacagagtgaacagactgcatataatgcatctgattgcatggattcgttcaggaagaaaatatatcaacgttttgaaagcgatgtcgtaacaagttaacaacccgtttatactcggtacggctgatccaccaagtcatgtgttggtggcattagttctatttggcgaaagaaccactaccaagatttctctcaagggtcgagctcttctgccaattctcgactgctcgccttactacagcttgggcattgcggatctctgcatcagtgaatttgtgctccacaatccctatcggtcctggctgtagaacgtttatcactgtctcaacatcttgctccatctgcctaaaaagttgcggcaacctttgaggtaacagcctgaggaaagacatcacgctaatcttcttaattcagattgattcctttgtttagatgttttgtagccgccggcctgctgctggcctattgctctgcctggtcaggagcagatcctggtcacgcgcgctcccgtggcgtcgccggcggccggccgcctgtctgcaacctgctcggctgctcttgctcgcggacgcgccgtcacccgtgctccgctgcttgcctgctcaccgctggcgccgccggccccccgcgctgctcgcctcttgcgccgccggcgtcggggaactagggatt

SEQ ID NO: 99936 - DNA, 393 bp, Oryza sativa
  Clone ID: PAT_MRT4530_97700C.1
cgcgtccggaaataaggatcattcagggagaaaccaaggacggtaagctggattttcctcttgcatatagtgcactgcataataaacttcactggagcatctgggaaaatgtcctgtacagcactggggaattaggcatcctgaacagtaattagttcaacaactaaacaaaaagtgctatctcctgactacatcttgcattttatcatagaataagatgattctagaatcctcatgtaaccaagaggaacaaacgatgtcttatgccacctgaactagcttctccatatttaagacctctaattatttcatactgatacgtgtgtcataaacataagttggttgatatgtaatctgaacttggcagagcttaagataaaatgcattaccagc

SEQ ID NO: 99937 - DNA, 1801 bp, Oryza sativa
  Clone ID: PAT_MRT4530_97701C.1
cgccatttgtctcgcgctcgctgtctcgcgtcagcggcggagctctctagaaggagcagaggagtcccccccaagcgatcgattcgatcccctccgccgccgatcgcctcgccgaagtctccgagaaacacttgagggatggctgaagaggatatccagcctattgtctgtgacaatggcactggaatggtcaaggccggttttgctggtgatgatgcacccagggctgtctttcctagcattgtaggcaggccacgccacactggtgtcatggttggtatgggccagaaggatgcctatgtgggtgatgaagctcagtcgaaaagaggtatactgacattgaaatacccaatcgagcatggtattgtcaacaactgggatgacatggagaagatatggcaccacaccttctacaatgagctccgtgtggctcctgaagagcatcctgtattgctgaccgaggctcctatgaaccccaaggcaaacagagagaagatgacccagatcatgttcgagaccttcaactgcccagcgatgtacgttgccatccaggccgttctttcgttgtacgccagtggtcgaacaactggtattgtacttgactctggtgatggtgtaagtcacactgttccaatatacgaaggatttacactcccgcatgctattcttcgactcgatcttgctgggcgtgaccttaccgacaaccttatgaagattctcacagagaggggttactccttcaccacaactgctgagcgggaaattgtcagagacataaaggagaagctcgcctatgttgctcttgattatgaacaggagcttgatactgccaggagtagctcctctattgagaagagctatgagctgcctgacggccaggtcatcaccatcggagcagaaaggttcaggtgcccggaggtgctcttccagccatcttttattggtatggaagctcctggcatccatgaagccacatacaactccatcatgaagtgcgatgttgatattagaaaggatttgtacggtaatgtggtccttagtgggggatctacaatgttccctggtattggtgatcgtatgagcaaggaaataactgcacttgcccctggcagtatgaagatcaaggtagttgcaccgccagagaggaaatacagtgtctggattggtggttccatcctggcttctctcagtacctttcagcagatgtggatctccaaggccgaatacgatgaatctggtccaggcatcgtccacatgaagtgcttctaagtttgtgggcagatttgtaccattatcagctgattgagacgtgatctgcagattgtttgcatgcgtcccatggtttcagtagcacctgagggctgttggccatggggcaatgcggaaggtgaagtcaattggtgtactggaagaaatctgtccaggtagtgtgcagtgtaggtcgtctgagtcggtcagttttttcagacaatggcatcgcatcagggcattcctaatgtatgcaatggattgttgtgttgggtttcaccgggcaacaaggatgtttgcccgtgcagtttgaaagctttttgtttcgaattttctactagccgaattgcgggtcttaatgattgtacctctagttttgttttctctcttgaagataacttatttttgtgtacgtagtaaaggtttatttgtatttgaacgacttgtagtgttttggatgtaatgctttcccccttgggactgagtagcttgtttaagctccatgaaaaaaaacacgtatgcgaggatagcatcacctcgctgtttgggggtg

SEQ ID NO: 99938 - DNA, 569 bp, Oryza sativa
  Clone ID: PAT_MRT4530_97702C.1
atgggtgggagggtatttatgtcctttactgtttcatgagagagaaaaaacgtcgggagagcacagcagcggcgtggcggctggctcgagggggacggcggcgggcgcctggacgcgtgacggcggcggcgggctggacggcggcggtggcggcgggacgcgcgggacgcgcggcggctggagggggctggacgcggcgggctcgagggggacggcggcgggcggacggacgcgcggcggcgggggcggctggatgcacggcgccggcgagcggctggatgcgggacagcggtggctggatgcgcgacgccagcggccggctggatgcacgacggcggcggcagcctcgattggcgacgacgacgacggcgggctggatgggggacgacgacgacggcgacgacgacgacggcgggctggatgggcgacggcggcggcaagtggccggctggatgcacgacggcggcggcggcctcaattggcgacgacgacggcgggctggatgggcaacggcggcgtacacatgtttttttagtccgatcatacccctgctaaatcaacggttagat

SEQ ID NO: 99939 - DNA, 290 bp, Oryza sativa
  unsure (1)..(290): unsure at all n locations
  Clone ID: PAT_MRT4530_97703C.1
caccgtcaccatcaccatacatagagcctcctaagagctcacctccaccggtcaaattcccgctgccaccggtaccagtgagctatcctcctccaccagtgaaatnnccaccaccaccggcaccagtgagctctccaccgccagcaccggtgagctcccctcccccaccgttaaaatccccaccaccgcctgcaccggtgagctctccacccccaccagtcaaatcccctccaccgccagcacccgtgagctctccaccgccaccggtaaaangccctccaacccccgca

SEQ ID NO: 99940 - DNA, 174 bp, Oryza sativa
  Clone ID: PAT_MRT4530_97704C.1
cccaatgatgtccccaggttgctatcagggtgtgcattcgttacactaatgaaaatggctaaagaaaaaaacggggacaaacacctacactttgtggataggacatgggggattgggtacccgcgtccaaggaaaacacccatgttccaaacaaacactgggggcgtgggcaaa

SEQ ID NO: 99941 - DNA, 393 bp, Oryza sativa
  Clone ID: PAT_MRT4530_97705C.1
atgggagagcaaggaggcagggcaagcagcaacaagatcagggacattgtgaggctgcaccagcttctcaagaggtggaagagggctgcacttgcaccaaaggccggcaagaacaacaatggcggcggtgcatcggtcccgaaagggttcttcgcggtgtgcgtcggggaggagatgaggaggtttgtcatccccacagagtatcttggccactgggcatttgagcagctactcaggaaggcagaggaggagtttgggttccagcatgagggagctctgaggattccatgtgatgttgaggtgtttgagggtatcttgaggctggttggcaggaaggatgagaaggcagcaatgtgctactcttcttcagagcatgagatcttgtgcagatga

SEQ ID NO: 99942 - DNA, 796 bp, Oryza sativa
  Clone ID: PAT_MRT4530_97706C.1
aagctcaaacaaccgatctgcaactttgcagatttgaagattcatctcaccaaacaagaacatgatggagtattttacatctgaaaccaaaagcacaagcaaaagagagtccaatagtaacacaacaccctatctaaagcaaagaacattactacagctggaaaaattactacttcctcccttctataatactatgaaagatttttgagggatggcgaatctggacgaaagatttttgagggatggcgaatctggacacacagaatattattacagctgcaagtggcaacaaaaacaccctgctaggctgcttcgtcgtcgtcccggggacacacagctagctacatgacggagcaggcgttggggttctcgtcgctgaaggcagcggtgtagcggacctcggtggaggaggcgcgggcgagcggtgcggcggaggggtcggacaccacgttgcgcacgtaccccgcgggggccttcttgtcgtaggcgcccggtgcgtaggggtgcgccaccgtgtcgtacggcacgtatggccatggctccacccgcttcccggtcttgtacgccacgcgccgcatcaccttcccggcgtccacgtaccccgtcaccgtcaccttgttctgcttcgccgtcacctccgccgagctcacccctttcatgtcctcaagggccttcttgatcttcctttcacagccttcgcagtctatccgcaccttcatctccactgtctggaattgtttcctcttcttgaggtgtcggcgagtcctcggcacggagcagactcggagacaacgtc

SEQ ID NO: 99943 - DNA, 332 bp, Oryza sativa
  Clone ID: PAT_MRT4530_97707C.1
gctggggtcatggcagtgaactcatgacctatttacagaagaaggatcagagtggtcttttacaaagacgagctattttatcatatatatatggtaacaacaaagtataatggtctaatctatcttacaggcttgcagagcacactgctgatatgtactaatgttttttttttcttttcgttggtggtcacaaagtctccatagcagcatagtttcagggtcccttcagttatgaacaagaacatgctcatctaagttgtttgatttagcttttctttgtatgacttgatttcttttatctagcatgatatattcatcccaacattcttttc

SEQ ID NO: 99944 - DNA, 1189 bp, Oryza sativa
  Clone ID: PAT_MRT4530_97708C.1
aagctcaaacaaccgatctgcaactttgcagatttgaagattcatctcaccaaacaagaacatgatggagtattttacatcagaaaccaaaagcacaagcaaaagagagtccaatagtaacacaacaccctatctaaagcaaagaacattactacagctggaaaaattactacttcctcccttctataatactatgaaagatttttgagggatggcgaatctggacacacagaatattattacagctgcaaggggcaacaaaaacaccctgctaggctgcttcgtcgtcgtcccggggacacacagctagctacatgacggagcaggcgttggggttctcgtcgctgaaggcagcggtgtagcggacctcggtggaggaggcgcgggcgagcggtgcggcggaggggtcggacaccacgttgcgcacgtaccccgcgggggccttcttgtcgtaggcgcccggtgcgtaggggtgcgccaccgtgtcgtacggcacgtatggccatggctccacccgcttcccggtcttgtacgccacgcgccgcatcaccttcccggcgtccacgtaccccgtcaccgtcaccttgttctgcttcgccgtcacctccaccgagctcacccctgcgcacatgcacagattcgtcaatcatttccacaacaaagaacaaaagctaaaggagcccttgttttgcttttcagagcgtgtgaaagaagaagcagcagcaaaaatatgattaagcacctttcatgtcctcaagggccttcttgatcttcctttcacagccttcgcagtctatccgcaccttcatctccactgtctgaaacaagaagaggatataggcataagttttttccactccaacaacacaactgtcaactagtactatcatggtacaaattcgactggaagacagatatacagagatcgacagaagagggagatgcgattaatggattaacatgttcagtattacctggaattgtttcctcttcttgaggtgtcggcgagtcctcggcacggagcagaactcggagacaacgtcgacgatgcccatctcctcaacaatctccaaccaaactcctcagtcctcactaaagagaccaaagaactgcaggtctttatctgtattactgtacaggccaagcaaagtagcagaggcttcctgagctgaaatgccggacgcgtggg

SEQ ID NO: 99945 - DNA, 360 bp, Oryza sativa
  Clone ID: PAT_MRT4530_97709C.1
ttttttttttttttctcaaacatactattaaatcgatggctgtcaacattgcatctgaaacatacgcaaacacaatgcatatcatgaaaacattttaggcatgtgcatctccagaataaacattacaggcaataaacatagtagcttgtcaatgaatccgctcgagaagaccactttccaacttcccaatgtttactagaggcacaaaatcatatagttttagccttttgagcagcagagacgagagatgcgatggatgcctttcctctgccagtacctagggctcttctgcatgtaccacctaaagggcaacaaaacaactccacacaaatattagcatggggtttgcactagtacagg

SEQ ID NO: 99946 - DNA, 372 bp, Oryza sativa
  Clone ID: PAT_MRT4530_9770C.1
ttcgcctcggtcgcgcacccacagtcgaatggggcggccgagcgagcaaatggaaaaatcctcgaggcactaaagaagagacttgagggggcggcaaagggtaaatggccagacgagatgttatccattctttgggcccttcaaatgacccccacaaggccaactaagttccgccctttcatgctcctttacggagatgaggcgatgacgccggcagaactaggggctaactcaccaagggtgatgttttccggcggcgaaaatggacgtgaagtgtcactcgaactcttggaagaggtgagggtcgaagcactagaacacatgcgcaagtacgcggaaggcacttcggcaacttataacaggaaggtttga

SEQ ID NO: 99947 - DNA, 979 bp, Oryza sativa
  Clone ID: PAT_MRT4530_97710C.1
aattcggcccacaatccagccgcctccctcctcccagtgcgcgtgttccacacgcgcacgccgccgcaaacctcgccgctaaggaagcagaccggcgccgtcttctcctcctccaagttaccgtcgccgtgaccaaatcgacgaccgcctctacaaacgcctctccgcgacctataaatagtcggcaaggtcgctctatgttctcccacatccgaacttgaagctctcctctctctctcctgccatggctggccatcacccaccaccggccgatctcctcctccgttgatcctctttctatttccttgcgccatagcgtttgcctcgacgaggagaatccatttttcccctttcccctctccctccaccttgagataaaccgccaccaccaccttctcttatcgccggagttgagctcctgccgtcgccgttccggcctcctcccctaactccttcgctgggcgaccacttccccgggtgcgtgtcgctcgggaacacacttggccgccgctgttgaggccgttccaccatcggagcaccggcgtcccttctgctgccgcctcccggacggccggccggccggctgccgccactcccgttcacctgtggccgcctgatccccgtcggggcgatctgggtcgtccacgtggccctccccgtgcagcccgacatcggtgcccccgtggcgccacgttggcgccacctcatcctccccgtccgccgtggccaccacgtggctgccacgtggtgcgcccgcggggcagtgcacgcgtggaccggtccaccgtgcacccgtctcccttgaggcaccgacaggtggggcccacttgacggtgccacctatccctcgtatgatgtcataaatcattattaattgcgcaataaatcaatggtaattcactagctcaattgatgggataattacagtattagacctcttagtatccagacgagctgcgtgatcggaacatccggccat

SEQ ID NO: 99948 - DNA, 936 bp, Oryza sativa
  Clone ID: PAT_MRT4530_97711C.1
gaaaagcaatccgtgcaggttgaacttggaagatccagattaacacataaagaagatctgcttgatgataagcctgtagaggaggttacgctttttgatgtgcaaaaggtgaagtttgtccggcgctctggtgggtcaaatgacagtgcagtctgcgccctcataaatgtaacagaagtagcagtttggtgggaacctgatccctatctggagttacttgaagtagccactcgacttaaatccattatgcacaggatcaagcaccagaattctgctaatgagataaaagatgatacagtgtacacggatactttggcaaaaaaggattcactcacagaacatggccaacaagaaaaaccacagaagaaacaagaattggttattgccgttgatgtggaatctttgaaaatttcaggtgaacttgctgatggagttgaagcaatgattcatgttggatccattttttctgagaatgcaaagatcggtgttttaattgaaggactagtagttagtttttgcggtgcacggattttcaaatgcagtcgcacgcagctatcacgcatcccagtttccatttcagacagccttcccgataagaagttgcagtctgcagctacatgtgattgggttattcaatgccgaaatgcttatgtctgcctgccttttaggttgcaactacgagctatagatgatgcagttgaagacacattgcgggccattaaacttatttctgcagcaaaaatgtctgtattatttcctgagaagaaatctagcggtagcagtagcagcagcaaaaagagcaaatcaaaatcaacagaatttcggtatgtgagggtcattgtacgtgacctcgtagcagaaattgaagaagagcctatccaaggctggcttgatgagcatatcgatttaatgaagagtgtatttaatgagtcgaca

SEQ ID NO: 99949 - DNA, 1515 bp, Oryza sativa
  Clone ID: PAT_MRT4530_97712C.1
atggatcacttgccactggccgccgcggcggcggcggcgtcggcgccgtcgccggctgcaggggcgcagcacgggagggtgcttgacgcatacaagaaggcgctggcgacggcggcgtcggtggcggcgtacgccgtgctggcgcggtctatggcgcgggagctgctccccgacgagctccgcgccgcggcgcggtggggcgcggcgttcgttcgtgcgcggctcggcgcgtcggagaaggagcggcacacggtggtgatccggcggcagctcgacggcgggtacagcgagaaccagctgttcgaggcggcgcgcgcgtacctcgccaccaagatcgacccgcgcgccctgcggcggctcagcctcgcgcgctcacgctgcaaggaggccgacgggagcagcagctggaccacactgctgtgcttggagcccggggactccaccaccgatgtgttcgacggcgtcgagttcaggtggacgtccatggagaccggaggcggcgactactgcaagaggggcggcaagggtggtggtgaccgcggtcaccgggccccgcgcgagtgcctcgagctcagcttcgacgccgagcacaccgacacggcgctcgagcgctacagtcccttcgtcatggccacggcggagcagctccagcggcgggagcgcgtgctcaggatcttcatgaacaagaagtccatcgtcgacgacctcgaccgcttcctgaagcggaaggagtactaccgccgcatcggcaaggcgtggaaacgcgggtacctcctccacggcccgcccggcaccggcaagtccagcctcgtcgccgccatggccaactacctccgcttcaacctctacgacctcgacctctccgaggtgcgcgtcaacgccgcgctgcagcgcctgctcatcagcatgcccaacaaatccatcctcgtcatcgaggacatcgactgctgcttcgacgccaacccaagagaagcccacaagatcaccacggcggcgctcgaccaggccgaggacttcgacttctcctcgtcggactccgacgacgccgtcggcgcgccgcccagagcgcgccgcgcgggagatctccagcagcagaagctgacgctgtccgggctgctcaacttcatcgacgggctgtggtccacgagcggcgaggagcgcgtcatcgtcttcaccacaaactacaaggagcgcctcgatccggcgctgctccggccggggcggatggacatgcacgtctacatgggctactgcggctgggaggcgttcaagacgctcgcgcacaactacttcctcgtcggcgaccacccgctgttcccggagatacggcagctgctcgccggcgtggaggtgacgccggccgaggtgtcggagatgctgctgcgcagcgaggacgccgacgccgcgctccggggcctcgtggagttcctccgtgagaggacgcggcggagggcaagacaagaggcagcgatcgacgacaaccaagtggtagcagaaaaaggcaatgcagcttaa

SEQ ID NO: 99950 - DNA, 1561 bp, Oryza sativa
  Clone ID: PAT_MRT4530_97713C.1
tcgtcccccaccgcgcccccctccgccctccccccccggcgcctccccgggcctccggtggctccggtcctcctcttttccgccctccccccccccccccccttaccccccccgcccgcctcctcgtccccccgccctccgcccctcgccgcaacggcggcggaccgccgggcaccgggagtggcgcctccccatccctcctcgcagccgacccgggccaccgcgacgccgtcctcctcgccgctcgcggcgccatggcgaactgcctcggcgagaccagcctccacctcgccgtccccgggctccggctcgcggccaagggcaaggtgagggacgtgtacgagagcggggagcatctggtgctggtcaccaccgaccggcagagcgcgttcgatcgcgtcctggcttccatccctttcaaggggcaggtgctcaacgaaacaagcctttggtggttcgataggacccgtcatatcactccaaatgcagtagtttcttctcctgataagaatgtgacaattgcaaaaaggtgctcagtttttccagttgaatttgttgtgaggggatatgttactggaagcactgatacatctttgtggactgtttataacaaaggtgcgaggaactattgtggaaatgttctacgtgatggaatggtaaagaatcagaagctatctgcaaatatacttacaccaacaactaaagctgcagatcatgatgttcctgtcactcctgaagagattatcaattcaggactaatgtcaaaggaagattttgatgaagcaagaagcaaagccttaagcttatttgcatatgggcaggaagtggccttagagaatggactgattctagttgacacaaagtatgagtttggaaaaacagctgatgggacaatcatgttgattgatgagaattccaaatttcctctttttgacaagcaggtacacactcctgactccagcagatattggattgctgattcttacgaagagagattcagttctggtcttgagcctgaaaatgttgacaaggagttcttaagactctggttcaagaacaattgcaatccatacgaagatgcggttctgcctgaagctccagaagaactagtttgtgaactagcttggcggtacattttcctgtttgagacaattacaaacacaaagttcgagatccccaaaactcaggagccgattcacgaaagaatatcaaggaatgttgcacaagccttgcagaacctttgattgtggataaggaagaggatttccagaacaaaaacttgcttgctgatgagaataagaggtgcacttctggacttctggtaccggcattactaataataatatcagcgtacgttcatgccgtctatcattcaaagtatacgtgtgctccgagatgtaatatggttggaaacaactatagccagaatcgcctggcaatactctctgcccttaatagtttccctgttgtgagggtcagtgagtgatagagcgccatacacggtatgcatgattgcgtgctaatatttttttcaccctgtgatgtaacattttctggggtt

SEQ ID NO: 99951 - DNA, 1590 bp, Oryza sativa
  Clone ID: PAT_MRT4530_97714C.1
atggatcacttgccactggccgccgcggcggcggcggcgtcggcgccgtcgccggctgcaggggcgcagcacgggagggtgcttgacgcatacaagaaggcgctggcgacggcggcgtcggtggcggcgtacgccgtgctggcgcggtctatggcgcgggagctgctccccgacgagctccgcgccgcggcgcggtggggcgcggcgttcgttcgtgcgcggctcggcgcgtcggagaaggagcggcacacggtggtgatccggcggcagctcgacggcgggtacagcgagaaccagctgttcgaggcggcgcgcgcgtacctcgccaccaagatcgacccgcgcgccctgcggcggctcagcctcgcgcgctcacgctgcaaggaggccgacgggagcagcagctggaccacactgctgtgcttggagcccggggactccaccaccgatgtgttcgacggcgtcgagttcaggtggacgtccatggagaccggaggcggcgacgacggcaagaggggcggcaagggtggtggtgaccgcggtcaccgcgccccgcgcgagtccctcgagctcagcttcgacgccgagcacaccgacacggcgctcgagcgctacgtccccttcgtcatggccacggcggagcagctccagcggcgggagcgcgtgctcaggatcttcatgaacgaggtgcgctcgtggcacggcttcaaccaccaccacccggcgacgttcgacacgatcgccatggaacccgacctcaagaagtccatcgtcgacgacctcgaccgcttcctgaagcggaaggagtactaccgccgcatcggcaaggcgtggaaacgcgggtacctcctccacggcccgcccggcaccggcaagtccagcctcgtcgccgccatggccaactacctccgcttcaacctctacgacctcgacctctccgaggtgcgcgtcaacgccgcgctgcagcgcctgctcatcagcatgcccaacaaatccatcctcgtcatcgaggacatcgactgctgcttcgacgccaacccaagagaagcccacaagatcaccacggcggcgctcgaccaggccgaggacttcgacttctcctcgtcggactccgacgacgccgtcggcgcgccgcccagagcgcgccgcgcgggagatctccagcagcagaagctgacgctgtccgggctgctcaacttcatcgacgggctgtggtccacgagcggcgaggagcgcgtcatcgtcttcaccacaaactacaaggagcgcctcgatccggcgctgctccggccggggcggatggacatgcacgtctacatgggctactgcggctgggaggcgttcaagacgctcgcgcacaactacttcctcgtcggcgaccacccgctgttcccggagatacggcagctgctcgccggcgtggaggtgacgccggccgaggtgtcggagatgctgctgcgcagcgaggacgccgacgccgcgctccggggcctcgtggagttcctccgtgagaggacgcggcggagggcaagacaagaggcagcgatcgacgacaaccaagtggtagcagaaaaaggcaatgcagcttaa

SEQ ID NO: 99952 - DNA, 414 bp, Oryza sativa
  Clone ID: PAT_MRT4530_97715C.1
atggacgacgacgaccggcgcggctggagaccaaaacccagtggcaacccactggttcacggcggcgggcaacctccggtggaactcggcacaaaagaaccgtcggccggggtggagcttgaccttgcggagccgagagaggtggcggcgcaggagggcgacggtcgaggcgacgacaaacggcggctggagcggttgccggcggcggagagagaagacgagcgcggggaggtggctagggttaggaaaaacttggggaaaaaaggaggaaacgaaagaggaggccgagggtctgctatttatagccggaagagggagagatcagctcgggaacggatgaattcggtgaaggaagattcgggcttatcccgagttcacccggataaaaacggccaaaattcgtgggatagataa

SEQ ID NO: 99953 - DNA, 109 bp, Oryza sativa
  Clone ID: PAT_MRT4530_97716C.1
gaaatgcctgtgagcccaaacacacccagaactaaatgcctgatgccaaaacctgatgcctaatgctacaccctgaatgcctgatgccaaatgccacacccatgatgcc

SEQ ID NO: 99954 - DNA, 2409 bp, Oryza sativa
  unsure (1)..(2409): unsure at all n locations
  Clone ID: PAT_MRT4530_97717C.1
gtggatccccgggctgcaggaatcggcacgggggagctctactactgcactacactaccactctcttcgcgttctctctcgctgcaatggaggcgtagtgttgggaggagggagggagagagagagggagagagggagctagggtttttgggccgccgctgcctccttgagttcgtcgtccctccggctccgaacccttgggcgtgcggcagtgtaggctccaatggggaagtctccggcgaagtggatcaaatccgtgctcttcgggaagaagtcatcgaggtccggctctaccaaggcgaaagatttatcgaagggctcgaacaacaaagggtatgctgctgctgggaaggatgctgggtttgagagctccccggtgatatcggagccggtgctcgttacacctcataacaatgaggctgtccaggaggttgggaggggtgagaattccagcttacaaggtgaagtggtggtgcgcgatgtcagtcaagacctggagaagcagaatactgtcgtttccgatgcgtccaacgaccccgagaggttgagagaggaacaagcggccgtcaaggcacaagctgccttccgaggctatctggcacgtcgggcattccgtgcgttgaaaggaatcataagactccaagccctgattcgtgggcatctcgtaaggaggcaagccgttgcaactcttcgtgcaacatggttgattgtgaagtttcaagctctagtccgtggtaggaatgtcagactttctactaataccattcaagtcaactggaagcttgttcaacaacagtcggggagtggtaagcgggatgcatggaaggagaaattgtcttcaaatgcatttgctcgtaagcttttagcttcaccaattctggtagaggctctccattttcaatatgatgagagggatccaaattcagccttcaactggttggagagatggaccataggtcgtgtctggaggcccatttcacatccaaagagagctgctgttactgatgccaagccacacacaaggaaggccagttatgcaatggaaacagagtcagggaagttgaagcgcaattctcggagaagttctgctgcaccagttgagtcctctcagacgaacatagccatggaaactgaaaaatcaaggcgaaacccaaggaaattcactagctctactgctgattcagtgcccgaaagtcagttaactgaacttgagaaggtcaaacgtaaccttaggaaggtaactaattctatggctgaggcttcaaaggtatctactcctgcaactgagatccctgaacgccaagaggtccaatgtgagaaaccacagcgaactgcagaagaagttccaaattatcctgagatccaagaacctcagaatggtaatctgttggaaaatgctaagacggatatcctggtacctgatcttcaacctgaaccggaggttccttcttatcaagttgaaactgaagaaaaagttgctgaactgactgttgctgaccctacggtagaaactatgccgctgcaagatatccacaatgaagaaaatgctttagtaaatgatatggaacagagatccaaagaagaacctctttctactgagagccttaaaagcagcaagaggaggtcttcattctcaaccaagacagagtatccagaaaatggttcaaagaattcgcctgctgttcccagctacatggctgcaacacaatctgcgaaggcgaaactgcggggacagaattcacccagacttagttctgactctgcggagaaaaatggcttcaccaggcgccattccctcccatcctctaatggtaagttgaactcgcactcgccgcgtacacaaaggccaacccatgctggtggcaaagagggagtgaaggctgacaagtctatgctatcatcaagagacgcaagtgaaagacctgccaaagctgaatggaaacgctgaagagttcatcgatcgagcaccaaatcctcctgttgggttgcgcaacattcgggtggatgacgacgatgatggcgtctgcagtttgatccaattgttttgcttccgatgtaaaaaagatgttctccccatccgtgacagtgaaccagctgctttgttgtggtttgtatctggtgcgatttgacttatttctatagggtttttgcgtcctttcctctgccatgttcatgtatagctgaagcgtttccggtttgcttttgatttccctgcctccccgagacaccctgcttttgttgagcaagagagctgctgatgttagagagaacttgttggattgaacaatcttatcccatttggacatctcttctgcgttttcttcttataactgactagcgagttgtgccattccatgacaacaagtttgtttaaaaaaaaaaaaaaaaaaaaaaaaaaaaaannaaaaa

SEQ ID NO: 99955 - DNA, 145 bp, Oryza sativa
  unsure (1)..(145): unsure at all n locations
  Clone ID: PAT_MRT4530_97718C.1
tcgtgggtagctattgggatgtctctagnttgggntggggtcctcctcttgcgnggaggngtctcttccctnanaattatagaatgcttaanncttgtncgccatataggcnntttatccctagtaacataacatttgtagatnt

SEQ ID NO: 99956 - DNA, 3121 bp, Oryza sativa
  unsure (1)..(3121): unsure at all n locations
  Clone ID: PAT_MRT4530_97719C.1
ccaccggttacgcctccatccgggcgagaccgattttcccctttcccctcttcctccacctctaagtcaggccaccaccgccatcatccatgccggctcgaggtgaacccttgccgccgccgttccggctatatatatctccctgtcggacagccacctacctccccgggtgcgcgacgatcgggaacacgcgtggccaccgccgacaaggtcgatcatccaccgaagcattggcgcccctgctctcccttctctctgtttgctcggctgcaagagaaaaagaagcacaagaaggaaggaaggaggaagatgaaagagaaaagaagaagaaatgacagataactgacaggtcttgaggattcttctgacacactagataatatcagtcaatctcaggacagttactccagctttcggagggctaaagagttggttgttggggtttgtgggctcgagcccatggcaaatcgccggggtcgaggtcgccgaaacgaaactctccctccctaaatcggacgcgcgccggcgtgccctggaaggggggaagtcgccaggccgccgccgtcagatagttgcatgggaagaaaaggcgtgggggcgctcgcgctcttgttggaccgaggtcacctgctgtgttgcaggccggtcgttgaaaaaaaagcccataagagaaaatgggtactcactcactgatggggtcgcgggccaaaagagaaggccccccgcggccgtgggcccggaggcttacggtctcgccaggtgcactttgtcaccacgctgatctacagacaagaccggggtatccacgctgccaccggtctcagcgtgcgactgcaagatgaaggtgccatagccacgtgaagaaggtgcaaccaccccttaaggccttatccgtaaagattgcattggaatataccggttgtagctagaacgatgattttggaaactgcattgaatcagttttattcatggaataggcctgcgaataactgggttaatggtgctcctgggcctgggcgtacgccggccagcgcgccaggggatacgaaggcgcacgagattcgcgccgctccgaaccaaaggagaacgtggctgctccattgaagagcctgagatctacatatggagtgattaattaatatacagagtatatccacagcaacagctagacaaccaccatgtcggctctcaccacgtcccagctcgccacctcggcaactggcttcggcatcgccgacaggtcggtgccgtcgtcgctgctccgccacgggttccagggcctcaagccccgcagcctcgccggcggcgatcgcgacgtcgctcagcgtgacgaccagcgcgcgcgcgatcgcccaagcagcagcggtcggtgcagcgtggcagccggaggttcccctccgtcgtcgtgtacgccaccggcgccggcatgaacgtcgtgttcgtcggcgccgagatggccccctggagcaagaccggcggcctcggtgacgtcctcggtggcctcccccctgccatggctgcgaatggccacagggtcatggtgatctctcctcggtacgaccagtacaaggacgcttgggataccagcgttgtggctgagatcaaggttgcagacaggtacgagagggtgaggtttttccattgctacaagcgtggagtcgaccgtgtgttcatcgaccatccgtcattcctggagaaggtttggggaaagaccggtgagaagatctacggacctgacactggagttgattacaaagacaaccagatgcgtttcagccttctttgccaggcagcactcgaggctcctaggatcctaaacctcaacaacaacccatacttcaaaggaacttatggtgaggatgttgtgttcgtctgcaacgactggcacactggcccactggcgagctacctgaagaacaactaccagcccaatggcatctacaggaatgcaaaggttgctttctgcatccacaacatctcctaccagggccgtttcgctttcgaggattaccctgagctgaacctctccgagaggttcaggtcatccttcgatttcatcgacgggtatgacacgccggtggagggcaggaagatcaactggatgaaggccggaatcctggaagccgacagggtgctcaccgtgagcccgtactacgccgaggagctcatctccggcatcgccaggggatgcgagctcgacaacatcatgcggctcaccggcatcaccggcatcttccgcggcaccctgtgcttgcgcgtccaccggtgggctcgtggacacggtcatcgaaggcaagactggtttccacatgggccgtctcagcgtcgactgcaaggtggtggagccaagcgacgtgaagaaggtggcggccaccctgaagcgcgccatcaaggtcgtcggcacgccggcgtacgaggagatggtcaggaactgcatgaaccaggacctctcctggaaggggcctgcgaagaactgggagaatgtgctcctgggcctgggcgtcgccggcagcgcgccggggatcgaaggcgacgagatcgcgccgctcgccaaggagaacgtggctgctccttgaagagcctgagatctacatatggagtgattaattaatatagcagtatatggatgagagacgaatgaaccagtggtttgtttgttgtagtgaatttgtagctatagccaattatataggctaataagtttgatgttgtactcttctgggtgtgcttaagtatcttatcggaccctgaatttatgtgtgtggcttattgccaataatattaagtaataaagggtttattatattattataaaaaaaaaaaaaaaaaaaaaaaaaaaattaattaatatagcagtatatggatgagagacgaatgaaccagtggtttgtttgttgtagtgaatttgtagctatagccaattatataggctaataagtttgatgttgtactcttctgggtgtgcttaagtatcttatcggaccctgaatttatgtgtgtggcttattgccaataatattaagtaataaagggtttattatattattatatatgttaaaaaaaaaaaaaaaaaaaaaacccggtacccaattcgccctatagtgagtcgtattacaattnc

SEQ ID NO: 99957 - DNA, 894 bp, Oryza sativa
  Clone ID: PAT_MRT4530_9771C.1
atggggaggcgaccggcggcggaaaggatggcggcggccgacacgggaggcgacgggaacggcggtccgacgacgcccgaccatggcggagccgcggccgagggccggcaagacctagggaaattattggagcggttagggagggaaataggcgaccggagcggcgagaataccacgccagagaggagaggaatggtggggctcaccggcgaccgagaggtaccacgttccggtgggtttccggcgatgaacaacggtgaccgaggtgctgcacggcgctgcgaggcgagagccgtcgtcggagaggaggaggaggaggaggaagaggaagaggaagaggaagaggaagaggaggagtgggagatgaagaaggaggcaggggcagggagcaagctggggaggtggctgggggcgccggtgcgggcgctgtcgagggcgtgcgactcgtacgtgcggaagatgtcggcgtgcgcggggcacatgccgacgcacgcggcgggcgccatggggcggggcgggttcgcgccgggggcgatgcaggcggcgacgttcagctcgcggtcgcggcgcggtggcgttgacggcggcggcgacgacgacgacgtcggggcgctcgtccgcgcgctgtcccagcggcaggcggcgtcgtcggcgtcggcggcgacgtccgtgccggtgaggagccgcagcgtggcggtcgggaggatcgacgaggacgcgccgtgcgagttcggcgccgaagacgcgcgcctcggccccgtggcggcgccgccgcacgtgcggcggagccgcagcgtcgcggtcggcgccgggcgcgccggcgtcgggttcggcgccggcgccggcgccatgaggatgggaccgggcgtcggcgtcggcgtggtgcgcggctga

SEQ ID NO: 99958 - DNA, 107 bp, Oryza sativa
  Clone ID: PAT_MRT4530_97720C.1
atgagtatacccacgggcacaaataatctcatgggcatgggtatgggtagacactacccgtgcccgtcgcgccctatttccatccctagtcctggggccgactacga

SEQ ID NO: 99959 - DNA, 1308 bp, Oryza sativa
  Clone ID: PAT_MRT4530_97721C.1
agtccaagacgtctcacaagcagccataccaactccacatccgcacatcgccgcacatgagcacgagactcgccaccggcagaagaaaccccctaccgagcaggaggctcaccgccagcaagcaaccccgccggagctcacgtaggcgacgtcgcgcagccgccgagctcaccggagcccacccgagccgtgcaacgccaccacacgcagccaccccgcgcaaccggctgccctggctccatcacccgcaccgcgacactgcccctcgcaagccggtgacgtccgcgccgccgcaacatccgtcgtcacgcgccgccgcggacggacgccgacgccgacaacgcgagctcggcgcgagcgagccgccgttgccagccgcgaaaccgacgcccgcccaccgcgacgccgcccctgcctgtcgccggtctccgggcgccccgccagatccggccggagccagcccggatctggtcggggaagttgccgccaccgccggctccccggcattcgcaagcgcgtgcccgcgccgaccagccgccgacattccgcgtcgccctgcacgccgtgccgcctcctcacgtctcccgacggccggccactgccaacgcccgcgccgccatcctcgtcggccgccagatccagcggcggtgggccggatccagccgcgtggagtcgggaccggcggcggcggcaccggctcccagccacgcgcggcgccaccgcgcggtttcccggcacgccgcgccatctcctcgcgttggagacgggccaccgccgggttttagccccgccgccgccatcccggcgagccgcgcagtttccagcggcgcgctccggcggcggtgaggtgggggagaggaggggagggtggcggcggccgaggagtagggttcgcccctggtcgcccgcgcgtggacgaccgtgggcgtcggttcacggtatcacctttacccttaatatgaacaagttaaaatgattcacacttggcctaaacatgaaaaatgttgaaacagtactactaattgataagttgagtgcgtgcagtgtgctacagtgtctctacttgcattcatgggcacttgtcctccaataattcttgcattttttttcatggattattgaccatgatgggctcagatgctgacaccaagtcttcaaaacaagatgctgactctacttcctccgtcaaaataagatttaattttagacatgaatctgaacacataattgaactttttttttttaacgaatggagtaagagtatagcttgtatgcagcaaattacaaaatgtcgatttcattgtttag

SEQ ID NO: 99960 - DNA, 2256 bp, Oryza sativa
  Clone ID: PAT_MRT4530_97722C.1
cacgcgtccggttctttgtctatctcaagacacaaataactgcagtctctctctctctctctctctctctctctctctctctgcttcacttctctgcttgtgttgttctgttgttcatcaggaagaacatctgcagagatcttccacagcaacagctagacaaccaccatgtcggctctcaccacgtcccagctcgccacctcggccaccggcttcggcatcgccgacaggtcggcgccgtcgtcgctgctccgccacgggttccagggcctcaagccccgcagccccgccggcggcgacgcgacgtcgctcagcgtgacgaccagcgcgcgcgcgacgcccaagcagcagcggtcggtgcagcgtggcagccggaggttcccctccgtcgtcgtgtacgccaccggcgccggcatgaacgtcgtgttcgtcggcgccgagatggccccctggagcaagaccggcggcctcggtgacgtcctcggtggcctcccccctgccatggctgcgaatggccacagggtcatggtgatctctcctcggtacgaccagtacaaggacgcttgggataccagcgttgtggctgagatcaaggttgcagacaggtacgagagggtgaggtttttccattgctacaagcgtggagtcgaccgtgtgttcatcgaccatccgtcattcctggagaaggtttggggaaagaccggtgagaagatctacggacctgacactggagttgattacaaagacaaccagatgcgtttcagccttctttgccaggcagcactcgaggctcctaggatcctaaacctcaacaacaacccatacttcaaaggaacttatggtgaggatgttgtgttcgtctgcaacgactggcacactggcccactggcgagctacctgaagaacaactaccagcccaatggcatctacaggaatgcaaaggttgctttctgcatccacaacatctcctaccagggccgtttcgctttcgaggattaccctgagctgaacctctccgagaggttcaggtcatccttcgatttcatcgacgggtatgacacgccggtggagggcaggaagatcaactggatgaaggccggaatcctggaagccgacagggtgctcaccgtgagcccgtactacgccgaggagctcatctccggcatcgccaggggatgcgagctcgacaacatcatgcggctcaccggcatcaccggcatcgtcaacggcatggacgtcagcgagtgggatcctagcaaggacaagtacatcaccgccaagtacgacgcaaccacggcaagaatgagtgacaaatttcaggcaatcgaggcgaaggcgctgaacaaggaggcgttgcaggcggaggcgggtcttccggtcgacaggaaaatcccactgatcgcgttcatcggcaggctggaggaacagaagggccctgacgtcatggccgccgccatcccggagctcatgcaggaggacgtccagatcgttcttctgggtactggaaagaagaagttcgagaagctgctcaagagcatggaggagaagtatccgggcaaggtgagggccgtggtgaagttcaacgcgccgcttgctcatctcatcatggccggagccgacgtgctcgccgtccccagccgcttcgagccctgtggactcatccagctgcaggggatgagatacggaacgccctgtgcttgcgcgtccaccggtgggctcgtggacacggtcatcgaaggcaagactggtttccacatgggccgtctcagcgtcgactgcaaggtggtggagccaagcgacgtgaagaaggtggcggccaccctgaagcgcgccatcaaggtcgtcggcacgccggcgtacgaggagatggtcaggaactgcatgaaccaggacctctcctggaaggggcctgcgaagaactgggagaatgtgctcctgggcctgggcgtcgccggcagcgcgccggggatcgaaggcgacgagatcgcgccgctcgccaaggagaacgtggctgctccttgaagagcctgagatctacatatggagtgattaattaatatagcagtatatggatgagagacgaatgaaccagtggtttgtttgttgtagtgaatttgtagctatagccaattatataggctaataagtttgatgttgtactcttctgggtgtgcttaagtatcttatcggaccctgaatttatgtggggggcttattgccaataatattaagtataaaagggtttattatattatt

SEQ ID NO: 99961 - DNA, 402 bp, Oryza sativa
  Clone ID: PAT_MRT4530_97723C.1
atggcatcgaagccaccggggtgtggcacggggcagaacacctgcccgccgcttccgcagccgccgtggctgagctcgctgtggtccgatcccatcgggctcccaggcccagggctcacgcgcttgcacggccggtcgatctcgcctccagcggcgccggcgccgacctacgtggcggtggcggtggtgagctcagctcccgccgccgctccagcccgtgctccccgcggccggagagtgggctgcccaaggagggaggcaaaaatggcgcacgtcttgcatcccaggaagtgtaatgatctctccaatttcaagcccacatcagaaaacacccaccagacactgctgccactgctggagatggagcaccccgaccgtcctatccacgtctacaccgactga

SEQ ID NO: 99962 - DNA, 2129 bp, Oryza sativa
  Clone ID: PAT_MRT4530_97724C.1
tggctcttgcgaattactgcagatacagcaggcgttgacagcagaccgttcctgccaactaggatcttcccaacaccattcccagctgcaattttagtgataatcttaacatcctcaagatgaattcgataaattcgacaacatcaaaatacagttcgttctgaaatatgtaccattgctctaaaagcttattcattcctgcatactatgttcaatgaaaggtacctccaagatacagtttgccatcaactcagtacaaaacttggcctaagattacattattggttcatcggttggaaggggctataaaaacaaagaaataaaagaatacacaggtggtaacattgctaatgtcaccggtatgtttatgttatgacagtaggcttatctcttccagtgaagtccttcaactttgaaacagatagagctaggtctattaaaggcttcaaagctatttgtgcatccagatcatgctttgaggcatcagactcgaattgctcaatgtatatacggattgttgctccagcagatccggttcccgaaaggcggaagataatcctagatccatcggtgaatacaaatcgaagcccttgtttagatacagtgctaccatccaccggatcagtgtaactgaaatcatcggcaaactgaagggtatagtttccatatttctctccaggcttgctttttgcgatcacatctctaagatgctccatcatcttatttgcactctcagattcacactcctcataatcatatctggagaagaaattccttccataggttgcccagtgttccctagctacatcttccactgacactaatctctccccggccttcttatccttgttccggtgtgcaagtatggacagccaagctagaacagcccatatgccatccttctccctgatgtgatcagatcctgtcccaaaactttcctctccacatatagacaatttacctgcatccattaggtttccaaaaaatttccatcctgttggtacctcaaagaacggaacattcaatttatcagctacacgatcaagagcaccactcgttggcattgatctagcaagaccttttggaccagattggaaataaggaattgctgcctgtgcattcgctgcaattattgcaacagagtctgatggtgtaacaaagaaccttcttccaagaatcatgtttcgatcaccatcaccatcacttgctgcaccaaagtcaggtgctccgcttccaaacatggtaaacacaagctctttggcataagttaaattaggatcagggtgaccattgccaaaatcttcaagtggaacaccatttaatatatagtccggatcagctccaagtttctcaacaaaaataggatccgcatatgcaccagtcacagcatgcatggcatcaaatacaaacctgaaatctggccgagacaacaagcccttgataagttggaagtcaaacacattctccattagctcaaggtagtccaagacagggtctatcacttcaacggtgaaatcaccatagcttacaactcctagagaggacaaatcaacatcaggaatatctgccgtttttatttcagaaatcgaaagtgtgtttccatatatttggtcggtaattgtctctggtgctggctgcccactgctatagttgaacttgataccccaatcattatctggcccacctggattatggcttgcactcatgatgaagccaccattggcttgtcttttacgaattactgcagatacagcaggcgttgacagcagaccgttcctgccaactaggatcttcccaacaccattcccagctgcaattttagtgataatctgagcagcatccttgttaaagtatcggccatcaccaccaagcacaagggttccaccaacataatcctccgggggcaatgaattgaacagagcctgaatccaattagcgaggtaattctcctgctggaacactttcaccttgagcgcctgggcggcggaggaggagcaccggacgacggcgagagagtggcggcggtggacccggcgggcaccaccaccgggccgcgccgcgagcggagccgggcgcgcggcggcggcggagaagagcagcgggtggaggcggagcgcgtgcgaggccat

SEQ ID NO: 99963 - DNA, 429 bp, Oryza sativa
  Clone ID: PAT_MRT4530_97725C.1
atggaaagatacaaattttccactgatgctttggccggaaacttgcgcgactacatccagcattggctggttgacataatggatacaaacaactacactttgctcggaacactggtaagcgaccaccatggtgcgttggccaaacgcatcgtcaagcgtctgagcgatgcgctgcatgcggtagtgccgaagagcttctgcaggttcggcggctttaggaagaacatgatggagtgcccaaaaatacaaatttgctccatcgactgcgccttctatatcatgcggttcatggaggcttacgacggcaacatggaatccatcgagaatctttccatcccgactgactcggtgattgtccggtcaagcaccctgcaccagctgatgttcagcgagtacaaccaagccgcgcctctccattccgatatctag

SEQ ID NO: 99964 - DNA, 437 bp, Oryza sativa
  Clone ID: PAT_MRT4530_97726C.1
cccacgcgtccgcccacgcgtccgcccacgcgtccgtccacgcgtccgcccacgcgtccgcccacgcgtccgcccacgcgtccgtaccatgtttggaagcggagcacctgactttggtgcagcaagtgatggtgatggtgatcgaaacatgattcttggaagaaggttctttgttacaccatcagactctgttgcaataattgcagcgaatgcacaggcagcaattccttatttccaatctggtccaaaaggtcttgctagatcaatgccaacgagtggtgctcttgatcgtgtagctgataaattgaatgttccgttctttgaggtaccaacaggatggaaattttttggaaacctaatggatgcaggtaaattgtctatatgaggagaggaaagttttggtacaggatctgatcacatcatggagaaggatggca

SEQ ID NO: 99965 - DNA, 572 bp, Oryza sativa
  unsure (1)..(572): unsure at all n locations
  Clone ID: PAT_MRT4530_97727C.1
gcgcaactaccacctcacctcactccccttctcgcctcttctccccttctccacctcctcttctctccgcgtggcggtggcattgccggccgccgcatcgtctcgggatggcctcgcacgcgctccgcctccacccgctgctcttctccgccgccgccgcgcgcccggctccgctcgcggcgcggcccggtggtggtgcccgccgggtccaccgccgccactctctcgccgtcgtccggtgctcctcctccgccgcccaggcgctcaagatcaagtcgattccgaccaagcccgttgaggggcagaagaccgggaccagtgggttgaggaagaaggtgaaagtgttccagcaggagaattacctcgctaattggattcaggctctgttcaattcattgcccccggaggattatgttggtggaacccttgtgcttggtggtgatggccgatactttaacaaggatgctgctcagattatcactannattgcagctgggaatggtgttgggaagatcctagttggcaggaacggtctgctgtcaacgcctgctgtatctgcagtaattcgtaaa

SEQ ID NO: 99966 - DNA, 398 bp, Oryza sativa
  Clone ID: PAT_MRT4530_97728C.1
gactgacgagcagaagcgtcttgaggagacgtacctcaagaataataccagggaatatgacgaggcgccagaggtgtagaagcttctcaagggcattcagacacacacgctcatggggcatttaggcggcggcttttgggggatcatatcggataatgtgaacgatgtggactgcgagtacttggcggatgcaaggatgagctacatgcagcctggtcagtggaagaacgcgctcgctacttcatgaattgcctgaaggcgcgaggtctgacctgtagaggtgagctgcacataactggtgggacgatactgacacatagctatctgtgaaatgaagaaagttgaggatgatgctgaagactaaacccattcgggatcaggctgtgtcatgaccaaat

SEQ ID NO: 99967 - DNA, 163 bp, Oryza sativa
  Clone ID: PAT_MRT4530_97729C.1
gccaagaccactacaaccgagaactatccttagctagctagctacctgcagatcaggcacgatctagccagccatgtgaaggagtccccatgctagcttgatcctcctactaactaagatgctgctaaagatgactcttgctatagggtagctaggctgatga

SEQ ID NO: 99968 - DNA, 492 bp, Oryza sativa
  Clone ID: PAT_MRT4530_9772C.1
atggccaaatccgcgtggggcagaggcggtggaggccgcgtaggggcggaggcgaagaaggccgtgttggcgaagaggcgcgcggaggcgcggtggtggagtcgagggagaggcgcgggatgtggccctgacgacgacggcggtagacaacgacagcaacctcgttggggcgacaacgagcgggaggccacgacaacgaggaggcacatggttaaccgtggttttttctattaccgtgccccacgaataagaaaagaagaacagaaagacttgtatggtatagcgccgtgcatttcgttatgctgtacatctcgatcaggtgtttacgtcatctgcatccaaagccgtcgccactctcctcgtcgacgtcatttctcgaagccgccggtcgtcgttgtcgccgtcgccgctgtcctcgtcctcgttgttgccatgggggcgtatgggtggtcggtgttgatggaaaacacgaggcctggaagatctgcttaa

SEQ ID NO: 99969 - DNA, 3099 bp, Oryza sativa
  Clone ID: PAT_MRT4530_97730C.1
atggatccctccggatccggccctcgccacggccgcctcctcatctccccgtcgctctcctccccgaccttctccaccagctccccctcccggtcccccgcaccgcaccacgaccgccgcaactccacctcctcgccgcagccgctcctccccttcccttccgcttcttcctccaggtccggtggcggcggtggagcagccgggggcccgcgcgccgcgggggcgttgtcctccgcgtcgcagccggcgttcgcgcacaacgcgcgggtggcggccgcgctggcccccgccgcggcgttcctgctcgacctcggcgggctcccggtgttcgccgtcctcgccgtcggcctcgccgccgcgtacctcctcgacgcgctccgacagcggcagggggccttcttcaccgtctgggccgcgctcatcgccgccgacgtggcgttcttcttctcggcctcgctctcgtcggccgcgtccgcctcggtgccgctcaccgtgctcgcgctcctcctctgcgccgagacgtccttcctcatcggcgtctgggcgtcgctccagttccgctggatccagctggagaacccgaccatcgtcgccgcgctcgagcggctcctcttcgcgtgcgtgcccatcgcggcgcctgcgatcttcacgtgggctgttgtgtccgcggtcggcatggccaacgcctcctactaccttgccacattctccatggtgttctactggttgttctccataccacggccgtccagcttcaagaaccgaaagcaggatgctccgtggcaggataccgatggcattcttggccccttggagagctgcgtgcatgctttgtacctgttgttcgtgccagtgttgttccatgctgcatcgcaccatgctacgctcttcgcgtcatgggccaatgtgtgtgatctgctgctgctgttctttataccgttcttgttccaactctatgcctctacacgaggtgccttgtggtggattaccagagatgtgcgcacaatggatcagataaggatggcgaatggcttggttgcgctggttgtagtggtgctttgccttgaggttcgagttgtatttcactcgtttggaaggtatattcatgctccaccacctctgaactacctgcttgtaacggtcacgatgcttggcggtgctttgggtatggcagcacatgctgcgggcaaggttggagatgctgttagctcggtagcctttaccgggttggcagtgcttgtcagtggagcaggtgctatagtcatcggattccctgttatgttccttccacttccaatgatttctggctattatgcggcaaggttctttactaagaaaagcttatcatcatacttcacctttgtagcaatagcaagcatgatggtcctttggtttgtagtccataattattgggatctgaatatatggattgctggcatgccattgaagtcattcaccaagtatgttgttgcagccgtaatcatggcaatgactgttcctggtttggcgcttctcccaacgaaactgcggtttcttgtagaacttggtcttactggtcatgcattattgatatgctacatcgagaaccgattgttcaactatgctacgatgtactactttggatttgaagatgatgtcatgtatcctagctatatggttttgtttacaacctttctcggattggctctgcggttttgctactcgctgtcactccccccttgcttctttacaggtcttgcttgcataccaatagtcgctctccacttccctcatgctcagtcagccaagagattcctagtgcttgttgtggctacagggcttctttttgttatcatgcaaccacctattaaactttcatgggtataccggtcagagtttatcaaagctgcacatctatctgatgatgacacttcaatatatggttttatagcatccaagcccacatggccatcatggctgctgattgcaacagtggtactgacattagcagcagttacatccattatccctgtgaagtatgttgttgagttgagggctttgtatgcattgggggttggaattacccttggcatctacatatctgttcagtacttcttccaggcagttgttctgtatcctcttcttgttgcaacaattgtcttggctgctgtctttatagtattcactcatctgccatctgaatccagcacaagggttttgccatgggtgttctctttcttggtagttctatttccaatcacatatcttcttgaagggcatctaagagctaaaaattttgtggatgatgaggaagcagagaacttcaccaacatgttggctatagaaggggccagaatgtcacttttgggtctatatgctgccattttcatgattattgcattagaaattaagtttgaactggctttgctattgcgtgagaaagctgcagacaaaggtgtaacacatggtccacctggtcggagttctgcctttccaccaaaggcaaggctacttcagcagcgaagagctcatgctgcgccaactttcactatcaagagattggcagcagaagcagcttggatgcctgcaattggcaacttttcaactgtgctgtgcttcatcatctgccttattctcaacgttactcttaccggtggctcaaatcgtgctattttcttcctggcacctatccttctgctcttgaaccaggattcagatatcattgcaggatttggtgacaggcaacgttacttccctgtaacaatctccatttctgtttatttagtattgacagcattgtatcgtttatgggaggagacttggcctggcagtggcgggtgggcacttgatattgggggcccaggctggttctttgctgtgaaaaatgttgcccttctcatgatgacattacctaatcacatactcttcaatcgcttcatgtgggattatgtcaggcagacagatgcgaagctacttctgacgctgcccctcaacttgccgtcaattataatgacagacatacttactgtgcgggtactaggactgttaggtgctatttattctctatcacagtatgttatatcaaggcggataagacttgctgggatgaaatacatttaa

SEQ ID NO: 99970 - DNA, 542 bp, Oryza sativa
  Clone ID: PAT_MRT4530_97731C.1
gtttttgtttttttttgtcacaccatgatgttctgttccttcagacaaagggcacacgattacaacttagggactgaaattaccaactgaaactacacgagagactctggccttctctctaaaaaataaaactacacgagagtcatcatgtgtcagggggtgattaagcaacctacaagtctaaccaaggcaattaagtgctatatagccactaagaaaacgtatctgcctttgtggaactaggcaggcatcgcgcttttctgctaggatcagtctaaagccatggcatctgaagcatcgccgctaccttcatctgtgctcatgttctgctgctcttcagcgccagctctcagctcatccgctatgctcctctgctcatcttcgattgagatctgcaattcctcgaccacatgaagaagaagagaaagctgtttttttcttagttccagagtccttatacatgctgtattctcggcctccaaattagtaattttttttctgaagacccggtatgagcttttttgttttctatcgtgggaggc

SEQ ID NO: 99971 - DNA, 1500 bp, Oryza sativa
  Clone ID: PAT_MRT4530_97732C.1
atggaggaggaggcggcggcggccgcctgcgagatcgcgcgcctgccggaggagctcctggtggcggcgctctccctcacctcgccgtgggacgcgtgcagcgccgccccggtctgccgttatttccgggccgccttgcgggggacaaggagagggggggaaaagggctccgacgccgtctggtcccgcttccttccccgcgacctcccgcgcctcgccgacggcgagctctccccgccgccgccgtccacgaaggggctcttcctccgcctctccgccgcgccccttctcctcccacacgaactcacgagcatgtggttggagagggagaagggcggcaagtgctacatgctctcggccagggcgctgcaaattacttggggcgatacaccgcgctactggcgctggatccctctcaccgactcaaggttagaaggtgctgaactcctatctgtttgctggttggaaatccatggcaagatactgagcaagatgctgtcacgaaacacaaattatgctgcataccttgtgtacaggatagctgatagatcctatgggctggatttcccattccaggaggcatcagtcagcatcggaggaagcacaacaacccgccaagttggcagcgttgaacggaggctcaagcgaagatgctcccatgcgcttgttcttgcagaggatatagagcaccctcagaaaaggtctgacggttggatggagttgaagctgggtgagttgtacaacgaggaaggtgacgatggtgaggtgtgcatcagcttcagggagacggaaggccactggaagaggggtcttgttgttcagggcattgagattagacctaagaaaactctaacctcgaactgtcttgcttgctcccatgagaaaccctcttactcactgttgacaacgtcgcggtcgtccaaggaggaaatattccttacagacgggctcacaagtatgtggttagacatggagactgggtttaagtgctacatgctgtcggccagggcgctgcagcttgcaaattcgacggacacctggcgcttgatctctctcactggtgcctccaggttgttcaactatgcccctactttgtttgcggagctcagtttcataaaatttacaaagctattatactctaaatctctaatgcttttgaaaggtattccatggttctcagaagttatcgagctcccagcttgttatgaattggtgatctgtggcaagataccttgcaagatgctgcctggaaacacaaattacgctgcttacatcgtgttcgtggtagttgacgattcattcgggctggctacgatcctggatgcatcagtcagcgttgggggaagcctatgcacaactcgccaagtttgcttcgacagcaccagcagcctgagcgctgatgagcattttgttgaagacaacattgaggtgcctcaggatgggagtgtgattctccctcaggagagggatgacggtttggatggagctggaggtgggtga

SEQ ID NO: 99972 - DNA, 364 bp, Oryza sativa
  Clone ID: PAT_MRT4530_97733C.1
cggacgcgtgggcggacgcgtgggcggacgcgtgggcggacgcgtgggcggacgcgtgggcggacgcgtgggaattgatgtgtggtgtctacttttttggtacttttgttttctttctcatccactgttacgtacggccaacttagtttcacatatatctgcatgtttaggtaaggtaatggagattttattttgatgaacctcataagcttgcaattatctatatcactatgaaagatcatttctaaatttccctgcgcatcagtttaatttcgatttatatctgttaattctatgtttttgttttaaattttttatttattactttatatcttttattctttttttactttttaattatttt

SEQ ID NO: 99973 - DNA, 300 bp, Oryza sativa
  unsure (1)..(300): unsure at all n locations
  Clone ID: PAT_MRT4530_97734C.1
nccgttngtccgcaacaaaccaaaccaacaacaccgaaaacnacctgcnattntcccgccgcacgncccgaggttccgaagcgagagaaagcnatggccccgaccgcntcgntgctgttcctgagctaccaccagctgcacaggcccgcttntncggcggaggcggcgccgtccagccggaggaaggaggcggaggaggaggggagtaatggcggcgcggccggcggtcgtttccggttcagcntnagcagcgcgcttgtccctcctggcacgncggagggaggnggcgccacggctacg

SEQ ID NO: 99974 - DNA, 936 bp, Oryza sativa
  Clone ID: PAT_MRT4530_97735C.1
atgtcatcctccttctccttcccttcttcctccttcatcccctcctctctctctctccttctctctctctcccctggcctttctcttcggtggggagcggccgcggcagtggcagcgggcggcggtgggggtggcggtagggagcggcagcggcggcggcggcggtacatgggtgagctgaagcgtgccctcgacgcgcgctgccacatgttgctcgagatgccgacgggcaccggcaagacggcggcgagctcttccccatataagcgacacgtcgacgacacgctggacgaagaccggtcaacaccaccacgtggtcgccacaagaaactagctacatgcagaacaaaacagataggtgcaatatttatgtatgcaaacagtgaggtgttgaaatgctataccacgggatataccgtcccgagcgcgtgggacggtatcgcctcctcctgcactatctccttgagccatgtcttttccgcgtgcgtcactgctgctgatgatagcttcatggtcgcggtcattgcctgctcgtcgctaccgcctgtgaccgcgccgatgcgaacgcttgatgatgatgtggggatgtggacggtggaggacgcggcctcggcgacgagctccggcatgaggcatggatggtggaggacgcggccgctaacgatgagcccggcgtggggcgtggcggaggaggacgcggccaccggcgacgagctccgacgtggaacgtggatggcggaggatgtggctgcgccggcgacgatctccggcgtggaccgtggaggatgccgctgccggcgacaagctctggcacgagacgtggacggtgggatcaccggcgacgatctccggcgtggatcgtggaggatgccgccgccggcgacaagctccggcacaatacgtggacagtgggatcaccgacgacgacgcttttag

SEQ ID NO: 99975 - DNA, 243 bp, Oryza sativa
  Clone ID: PAT_MRT4530_97736C.1
atcgtgcgtctgtcaaaatcgcgggaatcaatggatctttgatcgcgttgtgccacgagatatcttcccccaagaaacgttggagtgagggatgagagctatggcgatggaatcgcaggacccgaacgcggcgccagccattccagcagggttcaggagggtggaggacttctcgacggagtggtgggagcctgccaagaccactgcgtggttacgtgaccactggatcagggagcaccagat

SEQ ID NO: 99976 - DNA, 1185 bp, Oryza sativa
  Clone ID: PAT_MRT4530_97737C.1
ggctctgagcgagagggccagccacgcacgcacgcacgccaccgcgctccattggccaccccctcgccatcgccacgattaaactactctcttgctactccccctccatccatccacacactccaccatttcctcttcttcttcctccatatcacacggttttcgtccatcgatcatcagagctcgatcgggcgccatggatggggaggaggacagcgagtggatgatgatggacgttggagggaagggcgggaagggcggcggcggcggcggcgcggcggacaggaagaagcggttcagcgaggagcagatcaagtcgctggagtccatgttcgcgacgcagaccaagctggagccgaggcagaagctgcagctcgccagggagctcgggctgcggcctcgccaggtcgccatctgcttccgcagcaagcgagcgcggtggaagtccagggagctcgaacgcgcgtacttccccctccgcgacgcctacgacgccctcctctggacatacgagtcccttaacaaggagaagctcgccctcatcaagcaggtggggaagctggtggagaagctggaggaggcgcggggaaagcacggagatagagccggggacgacgcgcggtcgggaggcctcgccggcattcagaagcaggagctcgtccctccggacggagccgccagcctccactaatcggccgagggtggcgggacgtcgtccacggagcagacctgcagcagcacgccatggtgggaattcgagagcgagtgagcatccacactgttactactaggctactcatggatgatccatcgatcgccacagatcatgcatgccacgatcagaatttcaattcgccgcgaggacggatcaaacctgtactagatcggatcagagcaaacatagcagagaagatgatcaaaccaacagtgatgtgtacatagatttctgtagatcaaaaccccaggcagtctcctctccatccagccatcagcatgcgaaaattctctctcttttttttcccctccaagtcttactcgacttcgatgttgttatcacaacaccacatcatgtaatccagcaacacgccgagatgaaaaaaaggttaaaaagcttatagagttcgttcatttgatggatccaaaaaaaaaaaaaaaaaaaaaaaaaaaaaaaaaaaaaaaaaaaaa

SEQ ID NO: 99977 - DNA, 355 bp, Oryza sativa
  Clone ID: PAT_MRT4530_97738C.1
cttctctcttttttttttcttttgaaaaaaaaaaaatttatttgggggcccgggccggcatgcttggggtgtgggggggcagacaaacccctctccttgggttttttttttccagaaaactaattataggctctgagtcccctggcgaaaaagtggggtccctgcttgctccgctggttgttctttgaggggcacccggccctcgtgtttttttatttatacccgcttttatcctgggtgaagtcctcctcaggcaactggatgggctcgtcgtgggggtgggggccccatacccgcctcctggggggatgtgctgggtgatcgccggactggacccctttaactccgggggccc

SEQ ID NO: 99978 - DNA, 392 bp, Oryza sativa
  Clone ID: PAT_MRT4530_97739C.1
atggatgaacactaagctcaagggtgtgtgagagaggtgcaagggatgtatgcaattgaattaggtgccaagagagcccccttgctgctggagggggagtatttatattcctaccaaccaaaactagccgttgggggcgaaatcccccaactctgtgctctgccggtctgaccggaggtatgtggccggtcagaccgtgctactctacaacggctagaaaactagccgttgtagccctgtcagagggcccatcggcctggccacgggctggtctgaccgcgcatgtgccgccggttagacctccgtagtatggccggtcagatcggccagggcacacctgtcagactggcactgtgtggccggtctgaccgcccctgtcaggccgaacccag

SEQ ID NO: 99979 - DNA, 195 bp, Oryza sativa
  Clone ID: PAT_MRT4530_9773C.1
atggttttgagcagcataggaggtgaggtccacttgtcattgaggataaatggtgggcccacacgacaaacgatgatcaagcaggtcccatctccagtttgggtaaaacccctgttaaacaggttggaggttcacaattccgacgaaaaccggtcgaattctatgaaatttcgacgtttcgacacggctcggaat

SEQ ID NO: 99980 - DNA, 635 bp, Oryza sativa
  Clone ID: PAT_MRT4530_97740C.1
cccgggctgcaggcggaagttaaaaagaaatattgaaagaaaaatacaatttagtaataatagaaattaggaattaaaataaggaaaattgtaagaagagtatagagtccatataggaatttagtattaactaaaaatcagaataaaaataaaaaaaattaaaagagtacatatataaatacaatttacaaataaataaattataattaaaaatgaatattggcacaatagtctagagtccatataagaaacaatttagaaacaacttaaatttgaaattaaaaaataaataatatcgcaaagcatgcagtttagcagtcaatatagcaaataaaattagaaataataaaaatttagcaataaaaaacaatattagcaagaagcagtctagattctatatggaaatataatttataaagcaacggaaattcggaattgaaataagaaatattggaagaggagtttagagttcatataagagtataatttagaaataactgaaattataaatttaaaataagaaatataggaatacaatttataaataatagaaattcataattaaaaaaataaataatgttggaagaagagtatagagttcataaagaaatacaatttggaaataactaaaattc

SEQ ID NO: 99981 - DNA, 416 bp, Oryza sativa
  Clone ID: PAT_MRT4530_97741C.1
atggatgaacactaagctcaaatgtgtgtgagagaggtgcaaggggtgtatgcaattgaattgggtgccaagagagcccccttgctgctggagggggagtatttataatcccaccaaccaaaactagccgttgggggtgaaatcccccaactctgtgtactgccggtctgaccggaggtatgtggccggtcagaccgtgctactctgcaacggctagaaagctagccattgtagccctatcagaggggcccatcggcctggccgggagccggtctgaccgcacaagtgccgtcggtcagaccgaccttgtgcgccggtcagactgcctgcttagggccagtcagaccggccagggaccgccggtcagaccaccacaaggtggccggtctaaccgcccctagtcaggccgaaaacca

SEQ ID NO: 99982 - DNA, 264 bp, Oryza sativa
  Clone ID: PAT_MRT4530_97742C.1
atggagtctcaaggatccagcgtcggcaaacaactaaactggagagccgaagggctagtttactggcaaacccttcaagatggcttggctctcaactactgctatctgaaggtcactgttgccaacatgttgattgctgctttccatgttgtccaccgtcatttatacattcatcacatgcaagaacacgatagcaagtatgagggcaaagccatcagggagctcgacggcaacgtcaccttcagcgtgcgcattctccattga

SEQ ID NO: 99983 - DNA, 504 bp, Oryza sativa
  Clone ID: PAT_MRT4530_97743C.1
atgaagctgacccgcgccggcgcccgctcgtggaggggatccgcgccggcgcccagtcgtgatggcggatccctagtggctttgacagcgcacgatgggggggtgcgtgacgtcgggggcggcggtggccagcgcgcggagggaagaggaggcaccgccgatgcgcggaggaaggaagccggcatgcccggcggtggagctcgagctcctggatccggcaaggggcggcggtggcggccagagcacggagggaagaggaggcaccgccggcgtacagggaggaaggaaggcggcgagcccggcgttggagcagtgacggttggatccgatgaggacgacgacggctccgcggcggcaaggagtggacggctcggtggcgacggtgctccacagctgccggtcggcaccggctcgacgctcgccgccttctccctgagtggagctgtggaggagagagaagagataagagagaagagagaactgacgggtgggtcccacatgtaa

SEQ ID NO: 99984 - DNA, 287 bp, Oryza sativa
  Clone ID: PAT_MRT4530_97744C.1
ttctttagtgcgccggttacacaagcctcccgaaacctcccgtgcgtgcatgctgtccactacagctaggtcggacaatgtatctagagctgacacacgactgaaatgcgctacactgatggcacgtccgggctagggtccatgctcatggcccacaatcccgccaacgtcgtacatcgaccaaagtattccacctcctgttgggcacacaccgcatcagaccggatgcggagagactcacgctgcctaaacacctgctccctctggaacaggatctcctccacctg

SEQ ID NO: 99985 - DNA, 693 bp, Oryza sativa
  Clone ID: PAT_MRT4530_97745C.1
tttaaatgatttttttttcaaaattttcgtaatttttccgagcccctgatgccccaaccactcacaaagagagagaagtgtgaaccctgcttcacatctgtatttcaatgcttctatggtggggcacaaagttgcagcttgataacaacagccacgcgaagggagacctagagttctttttcattggttttatggtgggcatcaccatcaaccgagcataccttaccagtaaaattctcatcttttcgcgaaaccaagctcttagtctcctgaaatttaactatcaagaattctaaacatacaccaactcattaaaatttatcgcatagtgcctaccatttacagactcttggcgtgaattttgtccccaaaatgcatgggtgtggctctactactgttgcattcacaacttcaaactttttattaaaaaaaaagaaaatggagtcttaaaatatagcaacagatgatgacggctcaacgtgttctctatttttcttttgcggagacaatttgaggagtaattgaagtcaaccgagccacacagaacgaacaaatcgaagaacaagcaattgcgcacgattggagatcgagagagacaacccccaatatttttggaagaagcaaatgcaacgccaattgccaaacctaacaaggggaagaagagaaagcgagattggtaatatatgcgtgtgt

SEQ ID NO: 99986 - DNA, 2043 bp, Oryza sativa
  Clone ID: PAT_MRT4530_97746C.1
atgtcgtcggcgaggtctgttgcgtcgccttccgcggcgcaagtaggcggaggctcgtcggcgcgtgatgtcgagcagcagaagtcggtggtggccgtaggcgcgtcgtcgccagtgagtagtagcaagcagcacaatctggcgaaggaagaaaatggcaccattacagctaatggtgacaagcagcagaagcctgccgcagataggggtagctaccagagtccgtgctggacagaaacaatattcacggagataggtatggaggaagaaggctggccggagaaaggtggcgaggatcatagtggacaacccatggacgtagttccgttggaaaggatcgtggttgagggggaggaagatagtgatctgctgcctatttcactctctgacccagccattctgttgccggaaattgggcagaccttcaatgaggactctaatggctatgcgttctacaatctgtacgctaggttcactggttttggtataaggagatccaagaacagatacaaagatgaaggcgtgaagtccatgcaagagttctgctgcattcgtgagggtagagataattctgtcactggtccgccgaccaggataggctgcaaggctatggtcaggttaaatcgttcttctgaaagtcaaaagtggagagtttctgcattcattagtgagcataaccatgaaatgaaacgggacctgcagcatactaagcacttcaggtctcataatttcattgatgaagggacaaagaggaacataaaggaaatggtagataatgggatgacacctacagctatgtatggattactttcaggtatgctcggcgggccgtccttaaccccctttacaaggagggctgtgacaagaatggcgtatgccatcagaagggatgagtgtagcaatcatgtgcagaagacactgaatttttttagggaaatgcaatgccgtaataactgtcatcaaatggaggtggcgatcaaagcggtttggcctgaaactactcatagagtttgcaaatggcatattctgaagagtgctaaggagaacttggggaacatttacagtaaaagaagcagtttcaaacaggagttccaccgggtgttaaatgaaccccaaacagaggcagagtttgagaaggcatggatgtgggacatgaagaaaaaatgggctccagcttacttcagggaattcttttttgctaggatgtcaaccacacaaagaagtgagagcatgaatcatgttctgaagaagtatgaaaaaccatcctcttcgctacatggatttgcaaagaggtatgagaatttctacaatgataggattgaagcggaagacggtgaggagcacgatacatacaatgagaaggtttccacattaactagcttgcccattgagaaacatgcttctcgggtgtacactaggggtgcattttctaggttcaaggaacagttcaagctaagcttttcatttatggtttatcaaacttcggatcagcatgttctgcagctagtccatatagaaacatatgagaagacattggaagtgttgacaaagctgattggagaacttcaggtcatgtgtacttcgcaagttgtaaacaacaaggaaattcattgcggagatagaacaattgggaagaaacctactggtgtgcaattggatgatagtgtagacagttctgactcggagcatggaatgcctgatgacttttgtgtagccgatgaggacggcattggacaggatgtttctgctggtgaggattcagttgatgtggacatgactgatgtcaacgaagaagacatactccctcctgaggttagaagaagtcgtggacgaccgaggagtaccagactgatgtcgaagggagagacatctagcaaagcaaagaagaaggctagtgagagtacctccaaggacgagtcgaagaatcacgccaaaggaaaaaaagagtcaacgaagcagattaggtactgcaagcaatgtggtggtcatggccactataagattacatgtggtcagaaatctagttatgagaggaagaagtga

SEQ ID NO: 99987 - DNA, 1256 bp, Oryza sativa
  Clone ID: PAT_MRT4530_97747C.1
tctgctcgccgccgcccggcgactgccagtcaggctcgcctcgagccctttccgagcccaacccgtagcgataggccctaaagtggagttaggtccaacgccacattgcctcgccgacgcaagtagcccacgcaccccgggctcggcgactccggcactaggcaacgaccactccccgaacccggattgagagcgagcgagagcgcgcgcgcggggagaagccgagggtgaagtcgtcgtcgtcggcggcggcggcggcggcggaggaggaggaggaggagacgacgatgcagtggtacctggtggccgcgctcctcaccgtcctcaccagctcgcagggtatcttgactaccctctcgcagagcaatggcaaatataagtacgactacgcaaccattccatttctcgcagaactcttcaagctgtctttctcaagcttctttctttggaaggaatgccagtcttcatctccaccaaggatgacaaaagagtggaggagtatacgactataccttgttccttcagtcatatatctcatccacaacaatgtgcagtttgccaccttgacctatgttgatccatctacctatcagataatgggaaaccttaaaattgtcacaactggaattctgtttaggcttgtcctaaaaaggaagttgtcaaatctacaatggatggcagtagttttactggctgttggaactactacaagtcaggttaaaggatgtggcgatgctccatgtgattctcttttttcagccccatttcagggttacatgcttgggatactttctgcttgcctttctgcactagctggtgtctacactgaatatttgatgaagaagaataatgatagtctgtactggcaaaatgtacaattatatacgtttggtgttatattcaacatgggatggcttatctatggtgacttcaaagctggatttgagaggggtccatggtggcagcgtctttttaatggctattctatcacaacgtggatggttgtgttcaatttagggtctactggccttctggtctcatggctgatgaagtattctgacaatatagtcaaggtgtactcaacttcaatggccatgcttttaacaatggtattgtctgtatatcttttcaatgtgagagcaacacttcagcttttcctaggcattgtcatctgcataatttccctgcagatgtattttatgcctgtgaacatgcttgttgaattgccacaagcattgccagttacttcaaagtag

SEQ ID NO: 99988 - DNA, 1023 bp, Oryza sativa
  Clone ID: PAT_MRT4530_97748C.1
gcacgagggagagagagagaactagtctcgagttttttttttttttttttttttttttttggtggtttttttttttttttttttttgacctgtatgtaacattctttcgatacggaagagtttttgttgagttcatactacatacaacaaatggctcatttgttcaagacagcatcaagcaatggcaatacatggaaattacaatgtaggttcatgtgctaattacaactgaattcatccttagggtgacatgttaggcagatccatctgaaaaaggatggttcttgagttgtgaatgataaggcctatgtataacagaatgaagccatagatagggtcttgtaacatccagagctggtaccggtcccacctaagacaatcctgagtatttttccttgcacgaaagggaaatcgtgacaaacacccaagaatgccttcatgagttatattatatgatatgccatttgggaacctgcggcggcgccattgatgatgagaacattatgcaggcaatcctctatcatctaagtggcttcagacccttggcagctcgcagttcatttgcagctgctcgaagtgaatcatctgatagaatcaaccttgacacagcaccagtgcttaggcccaaaagttttgctgcttctgacactgagccttcaacagcaaaaagaagatctagtaaagcttgcattcctggggcgaatttcgagttatttggaccaatttgggggccaatatcctttcctcggattgtagacttcaggggtaatatctgaagaagctcaactggaggagtgtagtcctcgaggtttatcggctttctgactttgagagcaatcaaggttcgaagccgagacaaggcagatgctcgattcatatgctgtgatctatcctccacagcctgggcgatgatgccagtggggcggtggcggaggcggacggcggactcgcgcttgttgcggtgctggccgccggggccggacgccttgaacgtgcccatctcgcactgccccatcagctcgt

SEQ ID NO: 99989 - DNA, 1746 bp, Oryza sativa
  Clone ID: PAT_MRT4530_97749C.1
atggacttcttcagtgatccaaataagggcctcagctttcacaggatggatgatagcatccagaggccggtgctcatcatcactcccaactctctgctgatcccactgtttcaagaggacattgctttggtggaattgggcagcccgaaggcgttgtcccctttccccttcccggcttcatcgtcggaatccgagctcagggagtcgtcggaggagacttccagcggctcctcccacggcgccgccctcttcatacctagccgcacccggccaccgccacatctaggggggtttttgatggagcagaaactctccggtggaaagggcagaatgtcgtcggcgaggtctgttgcgtcgccttccgcggcgcgagtaggcggaggctcgtcggcgcctgatgtcgagcagcagaagtcggtggcggccgtaggcgcgtcgtcgccggtgagtagtagcaagcaccatcatatggcgaaggcagaagatggaaccattacagttaatggtgacaagcagcagaatcctgccgcagatagctaccagaatccgtgctggacagaaacaatattcgcgaagatagctatggaggaagaaggctggccggagaaaggtggcgaggatcatagtggacaacccatggacgtagttccgttggaaaggatcgtggttgagggggaggaagagagtgatctgctgcctatttcactctctgacccagccattctgttgccgaaaattgggcagaccttcaatgaggactctgatggctatgcgttctacaatctgtactctaggttcactggttttggtataaggagatccaagaacagatacaaagatggaggcgtgaagtccatgcaagagttctgctgcattcgcgagggtagagataattccgtcactggtccgccgaccaggataggctgcaaggctatggtcaggtatgcacggcgggccgtccttaaccccttttacaaggagggctgtgacaagaatggcgagttccaccgggtgttaaatgaaccccaaacagaggcagagtttgagaaggcatggtcagatttaatggagcagtacaatctcgagtctagcgtgtatttgcgcaggatgtgggacatgaagaaaaaatgggctccagcttacttcagggaattcttttttgctaggatgtcaaccacacaaagaagtgagagcatgaatcatgttctgaagaagtatgtaaaaccatcctcttcgctacatggatttgcaaagaggtatgagaatttctacaatgataggattgaagcggaagacgctgaggagcatgatacatacaatgctatggtacagtatggttacacggaaataccgaagaagtatatcctgaagaggtggacaaaagatgctagagattcaatcccaaagcacttggaggagtcttacttgaaggataaggaggcggcattatcgagaacttatcggaacaccctcctgcacaagtctgcacttgatatggttagacttggtggtactagttcagaaacatatgagaagacagtggaagtgttgacaaagctgattggagaacttcaggtcatttctgactcggagcatggaatgtctgatgaattttgtgtagccgatgaggacggcattggacaggatgtttctgctggtgaggattcagttgatgtggacatgactgatgtcaacgaagaagacatactccctcctgagatcttgttagataacttcaggcagtga

SEQ ID NO: 99990 - DNA, 279 bp, Oryza sativa
  Clone ID: PAT_MRT4530_9774C.1
atggaggcgacgctcgagggcggggacgtggtccttggcgttggcggggaggcagaggcgagaaagaggcggtggggtgaggcgagctgggagacaagggctggaaaagtgggagcggcgggagggcgcggaagatggacatcaccgatgccggcgtggacggcgtggagcgcgatgacggggtcgtcgggtggggccggaagtggagaggaagggaagcggaggccgcggcgcaacgagttgatttttctttttgattggcgcaaagaacaatcttga

SEQ ID NO: 99991 - DNA, 2583 bp, Oryza sativa
  Clone ID: PAT_MRT4530_97750C.1
atgtcgtcggcgaggtctgttgcgtcgccttccgcggcgcgagtaggcggaggctcgtcggcgcctgatgtcgagcagcagaagtcggtggcggccgtaggcgtgtcgtcgccggtgagtagtagcaagcaccatcatatggcgaaggcagaagatggaaccattacaattaatggtgacaagcagcagaatcctgccgcagataggggtagctaccagaatccgtgctggacagaaacaatattcgcgaagatagctatggaggaagaaggctggccggagaaaggtggcgaggatcatagtggacaacccatggacgtagttccgttggaaaggatcgtggttgagggggaggaagatagtgatctgctgcctatttcactctctgacccagccattctgttgccgaaaattgggcagaccttcaatgaggactctgatggctatgcgttctacaatctgtacgctaggttcactggttttggtataaggagatccaagaacagatacaaagatggaggcgtgaagtccatgcaagagttctgctgcattcgcgagggtagagataattccgtcactggtccgccgaccaggataggctgcaaggctatggtcaggttaaatcgttcttctgaaagtcaaaagtggagagtttctgcattcgttagtgagcacaaccatgaaatgaaacgggacctgcagcatactaaacacttccggtctcataatttcattgatgaagggacaaagaggaacataaaggaaatggtagataatgggatgacacctacagctatgtatggattactttcaggtatgcacggcgggccgtccttaaccccctttacaaggagggctgtgacaagaatggcgtatgccatcagaagggatgagtgtagcaatgatgtgcagaagacactgaatttttttagggaaatgcaatgccgcagtaagaatttcttttacaccatacagattgatggtgcttcaaggattaaaaatatattttggtgtcattctctttccagattaagttttgaccattttggggatgcaatcacttttgatactacatatcagactaataggtataacatgccatttgggatttttgtcgatgtaaataaccattttcaaacagcaatttttggttgcgctttgttgagggaggagacaatcgaagcattcaagtggcttttccaaacatttactgatgcaatgcatgggaataggcctgcagcaattttaacagataactgtcatcaaatggaggtggcgatcaaagcggtttggcctgaaactattcatagagtttgcaaatggcatgttctgaagaatgctaaggagaacttggggaacatttacagtaaaagaagcagtttcaaacaggagttccaccgggtgttaaatgaaccccaaacagaggcagagtttgacaaggcatggtcagatttaatggagcagtacaatctcgagtctagcgtgtatttgcgcaggatgtgggacatgaagaaaaaatgggctccagcttacttcagggaattcttttttgctaggatgtcaaccacacaaagaagtgagagcatgaatcatgttctgaagaagtatgtaaaaccatcctcttcgctacatggatttgcaaagaggtatgagaatttctacaatgataggattgaagcggaagacgctgaggagcatgatacatacaatctagtccatataggtgatgacaccttgcaaagttggggcagcaaagaatttaaggttcaggttgacctgactgaacaagatctgtcatgtggatgcaagctttttgaacacttgggaattatatgctcccatattatcagagttatggtacagtatggtttcacggaaataccgaagaagtatatcctgaagaggtggacaaaagatgctagagattcaatcccaaagcacttggaggagtcgtacttgaaggataaggaggcggcatcatcgagaacttatcggaacaccctcctgcacaagtctgcacttgatatggttagacttggtggtactagttcggaaacatatgagaagacagtggaagtgttgacaaagctgattggagaacttcaggtcatgtgtacttcgcaagttgtaaacaacaaggaaattcactgcggagatagaacaattgggaagaaacctactggtgtgcaattggatgatagtgtagacagttctgactcggagcctggaatgtctgatgaattttgtgtagccgatgaggacggcattggacaggatgtttctgctggtgaggattcagttgatgtggacatgactgatgtcaacgaagaagacatactccctcctgaggttagaagaagtcgtggacgaccgaggagtaccagactgatgtcgaagggagagacatctagcaaagcaaagaagaagaaggctagtgagagtacctccaaggacgagtcgaagaatcacgccaaaggaaaaaaagagtcaacgaagcagattaggtactgcaagcaatgtggtggtcatggccactataagagtacatgtggtcggaaatctagttatgagaggaagaagtga

SEQ ID NO: 99992 - DNA, 684 bp, Oryza sativa
  Clone ID: PAT_MRT4530_97751C.1
atggtgagaggttctcatcctcttatctcagccggagtcaggcctcccgctctagtaaaagcaaggctcccgtttcccgggggcgcgttcgtgatttttgaggttctttcgagcgccggtgtggtgagtgtcgcgccgccgctactggggaaggcgcaacatcctcaggagtgtcgtgccaccccaggcagggggcaaggccccccacatccccaccagccctgcctcaccgagaagtacgacgatggcgccgacccctccgagtccctccagatctgcacggcgatcatagaggtggcgggtggtggcgaccgggtcatggcgaacgtcattcccatggcccttaggggccaagcgcggggttggcccatgaacctgctgctgcctcggttcactcctgggaggactcttgcagttttgagctccgggtttttggtggagcagaacccctccggtggaaagggcagaatgtcgtcggcgaggtctgttgcgtcgccttccgcggcgcaagtaggcggaggctcgtcggcgcgtgatgtcgagcagcagaagtcggtggtggccgtaggcgcgtcgtcgccagtgagtagtagcaagcagcacaatctggcgaaggaagaaaatggaaccattacagctaatggtgacaagcagcagaagcctgccgcagataggtacacatag

SEQ ID NO: 99993 - DNA, 461 bp, Oryza sativa
  unsure (1)..(461): unsure at all n locations
  Clone ID: PAT_MRT4530_97752C.1
cccacgcgtncagccacgcgtgcgctcactgtcccagtttcaagaatccctagcgttgatcttactttttactttttgttttcttgcgatcgccggagttggtgccgtcggtgaccggagttttttggctgttcgcctgagatggttcatctggtcgtggcttgagctgtttggatctggattaggtaggtgagtagtagtactaaggtgtttggaaggcgagggtggaaggatgagctttggtgttggggatctggatgaggagggcggggcggcggcggcatccgatgagatccggcggctgccggcggaggtgaactgggagatgctggacaagtcgctgttcttcgtcctcggcgcagagctcttctaggtcgtctccgaggtgctgtacccgtccgtcgtggtcaagacgcacctgcaggtggcgccgccgccacaggcggtcaccgcgaccgccg

SEQ ID NO: 99994 - DNA, 460 bp, Oryza sativa
  Clone ID: PAT_MRT4530_97753C.1
gttgggaacttgggaatacagaactttcacagcaagaggctttacaccaaggatgtttgacaagacaagtcacctctacgcattttgtgcttcctctggacatacggtacatatgatccgttactttgaggaaggtgataacctactacttcgaaactacagatacttgttcattgtcccaaagtaaaatccactcgctggaatgcgctaacatgtgggtagactacaatgacatgtggaggaaaagattacaaccaacggcaattttgaatcagccactctagaactggatcttgaagaattgcttcagagttagcctgagaactgggtaaagcatcccaaggattctgacctcctgttgggggactacaagcataagataccaccgtcaactgaacccgacaattggtttgaatctttgaggaatcagtgtgtcatgtctgagatgcagtcatagtaa

SEQ ID NO: 99995 - DNA, 172 bp, Oryza sativa
  Clone ID: PAT_MRT4530_97754C.1
tcgagcgacgcagcgttaggctatcgaggatagacgttgagggacaccctgctgaggtcctcagtgaacttgccctgctcaaccagcactgacgcaatatacatgatactcatcactcactacttgcacactatgaatgaattcggcatgtcctcaaaggcctcctccacat

SEQ ID NO: 99996 - DNA, 2997 bp, Oryza sativa
  Clone ID: PAT_MRT4530_97755C.1
atggcgacggcgagggtggtgttcttgctcctgtttctggtgcagatcgtcggcgtcctcgcagccgcggcgaggccgttggaggagaacggtgtcgatggcatcgcgacgcagatgctcgccgccgaagcctatattctactcccaggagtagctactcctattgtaaccatcggacacctgtccaactcacatcagggtttcgggcttcaactcactaacggattgtttttgatggagcagaaactctccggtggaaagggcagaatgtcgtcggcgaggtctgttgcgtcgccttccgcggcgcgagtaggcggaggctcgtcggcgcctgatgtcgagcagcagaagtcggtggcagccgtaggcgcgtcgtcgccggtgagtagtagcaagcaccatcatatggcgaaggcagaagatggaaccattacagttaatggtgacaagcagcagaatcctgccgcagataggggtagctaccagaatccgtgctggacagaaacaatattcgcgaagatagctatggaggaagaaggctggccggagaaaggtggcgaggatcatagtggacaacccatggacgtagttccgttggaaaggatcgtggttgagggggaggaagatagtgatctgctgcctatttcactctctgacccagccattctgttgccgaaaattgggcagaccttcaatgaggactctgatggctatgcgttctacaatctgtacgctaggttcactggttttggtataaggagatccaagaacagatacaaagatggaggcgtgaagtccatgcaagagttctgctgcattcgcgagggtagagataattccgtcactggtccgccgaccaggataggctgcaaggctatggtcaggttaaatcgttcttctgaaagtcaaaagtggagagtttctgcattcgttagtgagcacaaccatgaaatgaaacgggacctgcagcatactaaacacttccggtctcataatttcattgatgaagggacaaagaggaacataaaggaaatggtagataatgggatgacacctacagctatgtatggattactttcaggtatgcacggcgggccatccttaaccccctttacaaggagggctgtgacaagaatggcgtatgccatcagaagggatgagtgtagcaatgatgtgcagaagacactgaatttttttagggaaatgcaatgccgtagtaagaatttcttttacaccatacagattgatggtgcttcaaggattaaaaatatattttggtgtcattctctttccagattaagttttgaccattttggggatgcaatcacttttgatactacatatcagactaataggtacaacatgccatttgggatttttgtcggtgtaaataaccattttcaaacagcaatttttggttgcgctttgttgagggaggagacaatcgaagcattcaagtggcttttccaaacatttactgatgcaatgcatgggaagaggcctgtagcaattttaacagataactgtcatcaaatggaggtggcgatcaaagcggtttggcctgaaactattcatagagtttgcaaatggcatgttctgaagaatgctaaggagaacttggggaacatttacagtaaaagaagcagtttcaaacaggagttccaccgggtgttaaatgaaccccaaacagaggcagagtttgagaaggcatggtcagatttaatggagcagtacaatctcgagtctagcgtgtatttgcgcaggatgtgggacatgaagaaaaaatgggctccagcttacttcagggaattcttttttgctaggatgtcaaccacacaaagaagtgagagcatgaatcatgttctgaagaagtatgtaaaaccatcctcttcgctacatggatttgcaaagaggtatgagaatttctacaatgataggattgaagcggaagacgctgaggagcatgatacatacaatgagaaggtttccacattaactagctcgcccattgagaaacatgcttctcgggtgtacactaggggtgcattttccaggttcaaggaacagttcaagctaagcttttcatttatggtttatcatacttctgatcagcatgttctgcagctagtccatataggtgatgacaccttgcaaagttggggcagcaaagaatttaaggttcaggttgacctgactgaacaagatctgtcatgtggatgcaagctttttgaacacttgggaattatatgctcccatattatcagagttatggtacagtatggtttcacggaaataccgaagaagtatatcctgaagaggtggacaaaagatgctagagattcaatcccaaagcacttggaggagtcgtacttgaaggataaggaggcggcatcatcgagaacttatcggaacaccctcctgcacaagtctgcacttgatatggttagacttggtggtactagttcagaaacatatgagaagacagtggaagtgttgacaaagctgattggagaacttcaggtcatgtgtacttcgcaagttgtaaacaacaaggaaattcactacggagatagaacaattgggaagaaacctactggtgtgcaattggatgatagtgtagacagttctgactcggagcatggaatgtctgatgaattttgtgtagccgatgaggacggcattggacaggatgtttctgctggtgaggattcagttgatgtggacatgactgatgtcaacgaagaagacatactccctcctgaggttagaagaagtcgtggacgaccgaggagtaccagactgatgtcgaagggagagacatctagcaaagcaaagaagaagaaggctagtgagagtacctccaaggacgagtcgaagaatcacgccaaaggaaaaaaagagtcaacgaagcagattaggtactgcaagcaatgtggtggtcatggccactataagagtacatgtggtcggaaatctagttatgagaggaagaagtga

SEQ ID NO: 99997 - DNA, 111 bp, Oryza sativa
  Clone ID: PAT_MRT4530_97756C.1
gaagatggccctaagcgtcgagggctgcctgtgtaagatggccccatcagcgcatcagcacgtgacagatgtcacgattcccgaaaagtccatcgccgacggatggcatcg

SEQ ID NO: 99998 - DNA, 661 bp, Oryza sativa
  Clone ID: PAT_MRT4530_97757C.1
gcacgaggctctacaatcatcgactttcagcaaattaagatggctgctgccttctcctccaccgttggagctccggcgtcctcagctcctacgagtacctcagccagggtctcagaacgtacgacttcgacaacaccatgggaggcttctacatcgcccctgctttcatggacaagctcgtcgtccacatctccaagaacttcatgaccctccccaacatcaaggtcccactcatcctgggtatctggggaggcaagggtcagggaaaatccttccagtgtgagctcgtcttcgccaagatggggatcaaccccatcatgatgagcgccggagagctggagagcggcaacgccggagagccggcgaagctgatcaggcagcggtaccgtgaggcggcagacatcatcaagaaggggaagatgtgctgcctcttcatcaacgatctggacgcgggtgcaggtcgcatgggaggcaccacccagtacacggtgaacaaccagatggtgaacgccaccctgatgaacatcgccgacaacccaaccaacgtgcagctccccgggatgtacaacaaggaggacaaaccccgtgtccccatcatcgtcaccggccacgacttctccaacgctgtacgcgccgctcatccgtgacgggcgtatggaga

SEQ ID NO: 99999 - DNA, 231 bp, Oryza sativa
  Clone ID: PAT_MRT4530_97758C.1
tgtttatcctgacaatgctgatgcaccaatgaagcatggtgctgatcagaatgcagtgtcgcatatgtggatggtgtgcagatctgcagaagagaaggaaggagatcttcagataatagtgaggttttgttgatgatgccagatgaaagaatcaaaacattgtttaaatgttccaagctattctctatttccttgaaaaaggtgctcaaacactacaagaaccagtttctg

SEQ ID NO: 100000 - DNA, 1764 bp, Oryza sativa
  Clone ID: PAT_MRT4530_97759C.1
cccacgcgtccggcggccggccatcatcagtgatcctctacaatcatcgactttcagcaaattaagatggctgctgccttctcctccaccgttggagctccggcgtccactccgaccaacttcctggggaagaagctgaagaagcaggtgacatcggcggtgaactaccatggcaagagctccaacatcaacaggttcaaggtgatggccaaggagctggacgagggcaagcagaccgaccaggacaggtggaagggtctcgcctacgacatctccgatgaccagcaggacatcaccagggggaagggtttcgtcgactcccttttccaggctcccacgggtgatggcacccacgaggccgtcctcagctcctacgagtacctcagccagggtctcagaacgtacgacttcgacaacaccatgggaggcttctacatcgcccctgctttcatggacaagctcgtcgtccacatctccaagaacttcatgaccctccccaacatcaaggtcccactcatcctgggtatctggggaggcaagggtcagggaaaatccttccagtgtgagctcgtcttcgccaagatggggatcaaccccatcatgatgagcgccggagagctggagagcggcaacgccggagagccggcgaagctgatcaggcagcggtaccgtgaggcggcagacatcatcaagaaggggaagatgtgctgcctcttcatcaacgatctggacgcgggtgcaggtcgcatgggaggcaccacccagtacacggtgaacaaccagatggtgaacgccaccctgatgaacatcgccgacaacccaaccaacgtgcagctccccgggatgtacaacaaggaggacaacccccgtgtccccatcatcgtcaccggcaacgacttctccacgctgtacgcgccgctcatccgtgacgggcgtatggagaagttctactgggctcccacccgcgacgaccgtgtcggcgtctgcaagggtatcttccgcaccgacaacgtccccgacgaggacatcgtcaagatcgtcgacagcttcccaggccaatccatcgatttcttcggcgctcttcgtgcccgtgtttacgacgacgaggtgcgcaagtgggtgtcggacacgggtgtggagaacattggcaagaggctggtgaactcgagggagggcccaccggagttcgagcagcccaagatgacgatcgaaaagctcatggagtacggatacatgcttgtgaaggagcaggagaacgtcaagcgtgtgcagctggctgagcagtacttgagcgaggctgctcttggtgacgctaactccgacgccatgaagactggttccttctacggttctgcgccatccagctgaataaaagatctctagctattcgcatcccatcgatgcatcgtaggcggcctgcataggaggaggagggcaaggagcacagcaagcaggtaacctgcctgtgccggaaggttgcaccgaccctgttgccaagaacttcgacccaacggcgaggagcgacgacggcagctgcctttacaccttttaagcaggccggcttgacgcttgctattaattatttctcctttttatgttttctctttgttctgtgtatcagatcggcgcccaagccatagctgggcatgacaagtttttgttaataataatataatataaagatatgggctaaaaaaaaaaaaaaaaaaaaaactcgagactagttctctctctctctccctcggccgaattcctgcagcccgg

SEQ ID NO: 100001 - DNA, 1864 bp, Oryza sativa
  Clone ID: PAT_MRT4530_9775C.1
ctatccaaaacggacggccgagatcgaacggtccacggccagaccacgagagacgacgacgatgacgtcagcgacgacgtcaccaccggcggcggctcgggcgcgcatgctcaccggcgaacgacggcgtggcggcgcgaacggagagcaccttcggcttgacgacgacggcggtgttccggcggtcgacagcaacggcggaggggcggacgaggacggcgacgcgacggcgaccacgatggcgaccttcccgagcgacgacgacgactggagcgacggcggcgcacggttgggggtccttttaaaggggttggaaggcagcgtcggaggcccacggtgaccggcgacggcgaaggaaggtcttgataagtccacttccaccagcgcgtccctgaagaagttgcaggaggaaggcgctctccctggtcgcgggaccatggagagggaaccaggaggtactgaacctgaacctgtcctgggccgcatggttgcggttgaggactatattctctgtggtttccttcctcctccctctgagtttcttcttttggtcttgaatttctacggtctttctctgctccatttgaaccccaactctatcaccttcctcagtatcttttctcatctttgtgaggcctacattggggtagaactatttcgtgacctctttcgcttctactatgagttgcgttggatggaatccaatagggtatcaggatgcgttggtttccgacttcgggatggcctgaagtcgcgctatatccccttccagtgcccctcttctcgtagtaaatggcgggcgaggtggttctatcttcagatagaaaactcggatccggtctttgttgttcccgaggagcaaccagacaagatttcgtcttggcctgccaagcccgccttgacccctcccttcagtctttcatcgatgtcatcgatgacctccgagtgcgagggttgtcggagtattaagtcgctgccgacttcatcggtagacggatccagccgctccaggcttgagcccatccagcctttgactactcagggtttgaacagtgaaaccgtagagcatcgcatcggtcaagtgatgatcagcggccccaccacggtgagcaacgtccctgttgctctttgcgagaagggggcagccgaacgcgaagctgccatcaatctgaaggagggcgtcgccaaggaggcatttgatgttgctgccgctgctgccacaacaagtggcggcaacgttctgaaaagggggaggaaattctcctccatgatcggaaatcgtcggaagacgcccaccccctcggttggtgctcgcggcattagccgcaagatcacggaggcgagggcggcggcggcgtcatcggcgaatgagcgcgccgaccggctgatgcatgatctggcggaggttcgcgagaacctacagaagatgagggaactggtggccggcaacgagcgacaacggcaggggctcgagcaccgtatgtcggagctcgagaacaacttgtcggaaatccgtggctcgctgcgggtcacctacactagtctgcaccagcttgccggggagtacggtgtcaagaccaccatcccggcgaatcccgatgagttatggctgacgacttcacttgcggaacttgcgacagtgatggaggcgatcctctccaagcacgcggccaggatcggagaggagacgtctaacgggatttataccggggcatgccatgtccttgcgtgtgtgaagctggcgcaccctgaactcgatcttcagaagatcttggatcagggggcggctagcgacgcgcgcaaggatgtgatggaagaagtcggtgatttgggggaatccgtcctcccgctttttgaagagtag

SEQ ID NO: 100002 - DNA, 1774 bp, Oryza sativa
  Clone ID: PAT_MRT4530_97760C.1
cccacgcgtccgcccacgcgtccgcggccggccatcatcagtgatcctctacaatcatcgactttcagcaaattaagatggctgctgccttctcctccaccgttggagctccggcgtccactccgaccaacttcctggggaagaagctgaagaagcaggtgacatcggcggtgaactaccatggcaagagctccaacatcaacaggttcaaggtgatggccaaggagctggacgagggcaagcagaccgaccaggacaggtggaagggtctcgcctacgacatctccgatgaccagcaggacatcaccagggggaagggtttcgtcgactcccttttccaggctcccacgggtgatggcacccacgaggccgtcctcagctcctacgagtacctcagccagggtctcagaacgtacgacttcgacaacaccatgggaggcttctacatcgcccctgctttcatggacaagctcgtcgtccacatctccaagaacttcatgaccctccccaacatcaaggtcccactcatcctgggtatctggggaggcaagggtcagggaaaatccttccagtgtgagctcgtcttcgccaagatggggatcaaccccatcatgatgagcgccggagagctggagagcggcaacgccggagagccggcgaagctgatcaggcagcggtaccgtgaggcggcagacatcatcaagaaggggaagatgtgctgcctcttcatcaacgatctggacgcgggtgcaggtcgcatgggaggcaccacccagtacacggtgaacaaccagatggtgaacgccaccctgatgaacatcgccgacaacccaaccaacgtgcagctccccgggatgtacaacaaggaggacaacccccgtgtccccatcatcgtcaccggcaacgacttctccacgctgtacgcgccgctcatccgtgacgggcgtatggagaagttctactgggctcccacccgcgacgaccgtgtcggcgtctgcaagggtatcttccgcaccgacaacgtccccgacgaggacatcgtcaagatcgtcgacagcttcccaggccaatccatcgatttcttcggcgctcttcgtgcccgtgtttacgacgacgaggtgcgcaagtgggtgtcggacacgggtgtggagaacattggcaagaggctggtgaactcgagggagggcccaccggagttcgagcagcccaagatgacgatcgaaaagctcatggagtacggatacatgcttgtgaaggagcaggagaacgtcaagcgtgtgcagctggctgagcagtacttgagcgaggctgctcttggtgacgctaactccgacgccatgaagactggttccttctacgggcaaggagcacagcaagcaggtaacctgcctgtgccggaaggttgcaccgaccctgttgccaagaacttcgacccaacggcgaggagcgacgacggcagctgcctttacaccttttaagcaggccggcttgacgcttgctattaattatttctcctttttatgttttctctttgttctgtgtatcagatcgcgcccaagccatagctgggcatgacaagtttttgttaataataatataatataaagatatgggctatactatacatgagtatatttcatttgggtatcatttgtcaatttctgtgtccatccagtgttttcttagaacaatactgtaagacggtttactgtcagccaaaatgctaaattaagcaatgggaacaatacggtttgcaaaaaaaaaaaaaaaaaaa

SEQ ID NO: 100003 - DNA, 2105 bp, Oryza sativa
  Clone ID: PAT_MRT4530_97761C.1
atgggtgaattctgtggtgaggaaagactccgatccaggtccaagtcatgctatgctgtggatcggccggccgagattgcgccacgtgtgcagaacccaatcttcagcgtgtggcctgtggaggatctggaagctgatccacagggacgagcgtccactccgaccaacttcctggggaagaagctgaagaagcaggtgacatcggcggtgaactaccatggcaagagctccaacatcaacaggttcaaggtgatggccaaggagctggacgagggcaagcagaccgaccaggacaggtggaagggtctcgcctacgacatctccgatgaccagcaggacatcaccagggggaagggtttcgtcgactcccttttccaggctcccacgggtgatggcacccacgaggccgtcctcagctcctacgagtacctcagccagggtctcagaacgtacgacttcgacaacaccatgggaggcttctacatcgcccctgctttcatggacaagctcgtcgtccacatctccaagaacttcatgaccctccccaacatcaaggtcccactcatcctgggtatctggggaggcaagggtcagggaaaatccttccagtgtgagctcgtcttcgccaagatggggatcaaccccatcatgatgagcgccggagagctggagagcggcaacgccggagagccggcgaagctgatcaggcagcggtaccgtgaggcggcagacatcatcaagaaggggaagatgtgctgcctcttcatcaacgatctggacgcgggtgcaggtcgcatgggaggcaccacccagtacacggtgaacaaccagatggtgaacgccaccctgatgaacatcgccgacaacccaaccaacgtgcagctccccgggatgtacaacaaggaggacaacccccgtgtccccatcatcgtcaccggcaacgacttctccacgctgtacgcgccgctcatccgtgacgggcgtatggagaagttctactgggctcccacccgcgacgaccgtgtcggcgtctgcaagggtatcttccgcaccgacaacgtccccgacgaggacatcgtcaagatcgtcgacagcttcccaggccaatccatcgatttcttcggcgctcttcgtgcccgtgtttacgacgacgaggtgcgcaagtgggtgtcggacacgggtgtggagaacattggcaagaggctggtgaactcgagggagggcccaccggagttcgagcagcccaagatgacgatcgaaaagctcatggagtacggatacatgcttgtgaaggagcaggagaacgtcaagcgtgtgcagctggctgagcagtacttgagcgaggctgctcttggtgacgctaactccgacgccatgaagactggttccttctacggttagatccaacaccctcccactactctacaccatcatcatatataatacatctctctctatcactgtatatatatatatatattatgaaagaaacaaaaatagcttcctctaaattaattatgaccagctaaaacgcacaaattaagatttgttatacatgttattctatctatagcgcaggggcggagccacgtgtcgaacagcttaattaggcttgagctccacacgtggcaagaaaattataagggccggaaaagcataaatttctagttacaatttgttatactaaatgattgagccctatgcatgacaaaattctacctccgcccctgtctataggttctgcgccatccagctgaataaaagatctctagctattcgcatcccatcgatgcatcgtaggcggcctgcataggaggaggagggcaaggagcacagcaagcaggtaacctgcctgtgccggaaggttgcaccgaccctgttgccaagaacttcgacccaacggcgaggagcgacgacggcagctgcctttacaccttttaagcaggccggcttgacgcttgctattaattatttctcctttttatgttttctctttgttctgtgtatccgatcgcgcccaagccatagctgggcatgacaagtttttgttaataataatataatataaagatatgggctatcctcagcccggggatccactagtt

SEQ ID NO: 100004 - DNA, 2250 bp, Oryza sativa
  Clone ID: PAT_MRT4530_97762C.1
atggccgagaagaccattcgcgagttcgctgccccctcagctgaaaacgtgctcattgggccacaaatcaacttgggagacacagatttcgatctgaagtcgagcctcatcacgatggcgcaggctagctcgttctgcggcaagcctaatgaaaatgccagtgtgcacctgcaacagttcctggagatatgtagcacgtacaccgtgaaaggtgtcagtccggatgccgtcaggatccggctatttcccttctcccttctagggaaggtgaagcagtggtcctatgccaaccgtgctactatcaatacttgggacatgtgctctacgacatttttgtccaaattcttcccgatgggcaaaaccaacgcccttcgcgggaaaatttcggtattccagcagacaagggacgagttaatccccaaagcatgggaacgactccaggagtacgtggctgcctgcccgcatcatgggatggacgaatggctgatactccagagcttttacaacgggctcactcccacgtcccgcgaccacctagacgtggcagctggaagagccttcttctctaagacgtgtgaggtctgcggcagcacgggtcattttgggaacgactgcccagaaacccgtgaggaaacgatgtacatgggcaacgacaacaacgggttccgtccacaaggaggtcaagggtggaacagccccgctcatatttccaaggaagcaacaataatggtttcaactgttaataagtctagcaatttcaagcgccctacaactggttcttcaaagggtccgatttccaatgctgagtccttgaatgttgttcctgttaaatcagtctttgatcgtcttcgatttccggagatcgccgccggcaaagctccggcccgtgatcagggggtcagatgtgcttcctgtcacaaattggatcaccgggctttagcctgttggaacaaaaagaaggcccaagtctggaggcccaaaaaggattctatgcctgcggctaagaagtctattgtggaaagggcagttttagggaaagaaataatttgcttcaaaaatcaaggaagcccttcctcttcctctcaacagttgcagtctgtccctcttttgctctcgacctcttcgccgagtgctccaatggcggtgctccttgagccctgggatcatcagcttgagcgtgctgatctttgcctccaggaagatccccctaagcgcaatgaaggtatggctgtcgcttgcattgaacctccaccaactcctgagcaatatgagggtttcagacatctggtgattaactatgttcagaatgtgctgggctatcatgtgttagaagctagccgtcaccctattgagttcatgtatgttcgtgtagcttctgctctgcttagagacactctaatagctgggggtccttatgaagtggataatcagtttatgcttcgctttgttcctcatgaccttacttccagttgtcgcaactcccctttcacttcagagggatggataatgtttttggatttcccattggatttcaaaactcctgctattattgacaaagctgtctctctgtttgggaaagtgatcaaagttcagttagatgataatgtaaggggaagattaatggtaaaagctttgtactcttccactctggaggtccctagaagaattgttgttaaaagggccattgctttcggaggtgttggaagatcttggacggtctcagtctttctatgccatgaagaactacctgatgttatgcctggggatgaggatttacctccagtgaatcatattcccatccctgatccggtgcagctgctggcaccacaagtggatgcttttggtgataatatggaagaggatgctccagctgttgagcaaaattctcagcctcttagtgctgtctctgtggtggctggaaatcaaaattttgccctcttagcagctgttctgctggtggttgggaatgaaactgaggttgaacaggctgagggagatttgggacatgagtatatgaatgaggcccatattgaagatgctgaaatggttgagcccatttcctgtgtgctccctgaacaacaagttttacctcaggatccattccagcaaagtgcctcttcctgcctgccatctttgaagaaatccagaaagactaaagctaaaattgtggcaattgtggacactgatcgtaggagaaactccagaatcaataagctcacagggggttacatgtctcctgatcccaagtag

SEQ ID NO: 100005 - DNA, 563 bp, Oryza sativa
  Clone ID: PAT_MRT4530_97763C.1
ctgtcggtgcctatatctgggccaccattgtggagcatccaacgccttcgttgaagacaggacttgggtgtccacaatggtactctgatcatttgcgaggctgatgttccttcactaatgaaaatccaccaacacctaacattacatgtattcctttacaaaaacacactaccttcacatgtgagtgtttccgacgtaacccgccatgtgacttttgagaggtctctcttgcatataaggctatgggctgaatcccctctttgcagatgtaaaggctagctggctaggttaattggacaccgtcccaacacacgctgtgaggtggatccacacatgtgggctctcctctctcctcgcatacttacctggtgctctagtggcatttgcctggacctagcacgtataaccttactaacatgctgttaacacccaatccacacaagattggtgataacatctgaaagaccatgttaaacaaatgccagcgcacggtcgcgacctccgggagcgtctcccggatctcctcgaccgatatgctccgcccccatgacgagcatcacaaa

SEQ ID NO: 100006 - DNA, 232 bp, Oryza sativa
  Clone ID: PAT_MRT4530_97764C.1
gatgcttaccaaaccttgaattaaaactcggggggattttaccgattgtatacacccctatattccacatactgataaaaaacacatggttgtacacttcacctcacttatgccacaggaggaggagcaactgctgaaacaaaactaccatacgtaaacttcaattcctactatagtatcaccatttcggctcagctatgttcaaaggtagttctgttaccacataaccaac

SEQ ID NO: 100007 - DNA, 5169 bp, Oryza sativa
  Clone ID: PAT_MRT4530_97765C.1
atggcgcagcctttgcgcgcggaagctggcctcctcctcctcctccatccttcttcctcctgtggccgccgcgatggaggtggagatcgtcgaggtggggccgtcgagccggccgctgcggtacgtgccggcgcagcagcggtggaggccgacaccgacgccgcttcctccgcctcctcccccgctgccacctcctcctgccgcctccgcggcgtcgtcgtcgggcgccggggacgcggcggcggttgcgtccgcggcgaatcagttcgacagcgagaagctgccgcagacgctggtcgatttcacgcctttgaaaaggctcatatgatggatccacgttcaacagggaggggtgttcgtcaatttaaaactgcacttcttcagagacttgaacaggatgagaaaagcacatttacaaagagaatggcaaaaagtgattctcaagagatcagattattttatgagaagaaagagaaagctgatgagcgtgaacttttgcctgtcctggcagaagttctgagggctgttcagattggaactggcaaggagaaacagaaacgcattgctagcgaaacttttgcagataagtcggccttattccgatataatattcttcctctgtatcctggatcaactaaacaaccaattatgcttctccctgaggaaaagaaaggaaatgttgccaatcaaagggagcatctcattcttttgcttgcaaatatgcatgctcgcttgaaccccaagtcatcctctgaaacaatgcttgatgacagagcagtagatgaactattggcaaaaacatttgagaactatctgacctggtgcaagtttttggggagaaaaagcaacatatggttgccctctgtgaagcaggaaatccagcaacataaacttctgtacatatctctttatcttcttatatggggagaagcatcaaacttacgacttatgccagaatgtttatgctacatctttcatcatgaatcactaaagaacaagaatggagtatctgatcactcaacatggagaaactatgatgacctcaacgagttcttctggttagatactatgctttattgggtaatagcttttgctaattgcttcaagcttggctggcccatgcgcctgaataatgacttcttttttacgtcaaacaaaaataagaattctcggcttcccattgttccaccagttcagcaaaccgagcaacaaatcaaccaattgagaacatctcagcaaactgatcaacaaaacacccaattgagaacatctcagcaaactgagcaacgaaacacccaattgagaacacccaatggatcctcatcgtttcaaaatatgctcaatcccgaagcaccggggcaaacacaacagcaaactacaagcgacacatctcaacagaagtggttaggaaagacaaattttgttgaggtccgatccttttggcatatcttcagaagctttgataggatgtggacactccttgtgcttgggcttcaggttcttataataatggcatggcatggattagaaagtcctctccagttacttgatccaataatttttcaggatgttctgagtattttcataaccaattcagtacttcgagttattcaagttattcttgatattactttctcatggagaaccaagagaacgatgagatttagtcagaagctaagatttgctgtaaaactttctattgctgtggcatgggccatcattcttcccatattttatgctagttcccaaaactacttgtcttgttcagctagacgacctaaaacttttctggggatcttctgcttgtcgaaatatatggtggtcgttgcattgtaccttacaagcaatgtgattgggatggcattgttttttgttcctgctattaagcctcttgttgaacccacgaaagaaattatgaaggtctatttcatggacacacagatttggtattctgtattctgtaccatctttggtgagatggacttgatgacaatgcccatgtcactagaacataggtctggttctattcgttggcccatgtttttactcgccaaaaagttttcagaagcagtagatatggtagccaattttactggaaaaagtacacgactcttctgtataattaagaaggataattacatgctttgtgcaatcaatgatttctacgaattgacaaaaagtattttgaggcatctggttattggtgatgtagagaagagcttttcaagtgcatgtccctgtgaatattattatgatgttctacagattctatccagggtaatagctgccatctacactgaaatcgaaaagagtattcagaatgcaagtctattggttgattttaagatggaccatttgccttcactggttgccaagtttgacagattggctgagcttctgtacacgaacaaacaagaacttcgatatgaagtgacaattttactccaagatatcattgatattctggtccaagatatgcttgtagatgctcaaagtgtattaggtctgattaattcttctgaaacactgatctcggatgatgatggaacctttgagtactacaaaccagagctctttgcatctatcagctcaatatcgaacatacgttttccatttcctgagaatggcccactaaaagagcaggtgaaacgcctctaccttctgcttaatactaaagaaaaggtcgtggaagtaccgtcaaatttagaggctcggcgacgcatttcattttttgccacgtctctttttatggatatgccatctgctccgaaagtcagcaatgaatggagaaactttttggaacggcttggtccaaaggtcacacaagaagaaatcagatactgggcttctttccatggtcaaacattaagccgaactgtccgaggaatgatgtattacagaaaagcactgagactacaggctttcttagacaggacaaatgaccaagaattatgcaaaggacctgcggcgaatgggcgacaaactaagaacatgcaccaatcattatcaactgaactagacgcacttgctgatatgaaattttcgtacgtcatctcatgtcagaagtttggggaacagaaatctagtggtaatcctcatgctcaagacattatcgatctaatgacaaggtatccagctctacgtgtcgcctacattgaagagaaggagatcatagtagataataggcctcataaggtttattcatcagttttaataaaagcagaaaacaatttagaccaggaaatttaccgtataaagctgcctggtccaccccttattggagaagggaagcctgaaaatcaaaatcacgctattatattcacccgtggagaagctctacaaacaatcgatatgaaccaagacaactatctggaagaagcttataagatgagaaacgtgcttcaagaatttgttaggcatcctaggggcaaagctccaactatccttgggcttagagagcacatcttcactggaagtgtttcttcacttgctggattcatgtcatatcaagaaaccagctttgttacaattggacaaagatttcttgctgaccccctcagggtgcggtttcattatggtcatccagacatttttgatcggatgtttcatttgacaagaggtggcataagcaaagcgtctaaaactattaacttaagtgaggacgtgtttgctgggtataattccatattgcgccgtggacatataacttataatgagtacattcaagttggcaaagggcgtgatgttggtcttaatcagatatcaaaatttgaagctaaagttgcaaatgggaatagtgaacaaactcttagccgtgatatccatcggctagggcgacgctttgattttttcaggatgctctcttgttatttcacaacagtgggattttacttcaatagtctaatatcagttgtaggcgtttatgttttcctctatggacaattgtatttggttcttagcggcctacagagagctctgttaattgaagctgagactcagaatatgaagtccttagaaactgccctggtatctcagtcttttctccagctgggtctgcttacaggattacctatggtgatggagctaggtctggaaaaaggtttccgagtagctttgagtgactttatcctcatgcaactgcagttggcttcagttttcttcacattctctcttggaacaaaagctcactattatggacgtactattcttcacggtggtgcaaaataccgaccaacagggcgcaaatttgtggcattccatgcaagctttacagaaaactaccagttatactcccgaagtcattttgtcaaaggatttgaattggtcttccttctgataatttaccatatttttagaagatcgtatgtgagcactgtggtacatgtgatgatcacatactcaacgtggtttatggcagtgacttggctgtttgcaccttttctttttaacccagctggttttgcttggcgtaagattgttgaggattgggcagactggacaatatggatgaggaaccaagggggcataggagtgcaaccagaaaagagctgggaatcatggtggaatgctgagaatgcacatcttcgtcactcagtactgagttctaggattcttgaagtgttgctctccttgcgcttcttcatgtatcaatacggacttgtctatcatctcaagatatctcaagacaacaaaaatttcctagtctacttgctttcttgggttgttattattgccattgttgggttagttaagcttgttaattgtgctagccgtcggttgagctcaaagcaccagcttgtcttcaggcttatcaaattgttaatattcctctcagtgatgacctccttaatccttctctcttgcctctgccaactatccatcatggatttgatcatctgttgcctcgctttcataccaactggttggggcctcctccttatcgttcaagttttgaggccaaaaattgaatactatgccatatgggagcctattcaggttattgctcatgcttacgactacggaatgggttcactgctattttttccgatcgctgcattagcatggatgcctgttatctccgccatccaaaccagggttcttttcaacagggcattttctaggcagttgcagatccaaccttttattgcagggaaaaccaaacggaggtaa

SEQ ID NO: 100008 - DNA, 183 bp, Oryza sativa
  Clone ID: PAT_MRT4530_97766C.1
cttatacttggagatgacaagcctgggcatgtgcgggggcttggactagttccaggggctaaacaagttctcgatgggtcaaattcccgacgcttaaagaatataaatgttactagactgggtgataactggagagaagatgttgcgggtgctaaactgcacttggaaaagatcgaaaatcat

SEQ ID NO: 100009 - DNA, 385 bp, Oryza sativa
  Clone ID: PAT_MRT4530_97767C.1
cgatctataaccggacgcgtgatcactcacgacaaatggcgctgaacattattgccgtggccggatggccagcgatgtgcattaatagcatggctcatgctacatggagctaaacgtaagcataggtgaggaaagagagaaactgctataccataacactactacacttccttaaacacagaagcaggtatgatcctgtttagacatcttaaacagcgaactgaaatagattgaatatcttacgctgactgcacggtgtccagtttgatgatgtgtatgaatacatgcattaatgaatcacccaacacgcgaaaagagtcaacatgaggctttgctgccagctccttgcattcttgtaccaattacggaacctccatagatgatc

SEQ ID NO: 100010 - DNA, 1524 bp, Oryza sativa
  Clone ID: PAT_MRT4530_97768C.1
atgaacccgggcgctcgcccgcccgcgttgcagacgctctccgcccgcctctggccgcgcaggcggctctgcggagtccacgcggggagccggagcgggggcgaggggcctggagctagggagagtggtggtggtgacgttcgcattggaaggggggaggaggaggaggagggagggttggatggcggacgcgtcccgcaggaagtgctgctccggctgccgacgccgcccggccgggctgagaccgacgacgatgatggcgaaaacttgtcccctggcgcggggtccggttccaggaggaggttctttgaggagctgaggttgaaggcggataggattgtcaagatcctgcttcaggatggcccggggttcaacacccgccaggcgctcgacgaaatgcgcccgagggtgtccaatgcccttgtgagggaagtgctgctcaaatttgttgtctcgatcgatggcgtgaaccgcgctaggtacccgaggctggcttacaagttcttcctgtgggcggaggaacaggaggggtaccggcacggcacgagcatgtacaacctcatcttgaagatctttgcggagtgtggggagctcaaggcgatgtggcggctgcttgaggatatgacagataaggggctgcctgtgtcttcccggacgttccacctcttggtatgcacatcggggcgggctggattgaggcggaggctggtggagaggttcatcaagtcaagtaatttcaattatcgcccatttaggaattcattcaatgcgatactgcacactctgctgaccatagagcagtattcgttgattgagtgggttcaccagaaaatgatcgccgaggggcactcacctgatgttttgacatacaacgtggtgatgcgtgccaagtatatgctcaggaaattggatcagttccataagttgcttgatgagatgggaaaaaatgggcttgcacctgacctctatacgtacaatcttttgcttcatgtgcttggtaaaggagacaaaccacttgctgctctcaatttactgaactatatgagcgatgttggctgtgtaccgactgtgctccatttcacaaacttgatagatggtctcagccgtgctggcaacctacaagcttgcaagtatttcttcgatgagatggtcaagaaagggtgtcaaccagatgttgtttgctacacagttatgatcacaggttatgtggcagctggggaattcgatgaagcccagaagttcttcgatgatatgttgctgagagggcagcttccgaatgtgtacacatacaattccatgatatgcggactttgcatagtaggagaatttgataaagcatgctctctgctgaaggacatggagtcgcgaggatgcactccaaactttacagtgtatagtactctagtgagtaggttgcgaaatgctgggaaggattctgaagctaacaatatcattcagtacatgacaaataagggtcattatcttcatttattgtcaaggttcaggagatatagaagatgctga

SEQ ID NO: 100011 - DNA, 330 bp, Oryza sativa
  Clone ID: PAT_MRT4530_97769C.1
atggcgaaggctggaaagccgcgtcggtattccgaaagtaaaggcatctcgggcaaactacaaagacttcgccatgacgagttcggcatcaaggaggcccaacaggctgcccccggccttttaggcccgagctccacggcatcagcaatgactgttgaaggggaaggggtagagcaagaaggatggcggttgatggggccggggatcattgcccttagtctctgctcctgcggcgtcggcgtctccaccgagctagatcttgcaaattccatcctcttcggccggcggaaggagctcggggcaggtggcggcgagcttgtgcttgagtag

SEQ ID NO: 100012 - DNA, 586 bp, Oryza sativa
  Clone ID: PAT_MRT4530_9776C.1
gcctcgtgttttccatcaacaccgaccacccatacgcccccatggcaacaacgaggacgaggacagcggcgacggcgacaacgacgaccggcggcttcgagaaatgacgtcgacgaggagagtggcgacggctttggatgcagatgacatcgggctggacttcatcaccacacgtctccttgccattgtgcgcctcccgctcactgtcgcgcagggtttacattaccgtcgttaccgcgtgggccacatcccgcgcctctccctcgactccaccaccgcgcctccgcgcgcctcttcgccaacacggccttcttcgcctccgcccctacgcggcctccaccgcctctgccccacgcggatttggccattggcatggatttggggggccaccgctgcctccgcctccgcctccatcggcgttgaggaagcccgtggcgacaacagggttgggtgtggacatgaggcggcgagctcgagcgccaccatgcccatctgccccacctcgagctcgaggatgggaatgggctcgaggagcagtgggagaagaggaagaggggagaaaggggaggaaagaaaagggttgtag

SEQ ID NO: 100013 - DNA, 119 bp, Oryza sativa
  Clone ID: PAT_MRT4530_97770C.1
ctttttgatttaatttgttgctttgttattagagaggatctgatagatcagctgcaggtcagttagtttgtctgtcctatggctgcacacagtacagatccatccaccatcttccatgc

SEQ ID NO: 100014 - DNA, 1277 bp, Oryza sativa
  Clone ID: PAT_MRT4530_97771C.1
tcggacgtgtccttctccgtcggcggcgagacgctcatccacgcgcaccgcgccgtgctcgccgcgcggtcgccggtgttcagggcggagctcctcggctccatggcggaggccaccatgccgtgcgtcacgctgcacgacatcgagccggcgacgttcagagctctactgcacttagtctacaccgacgccttgccagcgagctccacgtcgtcttcgacggcggcggcggcggttgagttcttccgaggattgctagcggcggcggacagatacgcgctcgataggctgaagctcatgtgcgctcagagcctatgggagatcgtgtcggcggagaccgtcgcggcgactctggcttgcgcggagatgcacagctgcacggagctcaaaactagatgcatcgacttcctcatgaaggacagcaacttcaagaaggcagcggtgacagatgactacctgcatctttatgcagagcttcccgttagtgatcaacgagataaaggcacggctccaggcttgagacttgaaatagccgacactccggtcaaccaacaaataaacagaaaagaagatggacccaccgttcattctcattaccttctctttcttcttcctcccctcttctctcttcatcctaccagatcggaactcgccgccctgcagagatggggtggggaggatttgcaaggagagctaaataatcaatcattatttccttaagctatactcgccatcaccccatagccgtgccgccgccgaacctgggcggccatctcgccgccatggtgggcagcgccgacggctccgacgtgtccttctccgtcggcggcgagacgctcatccgcgcgcaccgcgccgtgctcgccgcgcgctcgccggtgttcagcgcggagctcctcggctccatggcggagggcaccatgccgtgcgtcacgctgcacgacatcgagccggcgacgttcagagctctcctgcacttcgtgtacacggacgctttgccaccgagagacatactatctccttcgtttttcaagaaattgttcgcggcagcggacaggtttgcgttggacaggctgaagctgatgtgcgcccagaagctgtgggaaagcgtgacagtggagacggtggcggagactctggcctgtgccgagatgcacagctgcccggagctgaagagcaggtgcctcgacttcttcgttgaagagaacaacttcaggaaggtggtagtcactggtggttacctgcgtcttatgcagggtttcccatctgttatcgat

SEQ ID NO: 100015 - DNA, 798 bp, Oryza sativa
  Clone ID: PAT_MRT4530_97772C.1
atggcatggggcaagacagatcgagaaggctgcaagtggcggcgtcccacgctgattcccgtctaccgcttgcctgccgcgtgccgattcctgtcgtcggccaccccgtcgttgtgcggaaagaaaaacaaccaactgcagtgctgccggctcaagaaggagagtgagaagagccgggcgcggtcgctggagcggcaaagctttgccgctccgtctgccatgcctattgactacctctctctttctccggcgttggccgcctcacctacatcgtcgccttcgacagcctccccctccggcgctggccactccgccatcatcttagcgctgccagtggtgaaccatgactctgttcatccgccgaatgaactcttcggctcggagcataagctcgtcttccagttccacgtcgtctccgtgcttctcttgcgatgcatccgtagctgcaggctcttcctctcgtgccgcacttctgccgttttcgctcgccagtgtctcaacgttgtccccgtcgcctgctcgcaccagccattcttccgcgcggccattgacgccggcaacgggacccttgtgtcctccaggaatgccagcagcgacgggctggaagaagacgcccagagcgcgatcagctcgacggtggagttgagcatttttggagaacggagtgtgtgtgcagctcagcagcttgatgaggaagattctgaggcgtggaccctgtggccttgtggggtcgtggcccggtggcccctggaccttttcattatcgattccttcctacgcaaaaatcattttcgctaa

SEQ ID NO: 100016 - DNA, 474 bp, Oryza sativa
  Clone ID: PAT_MRT4530_97773C.1
tcaacacaaaactcgcaaattttctgccatccagactctgttcatccgccgaatgaactcttcggctcggagcataagctcgtcttccagttccacgtcgtctccgtgcttctcttgcgatgcatccgtagctgcaggctcttcctctcgtgccgcacttctgccgttttcgctcgccagtgtctcaacgttgtccccgtcgcctgctcgcaccagccattcttccgcgcggccattgacgccggcaacgggacccttgtgtcctccagggttcatttccctcccttgcaccactgcatcagcttccaaactgcgatctccgtcagcgcggctgctgatctccggggcagcgcctgcgccgctgccggcgaggaggaggagagcgattatgagatgagagacgcagaatgccagcagcgacgggctggaagaagacgcccagagcgcgatcagctcgacggtggagttgagcat

SEQ ID NO: 100017 - DNA, 443 bp, Oryza sativa
  Clone ID: PAT_MRT4530_97774C.1
accatatttgtaccctagccgccggttgcaacgagccgacgcaatcacagcctgagcaagtcctcgtagcaaagccatggactgccaccgaaacgaatcccagagagaactggaaatgggcacaaagcctcacttcgtggtcatcccatggctggccaccagccacatgatacccatcgtcgacatcgcctgcctcctcgccgcgcacggcgccgcggtcaccgtcatcacgacgccggccaacgcgcagctcgtccagagccgcgtagaccgtgccggcgaccagggcgcttccaggatcacggtcaccacgatccctttcccggccgccgaggccgggctaccggaggggtgcgagagggtggaccacgtcccttcgccgtcattgatgccgagcttttttttgaccggcatgcagttcggcgacgcagtggcgcaacact

SEQ ID NO: 100018 - DNA, 865 bp, Oryza sativa
  Clone ID: PAT_MRT4530_97775C.1
gttcataacctaatgccggccatagttgctgacttgtggactacatgaaaaacttgggataatcagaagcgaaacaacttatttgagtatcgtgcagtcaataaaatcttgcaggtcccatcatccagaataatgaggaggacatgctttgttggaaattcactccaaatgggatatgtaacacgaaaagtgcatacaaagaaatatataaaagggaaatgcagtcctgcacacaggtaaatgatcaacaagagagcattaccagaaagatggatcgaattcctcaaggcaatagatgttacgtagatgcttcatgggaggatcatgttactggaattggaattttctttcatttcccttccacccataatgctctttttatcaaggcttccactaactcagctcaatctcccttgcaagccgaattgattgctttgcaactggctttggaaattgccttctttttgaattttgcaggtactaatttccttacagacagcgctacaattgcagacgaggtgaagacaaggaatttcagtgagcaacctggccattggagtcttcggccattatggagccaaatcacgacaacaattccaaatcatcttctgaaggttttctggatatccagagaaataaacataattgctgacaagctagctaaagaagctaaagctgatgctctaataaagcctatctataactgccaaaacatctctcacattgcctatccttcgagagattgtcatgcttcttctctgaatgctcatttcagttctttaaattgtaaaataaaccatgtattatgttcctagtttaataaatcctttacttaaaaaaaacaacaaaaaaaaaaaaaaaaaaa

SEQ ID NO: 100019 - DNA, 336 bp, Oryza sativa
  Clone ID: PAT_MRT4530_97776C.1
tttttggggttttttttatttttttgggggtttttttttttttttcttctttttttattggcttaaggtaatgccaccattcttggcattctcaacatatctatagttagctccaaaaacttgggactgcaaaaaaacaaacagtccttcgagctccaaaaacctgggaatgaatccttgccaacaaaccaagtccccatcaacatcgacttgttggtgttacaacccccccagggggggtccctttccccataaatttaagagaggctaccggcccggagcttcccccttccctggtagggtgtgacccccccatgggcacccgggcttgaattc

SEQ ID NO: 100020 - DNA, 750 bp, Oryza sativa
  unsure (1)..(750): unsure at all n locations
  Clone ID: PAT_MRT4530_97777C.1
gcgtaaaataacatcacaagtgttgtattttttaaaatcatcaattacacataggtccatacaaaggaaacatcgctaattcatgatatatatcctggttacaaatctttctattgtcaattgaggtaaaaactaagaattcaaatcctcactccccatgaaagattctaagcttctcttatcaggaattgctaatgtgcccgatattctctcagttttctaaacatgcatgtaagcctgcaaatttgttagttgaccaagtctagctgcaagagaatcgagcccatagaaaactaaaatgcacaaaagaatctgctgaatcaaaatgcaaaattctggaaaatagtatgcagtctgagcctactgttctgtctaaaatattaggggaattatggaaaatgactttcttaaatatcgatatctatccagaggtactaacacaaaatatattatttgaagtatagttcgactcaaataaaagtcagttctaaactcaatttagttcacacatcagttggctttgtctaagaagccattaactcagaaggttcaacctccattttggaattcttcatcacgttagcaatcttaaaatcatgaaatatgcacgtagacccattggcatcaactggttactttcagataccaagcaattcagagccatcacaggtaaaactccattntggaattcttcatcacgttagcaatcttaaaatcatgaaatatgcacgtagacccattggcatcaac

SEQ ID NO: 100021 - DNA, 521 bp, Oryza sativa
  unsure (1)..(521): unsure at all n locations
  Clone ID: PAT_MRT4530_97778C.1
cccctcccctcccctcccccctcgccaccaccgccagccaccgcgcgggatcggggagagcgatggcggacggcggcggcgacggcgcgatgccggacccgacggtgcggaacctcctggagcaggagagcctcaagtgggtgttcgtcggggggaagggcggtgtggnngaagactacntgcagctacatcctctccatcctcctcgactgcgcccgccagtccgtcctagttatcttcaccgaccccggccacaacctcagcgacgcgtttcagctgcgcttgaccaaggtacacaccctagttctgggatataacaacctctacggcatggaaattgatccaaaggccgaaaatgatgacttatctattgaaggaatggaaggatgccttctctaactgacgaatgctatttccggagatgatgaaactatgagttttgctgcattgctgaaactggtccagacaatggattactatcgggagatttttgatacgggttcaaccggtcatactttacg

SEQ ID NO: 100022 - DNA, 1383 bp, Oryza sativa
  Clone ID: PAT_MRT4530_97779C.1
ttatctatatagtgatgttgatctatctctggttctttctatgttagggacggtagaggtgccctttacctggtgaattgaatcctttgcttgcttatttctacgataaaaatttggtagtggccgagccttgaagctttcattttgggtttttcccttctctttacgtggtgtattggctttctgatgtgccgattgtgaggtaaaaccaaataacttttctttcaccctcgttacatgtgaggacctttgttcttccagttgggatgttctcgaggtaatttctggcacatctttgggaaatgcctctattggtggcttgacttggctcagtgcagaatcagtgtgtttcacaggcccagttgcagattccagctgactaatccttgcagcaattgtggtgccaagattttttgagctcgaggcagcattgcctgtttcgcacctaccaaagttctttgacttctgaaacgcttccaagatggaccgattttgagggaccgaacttgttgcctgctggtcgctttcgttgttaggaggtgagctgttctcctttgcagaatgcaggcgtgaccgtcttttcgccgatgaggtaggccctttgctaccagaggaaggagagctgaatttggccggtttctgaagcagagatggaagccgtcttctctttacagactcggcacttccctgattaacaatggaactctccttcaatggttgcttgtcgtctgcatcagcaggcacggaattgtcagcacaaggatcgggagtagcagcctcctgcttctccatcgcttgcaacacctctctcgattcaccagcatggacaccatcctgcttgtgatgcgcggctccatccgcatccactccgcaagaggagccaaccccaccatcggcgatgacatccagctcctccatctcttccaccggcccagcagcgacaacgcccgaaccaacgacgcagctcgtcgtctcctccgcggcgggctcgtccgtcatacacgaagaggaggaggagcgcgccgaggagacagcggcggcggcgtcctcgtcagggtcgacgtcactgccggtggcgtcggcgtcggcgtcggtcttgcgcttccgggcgtagtgcgcctcgaagaaggccttcttctgggcgacggagcccgggcgcgactggtgcgccgcctcctcgaggtagcggttgtgggcgaacgccgaccacttcccccactccagcggctcggcgaggaaccgcccgaacgacaccgactcccccagcgccgacatcatctccgccttccagctctggtggtcgggggcgaggatctccggctccggcgacagcgcgggctccggcggcggcggcggcggcgagaagtccaggtcggctcccat

SEQ ID NO: 100023 - DNA, 423 bp, Oryza sativa
  Clone ID: PAT_MRT4530_9777C.1
atggcggcggccggcacgggaggcgacgggaacggcgttccgacgacgcccgaccatggcggagccgcggccgagggccggcaagacttggggaaattattggagtggttagggagggaaataggcgaccggagcggcgagaataccacgccggagaggagaggaatggtggggctcaccggcgaccgagagataccacgttccggtgggtttccggcgatgaacaacggtgaccgaggtggctcgggatgcacggtgaaagggtggttgcggtggtggaatggggaaacggagcggaggccgggcggccggctgaaggcggtggcggcggcgcagcgcggcagcgacgggagcggcggtggcgggcggctggagatcgccggcgagcggcggcgaaggggatcggcgtggagagctcggtag

SEQ ID NO: 100024 - DNA, 3395 bp, Oryza sativa
  Clone ID: PAT_MRT4530_97780C.1
atgactactagaagaggaggacggggtttcatggcgtgtgaccacaagcgccaatttttgaaagccggtgttggtaacgtccttagagcatctatcgttctacacgccaatgctttgacaacgcctattatgattggaacaagctgcagagtgggtcgtatgggagtttttgataaaagagctacacagaagtttttaataagggtaaaacaagaaataggcaacctaattgatcacttcttgcagcagcagcaacaggaggaagaggaggtgctcgcaccttcgaatgagattagaaaaggatcgtgaggaaaaggagcgtcgaaagaaggagaaagctgaggcccacctatatactatcattaaggttgcaagggatgatgacttgaccactcaaatagggaaggacatatattttgatcttgttgatcatgataaggtcccaagtttccgcatccagaagcagatgcctttcactcaattcaaggaggaggttgcaaaagagtttggtattcctacccaatttcaaagatttcggctgtgggccaagcgacaaaaccatacataccggcctaaccgtccactgactcctcaagaagagacgcacacagttggacagctaaaagaagcagcaaataaggctcataacgcagaactaaaattgttcttggaggttgaacttggactggaccttaaacctcttcctctgcctgacaagaccagcgaagatatattgcttttcttcaaactctatgatcctgaaaaggaacaactgcggtatgttggtaggctctttgttaaggcttcgggaaaacctcaggacattctgccaaaactgaggaaaatggctggtttttcacaggatgaggaaattgaactttgtgaggaaatcaagtttgagcccaatgtaatgtgtgaatatattgacaataggcttctatttcgagcttgccagcttgaagatggtgacatcgtttgttttcaaaaatctccaaagccagatactgctgaccaatatagataccctgatgtcccatcctttctggtgtatatacggaaccggcaggtagtccattttcgttcattggagaagcccaaagaggatgatttttgtttagagatgtcgaaggctttcacgtatgatgaagtagtggaaaaggtggctcaaaaacttggtgttgatgacccaactaaaattcggcttacatcgcataactgttattctcaacaacctaaacctcaacctattaaatacagaggtgttgagcgtttgctggacatgctgattcactataaccagacttctgatattctttactatgaagtattggatataccactcccagaattacaagctctgaagacattaaaagttacatatcatcatggcacaaaagatgaggtgtcagttcacagtattaggttgccaaagaacagcactgtcggtgatgtgctaaatgatataaaatcaaaggttgagctgtctcatcctaatgctgagcttagactacttgaggttttctatcacaagatatacaagatttttgcaccgaatgaaaagatagaaaacatcaatgatcagtactggaccctgcgtgcagaggaggttccggaggaagagaaaaatcttggtccttttgatcgcttgattcatgtataccattttaccaaagacactcaaaatcagacgcaagttcagaactttggagaacctttctttatggttattcgtgaggatgaaaccctttcttctattaaagaacggatacagaaaaaactaaaagttccagatgaggatttctcaaagtggaaatttgcctacatatcacttggtcgcccagattattttgaggattcagacactgtagcttcaagatttcagcgaaacatgtatggagcttgggagcaatatcttggactggagcatccagacacggctcctagaaagacacacaacgctaatcagaaccgccattcatttgagagacctgtaaagatctataactagacttgagaaatttgagtgacgtgccgccatccaacaccaagcaagggcctgaaaagtgctggcttgaataaattgtgtaccataattgatggtaggacgggttgctcaggtttttcgatggagctagaaagcatgcatggtgtttcctgaggagacgttttttagtatctgaggcagtttctcatcttccgcaacttgccccagatatataaagttgtgcagagatgacccatcgtctttcatcagtagataaggcggtattttccagtagtcatacagttaaaatagctcaagttttcttcgttgatcacatggttctgcagttgtactaggactccgagctgtttatacctgttgccctgtaaattatccatgtacaagggtttttcttgctctgacggcagtcaacacggtattgtaattccagctataaatatattgttgcctcttatatacttttatctgattggcagttcgctaaaaaaaaaaataattagaaatgtcgaaggctttcaagtatgatgaagtagtggaaaaggtggctcaaaaacttggtgttgatgacccaactaaaattcggcttacatcgcataactgttattctcaacaacctaaacctcaacctattaaatacagaggtgttgagcgtttgctggacatgctgattcactataaccagacttctgatattctttactatgaagtattggatataccactcccagaattacaagctctgaagacattaaaagttacatatcatcatggcacaaaagatgaggtgtcagttcacagtattaggttgccaaagaacagcactgtcggtgatgtgctaaatgatataaaatcaaaggttgagctgtctcatcctaatgctgagcttagactacttgaggttttctatcacaagatatacaagatttttgcaccgaatgaaaagatagaaaacatcaatgatcagtactggaccctgcgtgcagaggaggttccggaggaagagaaaaatcttggtccttttgatcgcttgattcatgtataccattttaccaaagacactcaaaatcagacgcaagttcagaactttggagaacctttctttatggttattcgtgaggatgaaaccctttcttctattaaagaacggatacagaaaaaactaaaagttccagatgaggatttctcaaagtggaaatttgcctacatatcacttggtcgcccagattattttgaggattcagacactgtagcttcaagatttcagcgaaacatgtatggagcttgggagcaatatcttggactggagcatccagacacggctcctagaaagacacacaacgctaatcagaaccgccattcatttgagagacctgtaaagatctataactag

SEQ ID NO: 100025 - DNA, 273 bp, Oryza sativa
  Clone ID: PAT_MRT4530_97781C.1
atggcgacgagagctcggccattgctgctgtgcctgtgtctctgcttcgcttcttcgtgcttgagctcggccgttgatgctgctgcagctgccggcaatggctaccggacaacggcgttcctggtggacgacgaagggaggcggctccgtgccgagctcgtcgccggcggcggcggcgggaacacggcgtacggcggcgacgtgcagaggctagatgtgtatgccaggggagggtttccaacccctccaaaagaagtatggcgaggacagtag

SEQ ID NO: 100026 - DNA, 716 bp, Oryza sativa
  Clone ID: PAT_MRT4530_97782C.1
aacaaatcaacaaatcgagtggcacgggcggcacggtcgacggagaggcgaggcgcacagcggcggcgtccccggcatgccgccgcggcgtgggaggtgaggcgcggcggcgtgggagagaggagaaggaggcagccggggacgcattctgccgccaagaaccgccggccacccgcccggcgctcacctcgcccgcttcctcctcaacgcccgttcttgagccgccgccgccaagaaccgccggacgcacccgccgccaagaaccgctggacgcacccgccgccaagaaccgcccggcgctcacctcgcccgcttcctcctcgatgcccgttcttgagccgccgccgccacgcgcgtcgagcctttcgacgccgagctccgccgctcccgcctcggtctcctcaatccgccgcgtccccagcctccacaacaccgtggatctgtcgtcgcctcccctccaccgctcgcacgacgccgagctcgtcgcgtgccaccgcctcggccttctcgatccgccgccgcgtccccaacctccttcgccgccgccgccgccgcgaggagagggagaggggagaagctgccgacggggagaggggagaagccgccaccggagggaggaaggagccgcgggctgcgtgatgaggtaggagtttggggattgatttggtaaagtcgtgcactgtgggtccgactcgatgcttgcactgtgaacagag

SEQ ID NO: 100027 - DNA, 201 bp, Oryza sativa
  Clone ID: PAT_MRT4530_97783C.1
ggcaccggcaacaagttctactcaggttgtggacacgatgttaacatctctgaccactgcacctcaactcagccgttcccgctggcagccttcgcgatggagcaagaggtggcagtgcagcagaagatggtccaggaagccctcaacctcgacgttggacttggcaacgacgtcgtcgtcggcgaccgcgatgcagggtga

SEQ ID NO: 100028 - DNA, 216 bp, Oryza sativa
  Clone ID: PAT_MRT4530_97784C.1
atggccaatgttcttaaaagtttctttgggacacctggggtggaaccacatgaaaaacttgcacttaggaggtgcccaaggctcccatatgatgtgccggattttctgaagatcaatgctgtcgcaccttattggcactacttgtgtcttttgaaggaagatggcaacatcgtcagcatagagggaggtcccgagtcgaggcaggcgcccgtttag

SEQ ID NO: 100029 - DNA, 682 bp, Oryza sativa
  Clone ID: PAT_MRT4530_97785C.1
ctacactgtggagctcgtgtcctcgcaccgcccatgcttggcaacaaatcgacacaaatcgcggcagcaaacacggcagcaaatcggcaacaaatcaacaaatcgagtggcacgggcggcacggtcgacggagaggcgaggcgcacagcggcggcgtccccggcatgccgccgcggcgtgggaggtgaggcgcggcggcgtgggagagaggagaaggaggcagccggggacgcattccgccgccaagaaccgcccggcgctcacctcgcccgcttcctcctcgatgcccgttcttgagccgccgccgccacgcgcgtcgagcctttcgacgccgagctccgccgctcccgcctcggtctcctcaatccgccgcgtccccagcctccacaacaccgtggatctgtcgtcgcctcccctccaccgctcgcacgacgccgagctcgtcgcgtgccaccgcctcggcctgttagggactcttccgctcctcgccatgccgccgccgccgccgcgaggagagggagaggggagaagctgccgacggggagaggggagaagccgccaccggagggaggaaggagccggagagtgcgtgatgagggaggagtttggggattgatttggtaaagtcgtgcactgtgggtccgactcgatgcttgcactgtgaacagagggccttcatcct

SEQ ID NO: 100030 - DNA, 339 bp, Oryza sativa
  Clone ID: PAT_MRT4530_97786C.1
ggaaccaaaaccttttttttttcccttgggggtttcagggggggaatcatcactggccccaaaagccccataaaaacccggttgggaccccctctttgaagaaccctgcttttttgaccccccattgatgttccttttaacaacccccccggggttttttttgcccgaacgcttgccctttttatgcaacttggggccctgaaaaccttttttttttgaaccactttggccccttttattatccaatggttttgaatccttgttttttgacaagggcctccttgaaacccccccccctgaggggggggccccaggatcctcccttgggggggggggggg

SEQ ID NO: 100031 - DNA, 159 bp, Oryza sativa
  Clone ID: PAT_MRT4530_97787C.1
atgtcgaacaccggcaacgatatcaacactggagacaaggagaaggaggctcccgtcaacaccaacggaggcaatactacctcaaataccagcggagggccattctcatgggatagccttgctctgctcttacctacccttgaacccgatcttgagtag

SEQ ID NO: 100032 - DNA, 215 bp, Oryza sativa
  Clone ID: PAT_MRT4530_97788C.1
ggggaaatggaagcctcttcgcttgggaatagtatccacaccatttgwaggattactattcaattctgttcccgacataccatccaacraggrgttcttacaaatagscttaccaacctttttgccttbggaaataacctgbaktcskgamattaccagtgaggcaaagyycaghsacaagkgakgaggaactcavattgggagtttsacctttt

SEQ ID NO: 100033 - DNA, 228 bp, Oryza sativa
  Clone ID: PAT_MRT4530_97789C.1
atgaatctctcttctagtctagcttccgcttacactgaagcttccactcccatacgggcaagaagagctccttctctttttgccaaagccctttcttcttttccttgtgcaagtcaacttttccctggcacaccgcacagttcagctgtgacatcttgcacttgtaagatcacttgcttgcctttatgcttgagtttcagcattcctttactccattcaactgtgatt

SEQ ID NO: 100034 - DNA, 528 bp, Oryza sativa
  Clone ID: PAT_MRT4530_9778C.1
aagatgtgaagcctataccagaatccaccaagatagaggtggagcctttgccttcccctgtggccgttagtctaaaaccacctcctaagattgagcgcaaccagtcatttgatgacgatgatgatgacttttcaaacaagcctgttgcaaagaaaagtaattcagcatcagtaaaagcaacagtttattcagttgcagacctacagatggcaacagatagtttcaacatggacaatcttgttggagagggtacttttggacgtgtttacagggcacaattcagtgatggaaaggtactagctgtcaagaaactaaacagtactgtgttgccaagccaatctttagacgatgtctttgacttggtgtcaaacatttcaaagttgcaccatcccaatctcaatgagcttgtgggctattgcatggagcatggacagcacttgctagtttatgatttccacagaaatggttcgctgcatgatatgcttcacctcccagatgaatatagcaaaccactcagctggaattctc

SEQ ID NO: 100035 - DNA, 852 bp, Oryza sativa
  Clone ID: PAT_MRT4530_97790C.1
ttagcaccaaccgatgaaacgttccgaagtcccttaggtactcatagaaggttatgaggttctatgtggagtgcctctaaggcacgagatgttcctaatacatgttgtgcctaagaagtgaggcatgatgatcgttgaaaattccacaaacgacttgatcccacaacaaaccgtcataggatggaagatgtgtatagattacaaaaaactcaacaaggcaacttggaaggatcattttccgatgtccttcattgattgaatgttagagcggcttgcaaatcattccttcttctatttttttgatggttatcaaaggtgcatgttgtctatttgctctgacatgatcaagaaaatcatggaagttttcatggacgacttctcaatctatagaaaaacttttgatcattacctcaagaatttagataaggtcttgcaacgatgtcaagaaaaagtacacaacatcctaggacatgtagagtttgactagcgtttcattaaagatttttctcaagtggatagacccttgtcttgcctgttagctaaagatgttccctttgattttattaatgaatgcttaaaatcatttaaggttctgaaagaatctctcatcttagcatcaagcattcaatccttaattggtcgctgtcgtttgaaatcatgtgtgatgctaatgattgtgttgttagggccgttcttggccaaactacccatgcaatcgcatatgctagtaaaaccttgactggagctcaaataaactggactgacacatatatggagatcgaatcctgcatttttcttttccttggctattgggccttgatctctaatcggctccaaagctttttcccgtta

SEQ ID NO: 100036 - DNA, 445 bp, Oryza sativa
  Clone ID: PAT_MRT4530_97791C.1
gcgcttgtgcatcttattttactgtactgcccctacacggaggatggctgtagggagcattggagcttcaagacggggagaggccttatccctgatgagtatgcccaggacgactaccaccatctaaggccgtgcgactggatggaacactatgattgggaacacgtcgggtatactgcaaggcttaaggagctctgttctttacacacgaactgactctacatgagagctggctgcacagcctagattagctgactgaactgggattttgttggatgagggtgcacaagaaactgttgagctggcctgactaacttgataacttctcagcacttatgcacgatgctatggatgtgtaaccctgatactgaagtccttgtctacaatacccatatgatgacactgaactgagctggctgtagttatgagctacaagtggacgtga

SEQ ID NO: 100037 - DNA, 673 bp, Oryza sativa
  unsure (1)..(673): unsure at all n locations
  Clone ID: PAT_MRT4530_97792C.1
ctgtaaggctctgccttgtcctcgtcgaaagcgggaaatggacattggtctttgnaagtaaagcccatgtgagcagctcctcgccagcgaaatcaccagggcgcaggatgataaaaaaggggaagttgctggccctcccgttggttgtggagctctctagcttaccgcgtatgacgaagagcatctcattcacaggatcaccctcacgagaaatgtatgtgcgctcagggcacaggaaagacaccagacgctcgcagatggcgtctagaagttggtaatccatctccgagaaaaatgggacacgtcgaacaaggtccaaacaaagatggcgctgtacatcccggcgtatatcagcaggcaaagcttgtaagatggattcctcttctactcctcgtgttgcaagccatttaacctgaacgaatcgccggacacgatcttgaagttcatcagggagctgatgatgtctcatccactcctccatatctctttgccggagcctccactcttcaagccttttactgatggactgcaagtatgtctgcatattgccaatcagctgagcaaagagtacgagactaagagcaccaattgctatggcaaatgtgttctctgcgatgtatgcacttgtctgaagaggatttccactagaactgaaaaggagagcacatacagc

SEQ ID NO: 100038 - DNA, 1128 bp, Oryza sativa
  Clone ID: PAT_MRT4530_97793C.1
tcaattgccagcgaaatcaacccagatactatagtccggtctctctgtcccccagtattccattgttggtgttccgcatcctaattcataagaccaaatgttcgtaatacttgcatcaagggtatttgagtaggacgatgactttggtacaaaggccatttccccttcgcgagtgacaagatcaacatgaattgtctcaggccaattgtagaacctcgggaggaaaactttgttctccatccacttaaatttgggcttctttattatcgttgtcagcgacccagtgaacactacttgaccatgcaggctctccaccttctcccactccattgtttcctcattaagcttcaaaacatggaccgccttcccacggcgttcaatgagtacaaccatcaacccatattggctggaccggagcaagtagctatcttcacatttgaacccaaagccgtcaggcttgtcaagaatctcaaatccattgtcatgcctgcaaggatcatagaccagcaacctcccatcttgagctagaagatatagcaagccgttatggaggaccgggttggtgtccggtgatacccgaatacgtggcaagtcagggtgatattccgtcaacttccaatcctcccactcaccactgctgtttcggatagagctagcaaccttaatggtaagaatcgcctcgacaccaaatagcctctcatcaccgtcagagacaacaaaattgaataatgcatgaggttttggtggcaacacttcaacaagggcgccagtgacgaggtcaatatcaaacaccaaggactggtccacgcacatactcagatgtcgtccggtggagcaacagatcttcgcgccgggcaccttgagcagtccatcgacctcgaaattcttgtcgtagtaagggctatagtaccggatgttggcggtgccaacgccggcggtgctgaggaggagcggggtgatccacgctgggtagaaggacgacagcgacacggcggagcgccattgccggcacaccaatgcggcgtttgggtggctcgaccaccgcagactccccaggatccggacgagcacgtccgtcgggagagacgaccagccccggacccgcgacgtcgacgcgacggcctccat

SEQ ID NO: 100039 - DNA, 1419 bp, Oryza sativa
  Clone ID: PAT_MRT4530_97794C.1
atggcgaacaagccgtcgctcgccgtcgcggcggcgtcgcggcagaggtgggcgctggccacctcgctctgcgcgctcctctgcctctccctcgtcgtctccgccggcctcctcctcctcggctcgacgcgcccgttccgccggccgctcttcgcggcgccgcagcagcagcgggaggtggtcggggaggcgccgtgggagaggtacgtcaagctggcgcaagcggcgtcgccgggcggtgcccgtgatcgcgcgcctgatcttggcggggatgagggggcggagggggacgacgatgatgccatcagcaccgcaccggcgccggcgccttcgccggccgccgaggagggaggagatgaggagagctgcgacctgttccaggggcggtgggtgcgcgacggcgcggcggcggggggctacccgctgtacgaggcggcggagtgcccgttcctgagcgaccaggtgacgtgccggcggaacgggcggccggacgccgagtacgagcagtggcgatgggagccgcgagggtgcggcggcggcggcggcggcggcggcgggagtagggaggcggcgctggcgctagcgctggagcagtgccggaaccggagggtggtgttcgtcggcgactcgctgaaccgcaacatgtgggagtcgctcgcctgcctcctctacaccgccgtgcccgaccgctcgcggtcgcgcgtcctcgacgtcgcctccgactacaggatcttccgcgccatggactacaactgctcggtggagttcttctggagcccgttcctggtgacgctcgagacgaagcaggaccggacgagggcgctcaagcttgaccagctcccggctacgctggagaagctgcgcggcgccgacgtcctcgtcttcaacaccggccactggtggacccacaccggcaacctcagagcgtgggaccatctggaggcggacgggaagccggtcgagatgggaggcgaggaggcgttcaaccaggcacttgggacatgggcgagctgggtcgaccaaaacgtggactcggccaggaccagggtcttcttccgaagcatctccccagaacacaagagcgaaaactggtgctacaaccagacgtccccaatcacggacgagacgaagatcgtcccatggttcccgaggggcctggtgtccatcgtcgagaggaacatccggagcacgaggacgcccgtcacgtacctcaacatcacccgcctctccgagctccgggtcgacgcgcatccgtcggtgtacaccatcaccagggaagggaagcccctgagcacggagcagcggcaacagccgctggtgtacgctgactgtagccactggtgcttaccggggctgcctgatacctggaacctgctcttgcttgcctccttggcgaggtctccagttaatgtacactag

SEQ ID NO: 100040 - DNA, 286 bp, Oryza sativa
  Clone ID: PAT_MRT4530_97795C.1
gctgcaggaatcggcacgagggccgatagtatatatggcggagtagtagttgagtcgagttcgcgcatgcgccgccgtggcgacgacctagcttaaaccctatgctgcccatgcgtcccagggcgagtcaggcggcggcgccggagaccgccgccgccgcggagagcctccgcgaggaggagaccgaggacgggtgggtcttcctcgccggcaggtcaagggcgacgaggccgccgccgccgccgccttcgcccatggcgagggccgtggcgtccggcagcagcgg

SEQ ID NO: 100041 - DNA, 4872 bp, Oryza sativa
  Clone ID: PAT_MRT4530_97796C.1
atgtcggggcaggcgccgcagactaatcaggttggtggcagtggcgtcggtggcgctgacggactgccacagcagatgcaggacgtggtgggacttgggggccttgatacccagtttttgttaatgcgcaacactatgcgcgataggatattcgaatatataggaaggaagcaatcatcgactgattggcggcgacggctgccagaacttgctaaacggctcgaggagatcttgtatagaaaattcttaaacaaggccgattacctcaatatgatgaggggaccagttgagccacaattgcagtttgctattaagactttgagtgctcagaaccaacaaaatcaacaaaaccaacaaatgccaaggcaaatggcatcttcctctggctatggcacgatgattccaacaccgggcatcacacaaagtgcaactggaaattctagaatgccctatgtaactgacaacactggccttccgtcatctggtgcaaccatggttcctcagggtgccaacactggtacctcacttccaggttcaatgtctaacggttaccagcatctaactaccagtgttccattaaattcaaccacaagcagcatcccatctacgatgggtcctgtgggtattcagcggcaagtgactcatatgatccccactccaggatttaataatcaacagaatgtgcctgtgaatcctgatttttcaaatggagctggatatttcaatggtgagccaactgtgacatcacaaatgcaacagcagaagcaatttcctagcaaccaaaacagtcatcaaatccagcatattggggggcacagtaattctggaatgcattcaaacatgctggagaattcttctgcatatggtttatcagatggacatgtgaatggtggaatgggtgtacatgggtcaaacatgcagctaacaaacagaagtgctgcatcagaagcatacattaacatatccacatatggaaattcacctaagcctgtgcaacaacaattcaaccagcaccctccacagaggataccgacaccagttgatatatctggttctgggaatttttacaatactggttcttctgctttaacagcagcgaataatcatagcatgggtgctacaaatttgccatctagatcaagaatgaattccatgttgcacacaaatcagttaaacatgcaatccattcaaccgcaacctcagataaaaactgaggttttggatcagccagaaaagatgaattttcaatcttctcagttgactcacgaacaacttatccgccagcaacattcaatgcagcaacatcaaatgcagcctagttcccagtttgtgcaaaaccagtaccatctgaatcaacagcagcctaactcacagcatcagcagtctatactgagaagcaattcccttaaacagccccaactgagttccagccattctatgcaattgtcagaacaaggagctctgccacacactgagctgatatcttcacaagctactgaacacgctgacattccaatttaccagggtcaataccagcaaagaagtgctcatgataatgtcaaaggagggcaagtgtttggacatctttccagctctcaaaattttcattctaatgcgtcccatgattctcagcaattgttgccaactaatcagcagcttgatgacagttcaaatgatgtaagttatgtcttgaaaggatctcagccagagcagatgcatcaggctcaatggcggcctcagacaatggaaaaagctcctgtcactaatgattcgtctcttgagaagcaaatacaggcagatttgtgtcagagaacaatgtctcaggatggagcacaacagccattttcatctgattggcgccttcctggttgtactgtgactccagctgatcctgcattgccaaagctccctagtggaggacttgaacaggctgctggaaatatctattattttcgtcagatgaagtggttacttttgctatttcatgcaaaatcatgcttaactcctgtcggaagttgtaaattccatcgctgttttcagtgtcctgtatgcagtaatgcaaagaaacttctgcagcgttcagctgaactagcaagcaagcaaaagccccctgagcctagaaaaattgctcaacagaatacggctcaaagaatcatgaatggggtagagggtgacataatggacatcgacctagtgtcagatgaaatctttgatagtcagccttctgttccaaaacgcttaaagatgcagcctgtatcacccagtactgcagagcgtgaagtttctatgccctccaatgcagggcttatattgcaggaaacacattctgaactgcctgaccagaataacaaggtgggacaactgaaaatggatgtgaagattgacccacgaccactgcagaagcctgcaaagattggttatggtactgatggaaatgtgcccacagcgagacataatgtggcacctggaggctcaaatgagatcaagactcatgtcaagcaagaaatcatgccaattgacaaagagacaagtgagactgcccctgaagttaagaatgaagcaaatgattcaacagacatcacagtttctaaatcagggaaaccaaagataaaaggtgtctcaatgactgaattgttcaccccagaacaaattcaggaacatatcaatagtctaaggctgtgggttggtcagagtaaagctaaagctgaaaagaatcagttgatggggcataatgaaaatgagaattcatgccagctctgcaaagtggaaaaacttacttttgaacccccaccaatatattgctccccttgtggtgctcggataaagcgaaatgcaccatactataccgttggtactggtgatactcgccattttttctgtattccatgctacaatgagtcccgtggtgacactattgaggttgaagggcaaaactttttgaaggccagattcgagaaaaaaaggaatgacgaggaaactgaagaatggtgggttcagtgtgacaagtgtgaatgctggcagcaccagatatgtgctctatttaatggtagaaggaatgatggagggcaagcagagtacacctgcccaaattgttatgttgaagaggtgaaacgtgggttgcgtatgcctctaccacagagtgcagttcttggggcaaaagatctgcctagaactgtactaagcgatcatattgaagatcggctttttaaacggttgaagcaggagagacaggatagggcagctcaggagaggaaaagcattgaggaggttcctggagccgaaggtcttgtggttagagttgtttcatcagtggacaagaagctggaagtaaaaccacgttttttggaaatttttcaagaagataactacccgacagagttcccatacaagtccaaggctgtccttttgttccagaaaatagaaggtgtagaagtgtgcctatttggaatgtatgttcaagaatttggtgcagaatgctcctacccgaaccagcgtcgtgtttatttgtcatacctggattctgttaaatacttcaggcctgagattagaacggtgtctggagaggcgttacgtacatttgtttatcatgaaattctgataggatatcttgaatattgcaagcagcgtggattcacaagctgttacatatgggcgtgcccacctttaaaaggtgaagattacattttgtactgccatcctgagattcagaagactccaaaatccgacaaattgagggagtggtacttatctatgcttcgaaaagctaccaaggaggagattgttgttgagctgacaaatctatatgaccatttcttcattactatgggggagtgcaaggctaaagtgactgcttctcgtttgccttactttgatggagattattggccaggagctgcagaagatatgatcaatcaacttcgtcaagaagaagatgaccggaagcagcagaagaagggcaagacaaagaagattattacaaaaagagctcttaaagctgctggccacaccgatctcagtgggaatgcttccaaggatgctatgctgatgcacaagcttggggaaaccatttatccaatgaaggaagatttcattatggttcatttgcagtattcgtgtagtcactgttgtacccttatggtgtctggaaaacgttgggtttgccatcaatgcagaagcttttacatatgcgacaagtgttacgatgcagaacaacagcttgaagatagggagaggcacccaagtaacagtagagacacacatacgctccatccggttgacattgttgggttgcccaaagataccaaggatagagatgatattctggaaagtgaattttttgacaccaggcaggccttccttagtctctgtcaaggaaatcattatcagtacgatacccttcgccgtgctaagcactcatcgatgatggtgttgtaccatctacataatccaaccgcaccagcgtttgtcactacatgcaacgtctgctgtcatgatattgaaactggtcagggttggcggtgtgaagtctgtccagattttgatctaaggaagatgcttgatcttctggtacatgcctcgacatgccgctctggcagttgtcaatacccaaactgccggaaagtcaagggactgtttcgtcatgggatgcagtgcaaaacacgtgcttcaggagggtgtgttctttgcaagaaaatgtggtacatgctccagctccatgcccgagcttgcagggactcaggatgcaacgtgccgagatgcagggatctcaaggagcatcttcgaaggttgcaacagcaatctgattctaggaggagggctgctgtaaatgaaatgatgagacagagagcagcagaagttgctgcaaacgagtag

SEQ ID NO: 100042 - DNA, 573 bp, Oryza sativa
  Clone ID: PAT_MRT4530_97797C.1
gccctctttttttctttttttatttttttcttttttttcttttggtttttttttctttttcaactaaccagggttcgtttagttatcaatccgtacatcgaatgacaagcaggacctttctaaagttctgattacatatgggactcaaacatgcacaggactacaactgctcgggggagttcttctggagcccgttcctggggacgctcgaaacgaagcaggaccggacgagggcgctcaagcttgaccagctcccggttacgctggaaaagctgcgcggggccgacgtcctcgttttcaacaccggccactgggggacccacaccggcaacctcaaagcgtaagccactccgctccaaagcgtctcctttttggctctctttctttccagcagggcagggaagccgagggggttactgcaggggggaccatctggaggcggacgggaagccggtcgaaatgggaggcgaggaggcgttcaaccaggcacttgggacatgggcgagctgggtcgaccaaaacgtggactcggccaggaccagggtcttcttccgaagcatctccccaaaaaca

SEQ ID NO: 100043 - DNA, 420 bp, Oryza sativa
  Clone ID: PAT_MRT4530_97798C.1
atggcgaggccgatagacgacgacggatgccacggcgcgtcgcagggagccgcggccgtcggcacagcgcggcataagcgcggaaaagatggggccgtgtccgtgctcgagccgagcaccagtcgcgagctaagggagcttatcattagatcttgttcgagtcatcgtcgttcgtattggggattctctgccggtgaaaggcggcggggatggcgattgcggcgggcgcgaaggcggctgcggtggtccctacgcagcggcggcgcggtgctcggcggcggtctccctcagatctgcgcctcttggctggatctggagggtggccggcggtggtcgtcggcgacggcggctgacttgcgacggctggtgacggcagcgacagtggtggtcgcggcagttggcggcgacggcgtcggctga

SEQ ID NO: 100044 - DNA, 1238 bp, Oryza sativa
  Clone ID: PAT_MRT4530_97799C.1
cagatacatcgatcgatcgatcagagctttttctatcatcattagctagcaagatgaagcagtactacaaagcagcgctgcttcgctactgggtagtagtcccgttcctcctgtggctggtagccacggaggagcaactcgccgccggcgccgtggccggggcagctgccgagtcgtcgtcgacttggggcggccagggccagctgcagctgcctctctgggtgcgacccggagaccggcgcctcctggggatgtctgtggccggcatggcggtggatgccgtcgtggcggccgacggcaccggccagtacactaccatcaagcaagccgtgaaggcagcagaggcggacacgagcgggcgccggtacacaatccatgtgaaagctggcaagtacgtcgaagacgttgagatatggaggcctaatattaccatgataggcgacgggatcgggcgtaccataatcagcggcatgaagagcaaaaacaagaatcgggggacggcctgtacgggcacactgaacgtgcaaaaggacgggttcatcgcgcgagagcttacggtggagaacaccgcggggccgcaggcaatgcaggcggcggcggtggtggtgaagtcggatcgcgccgtcttcttcaggtgcgagataacgggttaccaggacacgctgctggcagatgtttacaggcagttctacagggaatgtgttatctccgggacaattgatttcgtgtggggcgaggcgacggccgtcttccagatgtgccacctcctggtgcgtcgcccgttggagggctcccacaacaccatcaccgcgcaagggcgcaaccactccgagcccgtcgtcgcacgctcgggtttcgtatttcaggagtgcaacgtgtcgaccaaggaggacctgaggggcgtggacacctacctgggccgcccctggcacccggactcccgcgtcatcttcatgtcgtcctacttggacggcaacgtggtcaatcccaagggatgggtggcgtggcgcatcaacaacgccaccgacgagcgctccaccgccagcaccgtctactacgcggagtacaacaacactggggctggggccaacgtcacccagcgtgttaactggcatggtttccaccttcttgcaccacacgaggtacgcaatttcaccgttgacagcttcatcgacggtggcagttggctgccagagaccaacgtcccgtaccatctcgatctcgatctcggtctgtaa

SEQ ID NO: 100045 - DNA, 760 bp, Oryza sativa
  unsure (1)..(760): unsure at all n locations
  Clone ID: PAT_MRT4530_9779C.1
ccacctttctctctctcgatctcgtgctctcctcctttcgcgagcgcgttctttggaggggagatggcggaggagccacagccagaggccgcgcccgccgcggtggcggcgacgaccgaggtggcggtggcggagaaggcgcccgtggaggcggagaaggagaagaaggtggaggatggagacgccggcggtggaggccgaggcgaaggaggagaagaaggattgaggcggcggccgcggcggcggcgggaggtgttgnggccggggcgtttgnggggcccggttcgttctnggnggngngcnncctggtggcgtgcttgccttgcccggcgnntttggcgctcgctgngttcttgctttttctcgtcgtcgttcttttctgttgtttgttgtttttgcttgcctttttctttttgtgtgggttggtgttggtgtttgtttttttgtttgcttttgtttgttttttttttttttttttttttttttttttttttttttttttttttttttttgtgtctctttgttttttttttttttgtttttttttttgtcgnttgtggttttttttttnctgtttttcgtgttgtttttgtgttttttttnttgtttctgttttttttttgttttttttttgttttgttttgtttttttgttttttnttttttgttttttttttttttgtttttttttttttttttttttttttgttttttttttttttgtttttttttttgttttgttttgtttttttttttttttt

SEQ ID NO: 100046 - DNA, 651 bp, Oryza sativa
  Clone ID: PAT_MRT4530_977C.1
atgtcgtccggtgactccggccgcaaagctgccgacgctctcaccaataatcggggtcatcatccatcatcacgggaaggaggaaaccggcacgtttaccttgttttgctcgatccatcgctcgcatcgcaagcaacaaaagctgacgctagctgggggcaggtcatgcgagagcgagcgatcgaggagttcaccgatggatgcatcgatcgaaaagctctctttgcgtcgctcgttcacgtacgtttgggaccccagctcggacgacccgaccccatcatcgccggtttgtcgtcacgtatccatcgtggtcgtggcccagagttggctttgctttgcctactttttgctcgtcgcaggcacagtttggtttggcgtgctacgagtactaaaccagatagattagcgtgtgagattacgcaagcagctaagcgtaacctttttgtgtgcaactgtttctacttccatttgtggcgtgtcggattagccttccactgggggaccgctagagatgccgtgtacgaagctgaatctatgactagatatcgaaagattgcttggatttggacgttgctgtactgcacgtctacttataactggcatggatgcaggcatgtttcatgcttgaacgcacctttggtcatccagccg

SEQ ID NO: 100047 - DNA, 474 bp, Oryza sativa
  Clone ID: PAT_MRT4530_97800C.1
atgctgcttgaagcagctgatgctgcagcctgccgtcgatgccgacactcgctgcagccgcgtgccgcggccgcgcgctgcaacctgacgccgcccgacggagccgccgcaagcgaggtagccgcgccgcagcctgacgccgcccgctgcagcgccatcggcatctccttcccctccagcgccgtcgcctcacccggcctcgccgccttctccgcctcctccgtcgccgtccgtcttccccgcccgcgtcgccttctccgcccccctccatcactgtccgcctcccccgccctcgccgcctccgtcgcctccttcgtcgccgtccgtctcccccggccgcgtcgccttctccgcgcccctccgtcgccgtccgtctccccagccctcaccgccttctccgctcccttcatcgccgtccgtcttctggcttatttatgctcaagtgtatggagcactggaatggggatcggctag

SEQ ID NO: 100048 - DNA, 942 bp, Oryza sativa
  Clone ID: PAT_MRT4530_97801C.1
gcgatggagctccttctccccaccgccgccgcctccgcgccgccgcccccgcccgcgttccccgccgacccgcacctcgtcgaccgcgcagcccggttctccgcgttcgcctccccttcgccgccctccccgccgcctcctcctccccctcccccttcctcctcctccaagcgcaagcccgaccccgcctccaaggggaaggcggctgcgaagaaggggaagacggcggcgagcggcgaggacggtggcgacggcggcgaggacgagaagccggcgtacgtgcacgtgagggcgagaagagggcaagccaccgacagccacagcctcgccgagcgggcgagacgcgagaagatcaatgcgaggatggagcttctcaaggagctggtccccggatgcactgtttctgttcggtccaaaggcacactaggagtccaacaaagagtaatgccaagcgttggtgtgcagcagcagcagcatgtggtagctccattctttatatccaaaactgaggtatcaggaacagcactggtactggatgagatcatcaatcatgtccaatctcttcaaaggcaagttgagtacttgtcaatgaggctcgcagctgtaaatccgagggtcgactttggtgggctagacaacttcttgactacggagtgtggaaggataacaggcttgaactacaagaatggaatggatttggagcaggtcacctggccagacatgggcgtccatggagcaaggaatctcatgcaactacaacagcagttctggcatggtgatttagcacacccgctccagccgccttcacagtgggaaaagcggacggataccaatccccctgtctttagcaattcaagttcctccctcttcggctatgatctagcaagctctgccttgattggaccacaacttttgtctctttcgttgttccagagtgtttag

SEQ ID NO: 100049 - DNA, 132 bp, Oryza sativa
  Clone ID: PAT_MRT4530_97802C.1
atgactctcaacggcttcaatggtgaaccaacggaggcgaaaggtatcttttcggtggagcttaccgtggttaaaaagacgttgccaaccgctttcttcatcgtcgatgtgcaagattttattggattttga

SEQ ID NO: 100050 - DNA, 186 bp, Oryza sativa
  Clone ID: PAT_MRT4530_97803C.1
atggcccgcgacagcgatgacgggcgggcccacgcgcagtggacaggagatgctggacgtgagctgagcccggtcgatcgtcctcgtgccacgcatgggttcagactttcagactccggccgcgacgtcgggatgggggcgtcgctgtggccgttgcagaagtggaggctgtcctccatccgctga

SEQ ID NO: 100051 - DNA, 1856 bp, Oryza sativa
  Clone ID: PAT_MRT4530_97804C.1
atgtcgccggccaccgccgccgccgacgacctccgcgccgaggaggaggggaagggggggaggagcagcagcaggcaagaggaggccaatgtcctcctcgccgtcgatgcggcggagggcggcggcgcgtggtcgccggtggggtggttcaggatgctggggagggagctgcactggagcttcgtggcgggcgtggtggcgacgtacggcgccagccaggggctcggcggcggcgtcatgcgggtggcgtcggactactactggaaggacgtgcagcgggtgcagccgtcggcggcgcaggtgtaccagggggtgacctccatcccgtggatggtcaagccgctctggggcctcctcaccgacgtcctccccatcgccggctaccgccgccgcccttacttcgtcatcgcaggcttcatgggagtagtcgcgatgcttgtattatctctccacagcaagcttcatgtattgttcgcgttgttggcattgatggccggaagtgctagtgtggcaatagccgatgtaactatagatgcctgtgttgctgaaaacagtatagtgcaccctcatcttgctgctgacatgataagcttaaacggattctgtgcatctgtgggagggcttattggattctcaataagtggtttccttgtccatgcaataggctctcaaattaatcttgtgtttctcaagggtgcccttggcatgttggcaataccttctgccctggtaatcctagctggaatgatgataaaggacgtccatatgcccaactttccatatgagctggcccatatgaagtttgtagaagcaagtagaacaatgatggcaaccttaaaatgtcctgaagtatggcgaccatgtgtttacatgtacatgtctcttgctttgagcgtggacattcaagaaggaatgttctattggtacacagatagaaatgcagggctatctttttcagagggattaattgggtttatcttcgcagttgggtcagttggttctcttattggggtcatactttaccaaaatattctgaaggaccattcttttcgcagcgttctctgtttaagtcagttgttgctgagcttgtcaggaatgcttgacctgatcttggtacttcgtctcaatctaaaactggggatacctgactactactttgctgtgatcgacgagggtgtctccaaaatgatcaaccgcataaaatggatgcctcttttggtacttagctcaaagctttgccctcctggcattgagggcacattctatgcgttgctcatgtccatcgacaatgttggcttgctatctggatcttgggcaggtggattgatccttcatgtgttgaacatcacaagaacagagttcaaaaacctctgggccgcgatcctaatccgaaatgcaatgaggttactacctttggccctgttgtttttggtgccgagaagtgaccagaactctaatctccttccagctgacttgctacctgaggatgatgctgcccaatatcaaatggacaatgttgagttaacctctcttacagtggatgggaaatcgagcaccggtagtttgcaccaagaatgcaaaaatcaggacgttgtcgaaaacgacgatgacgaggcttcactgcttgccaacaggagttgattggttatatacatggattcatttcaggacaagattgaaaatgatatatagaaaaggagaaaaccacaccattagttttacgtttttttgttgtttgtgttatattcattcattttatggcagcacattagatactcaacagttgtactcagaacattttcctttgacaaaatcgaaaatgcccgaaatttcgatctaaaaaaaaaaaaaaaaaa

SEQ ID NO: 100052 - DNA, 999 bp, Oryza sativa
  Clone ID: PAT_MRT4530_97806C.1
atgctctctcgtttcccctccccgcccggctttcccccgcactctcccgttctccccacgcgagcacaagcgtcgtcgctcgccatcgacctctggacgcacgccaccgccgctagggtcaccgccaagccacgccaccgccaccattgtctccgccacgccgagccacacctcggcatccgctccacctctccccgtatccctgccggaaccacctccgcaccgagcacccgagccacctccaccatcgccacctccagccacgccgcgccgcctctcatgtccacatcgcgctgcgtcgtcgccttccccagcaccgcagccaccgtgcgcagcccgtccacccctccctcctcgcgaaccatcgcgggagaccgcttccctccgtccaaggttcttccggccgctgtccgccagttcccgctcgcggaatgccgccatattgccgttgccgcgcctccccgaggagcctgccgccgctttcccatcgtcttctcgccgttgcgcgagcacggctgctcgccgtcgtcccgcgccgccagtggccgcgtgccgccgccgtaccatggctcgcctgggccagtgtcacattctgatttttgtttcaggccgcgtcgcgccgccgttgcagccgccgtcgtcggtcgccgtcgccaccatcgggttcgcaaggtcgtcgccgtccccgtctaccgcttcgccaccgccgaagaccgccggagcgccgttgccgccgtcgacccgaaggttgccgccgcttcttcctcgtcgccgccgccgtccgttggtcttccgccgacgttttggtcatcggtgagttcgccgcgccgtgatctacgtcttggtgccctccgtttgtgccgtagagccgccgttcgccggcgagcgtgcgccgtccgagccgccaccgccggtggtgacgtcatcgctgacgtcatcgtccccgtctcccgtgagccggtcgtggaccgttcgatctcagccgtccgttttggatag

SEQ ID NO: 100053 - DNA, 333 bp, Oryza sativa
  Clone ID: PAT_MRT4530_97807C.1
atgacgtcagcgatgacgtcaccaccggcggcggcggctcggacggcgcacgctcgccggcgaacggcggctctacggcacaaacggagagcaccaagacgtagagcgcgacgcggcgaactcaccggtgaccaaaacggcggcggaagaacaacggatgacgccggcgacgaggaagaagcggcggcggagatcgggtcgacgacggagacggcgctccggcggtcttcggcggtggcgaagcggtggacggggacggcgacgaccttgcgaacccgatggtggcgacggcgaccgacgacggcggctgcaacggctgcgcgacacggctga

SEQ ID NO: 100054 - DNA, 834 bp, Oryza sativa
  Clone ID: PAT_MRT4530_97808C.1
atggccacctgtggcggcggcgcgcacgaggcagccaacgaaggggagatagagggagagggaggggtgctcaccgtgctcgcgcaacggcgagaagacgatgggaaagcggcggcaggctcctcggggaggcgcggcaacggcaatatggcggcattccgcgagcgggaactggcggacagcggccggaagaacctggggaaggagacagggggtttagggagcgaggaggaggcacggcaccgagggaaatggcgcccggaagcggcaaggatcggcagagctcaccttggacggagggaagcggtctcccgcgatggttcgcgaggagggaggggtggacgggctgcgcacggtggctgcggtgctggggaaggcgacgacgcagcgcgatgtggacatgagaggcggcgcggcgtggctggaggtggcgatggtggaggtggctcgggtgctcggtgcggaggtggttccggcagggatacggggagaggtggagcggatgccgaggtgtggctcggcgtggcggagacaatggtggcggtggcgtggcttggcggtgaccctagcggcggtggcgtgcgtccagaggtcgatggcgagcgacgacgcttgtgctcgcgtggggagaacgggagagtgcgggggaaagccgggcggggaggggaaacgagagagcatggtcgggggatgcttttcatgggcgcaagagtgtggaatcgaggtcgggtgagacggaatcggccgacgacgtggggtggtgatgtgcagcatgaggggttcaaaccgacgccgaccttttggacaaaagtggggcaggaagtggagaagtag

SEQ ID NO: 100055 - DNA, 1687 bp, Oryza sativa
  Clone ID: PAT_MRT4530_97809C.1
atctgccatcgcgcaaaaaaaaagaaaagaaaaggcaaccccgggcatggttgcccaccgctccgctgtggctcgcgcttttctcaacgcgggcgtgagaggaccggacttccaaggaagactgcttggacctcgccctccttttccatccctgggccccatgtcctcccccacgcgagagcttccaggcattgcctctaccaccaccaccacctcctccaccaattaaacctccattgccaccagaagctgatagtgatgagtttctctctagcagaagcccttgaagaaataacaggattgtccctccagaaccaccaccaatccctcctccaattaatcccccaccagcagtgttatcagttgactcagaggaaccactgccactccctagctcacacggaagatcagcactgccatattgtggacctccttcacttctcatcccattgtaaatccctatgccaccccggcccccatgcccagcaccaccaccagctccaccaccaccacctccaccccatccattaccaccagcagcacttatcgtaccatttccacctccagacccgccgcctcctttgagactgcccacaccaccttcagcaagtacatcgccgtcgacattcatgaactcacttgccctgagcatgacacggcctccaccatctcccccaaaacctcgacctcgccgtgtggctcccgcacgggaactccccccgcaccgctccgccatcgaaggagcgacctccggctccgcctccaccgccaccctcgtcagcgaggaccagccccgacgcgggggacgcgccaaccaaccccgccaccgccgcggcgaccacgagcaccaccacccacaatcccacccgcctcatctccgccaccaccgcgtaccacttctcccccttcaccgccaccatgcgctccccgatccgacctcttctcctcctcctccccaccatcctctccgccctcgatctcaccgccgccgccgccgccgacatgtgctccgccacggagatgctcaccgccacggagaggggcgccttcctcgacggcgtcgacgtgctctccatctccgcctccgacaacaagcagaagcccttctacgacgacctcatcgccgtcgggagcttctccgccgtcatggcgggcgtcttcttcagcaccagcgccgggaacgccggcccgaccgccgagacagtcaccaactgcgcgcccgctgccctcgccgcctccggactcgtggaacgcgcgcgccgcgcccgccgcggcgtccatcgcggcgaggggaaccccgtgccccgtcacctggaagaacccccactccgccgccgcccgccggacggcgtcgaccacggccgccgcctccgctgccaccgaccatgtccccaccatcatcctcaacaccgcggagtccaccaagcggcaggtcaacgggatctcctcctcccggcctccctcctcccgcacgggatccggcttccctcccctccccttccttccctccctcgccaccctagccgctaggctatccacacatcaaattaatccctccgctgccactcgccgtcgccggagaaccctagctacctcccctcctcggccgcaacccctttctccctctatctgaaaatcaccatcttattgtaattttttcaggatcctgaacaatcgatcatctgcc

SEQ ID NO: 100056 - DNA, 342 bp, Oryza sativa
  Clone ID: PAT_MRT4530_9780C.1
atggcggcggccggcacgggaggcgacgggaacggcgttccgacgacgcccgaccatggcggagccgcggccgagggccggcaagacctggggaaattattggagcggttagggagggaaataggcgaccggagcggcgagaataccacgccggagaggaatggtggggctcaccggcgaccgagagataccacgttccggtgggtttccggcgatgaacaacgcggccggctgaaggcggtggtggcggcgcagcgcggcagcgacgggagcggcggtggcgggcggctggagatcgccggcgagcggcggcgatgcggatcggcgtggagagctcggtag

SEQ ID NO: 100057 - DNA, 4168 bp, Oryza sativa
  Clone ID: PAT_MRT4530_97810C.1
atgaggcgggtgggattgtgggtggtggtgctcgtggtcgccgcggcggtggcggggttggttggcgcgtcccccgcgtcggggctggtcctcgctgacgagggtggcggtggaggcggagccggaggtcgctccttcgatggcggagcggtgcggggggagttcccgtgcgggagccacacggcgaggtcgaggtcgtgcgaggagatgaacgggtccgggtcgttcgacaccacctgcgtcatcggctccagctcctcgctggacggcgacctctgcgtgtacggcgacgggagcgtggtgatttcgccccatgtgaagatcatctgccccgtcgccggctgctacatcgccatcaatgtctccgggagcatcaccatcggcgagcacgtggatttgattgcgggctccgttagtctctacgcgacaaacgtgtcgctggatcaacgctccactgtcaacaccaccgggcttgccggagagccccctccgcagacgagtgggacgcctcatagccttgaaggtgccggaggggggcacggtgggcgtggcgcgtcgtgtaaggtctccaatgacaccaactggggaggtgatgtgtatgcttggtccacgttggcgtggccatggagttacggcagcaagggtggtagcatggctgctgatcatcagtttgggggagatggtggaggccgtgtcatgctcagggcaagtgagttcatgaatgtcgacggcgatgtacttgctgaaggtggtgtgggcagtctcaaaggaggcggcgggtctggaggaagcattatgatatatgctttcaagctatatggaaatggtacgataagtgctgctggtggtaatggatggggtggaggtggtggtgggaggatatctctggactgttacagcattcagcaagatctggagattacagttcatggtggacaaagttttgggtgccctcagaatgcaggtgcagcaggtacaatatatgaaagttctttgcagactctaaaggtcagcaatgggaactacaccacacatacagaaactccattgctgggtttcccgatgactagactttggtccaatgtgcttgtggagtgtaatgctaaagtcttggtcccattgctgtggtccagagtacaggtcacaggccaaattagactacttagcaagggtagcatcagctttgggttgtctgaaaatccaatatcagaatttgagctggttgcagaagagcttttaatgagtgactcagttataaaggtctatggtgctttcagaatgtatgtgaaagtgctcttgatgtgggattctgagattcagatagatggtgggggtaaggatgttgttcttgcatctatgcttgaggccagaaaccttgttgtactcaggcatgggtcagtcatatcttcgaatgctgctttgggagtctatgggcaaggacttcttaacttgactggccctggtgatggaataaaagcacgccgactttttctctctctgttttacaacattgaagttggtcctggttcatttgttcaggcaccactagatgatgctgttcaaagcagcttggatgccctttcacgctgtgaaagtaaaacttgccccagtgagctaatcacacctcctgatgattgccatgttaacaactctctatcattcacactacaaatttgccgtgttgaagacataactgtcagtggcatagtcagggggattataattcacattcatcgagcaagaactgtcactgttacaaataatggcacaataagtgcttcagagttaggttgcaaggaaggcattgggaaagggaagtttctcaaatatggagctggtggtggtgctgggcatgggggccggggtggcatagggatttacaatgggatgagaagtgaaggaggtccacaatatggcagtgctgatcttccgtgtgagctagggagtggcagtggttcctctgagtcaactgataacactgctggtgggggattaattgttgttggatccatgaaatggccactatcaaaattgctaatttatggctccttgagctctgatggtgaaagccatagaggcactaaaaaaaattcgaatgggacatataaaggagggattggtggtggttctggagggacaatcctgttatttcttcaagggcttctgctagagagaaactcatcactatcagcttctggtggcaatggaggtttaattggtggaggaggtggtggtggtggtagaatccatttccattggtcaaatattgctactggggatgagtatgttcagattgcttctgtcaacggcttagtagcatcaagtggaggatctggtaatgatgatggacattttggagaaactggaacagtaacaggaaaaaagtgtcctgttggactatatggaacattttgcaccgaatgcccaatcggtacatacaaaaatgttgttgggtccgattcatctctgtgtatgccttgttctctggatagtcttcctaaccgcgctgacttcatatatgtaagaggtggtgttaccgagccgtcctgcccatataagtgcatatcttctaagtacaagatgccaaactgttacacaccacttgaggaacttatttatacttttggtggtccttggtcttttgcaattatcctatcttttaccattattcttttggcacttgtcttaagtgctctcagagtcaagattggtgagagtgacatcacataccggtcaacaaatgcaatccacaatgatggctgtgcttctttcccctttttgctttcattggctgaggtacctggggctagcagggcagaagaaacacaaagccatgcccacagaatgtacttcatgggacctaacaccttccgggaaccttggcaccttccttactcaccccctgatgctataatcggaatcgtatcacgagcactctataaaggcttgaaggttggttctacaccagacttgatggtcgcgtacattgatttctttctcgggggtgatgagaaacgacttgatgttacatccacaatccagaagaggtttcccatgtgcttaatttttggtggtgatggaagctatatgtctccatactacctacacagtgatacattgttatctaaccttcttggccagtatgtgtcaactgcgatctggaacagattggttgcgggcttgaatgctcagttgaggacagtacggcaagggaacatccgatcaactttgggacctgttgtttcttggattaatagtcatggaaatccccaacttgagcggcatggtgttcgagtggagttaggatggttccaagccactgcttcttgttattatcagctaggtattgttgttgctgtcaatgagcacttctataagagtcttcatcagcatgatcatgtctcagaattcatcgatcgctcaaggaagaacatcagttccaagaagctaaatcaagatcagccttgcacaagctatgctgtttctagaaagcgtttgacaggtggagtgaatggtgggataatcaatgagggtacactaaaatcactggaatgtaaaagagattatcttttccctttctcattgctattgcaaaattgtaggcccattggttatgcgtactattggatatctgttggagcattccttgctgtacttcttattcctccccttgctttgctgtctccctttcttgctggtctcaatgcacttttcagccgaggaccaaagagatcttccgtgacccgtatttttgcactttggaatactacttctgtcataaacattattgtagcaatcatttatggagctttgtactctgggctgtcttctttatcagtgtcttccgttcctcatgcactaaacactaaaagctttaagagtagggaagacaatgaatggtggatactgcctattatcctctttgttgtcaaatcattgcaagctggattcgtcaattggcatttagcaaatctggagatacaagattattcgctctttagccctgaccctgatagattctgggcaatgtaatcacttataggcttagaagggcactgaaatgcttggtgctgacaagccaccttttatctcatggttggtcagccacattctgaatttgagaggcagcctagtgatctaaacctgcaacttttcctccaatttctag

SEQ ID NO: 100058 - DNA, 390 bp, Oryza sativa
  Clone ID: PAT_MRT4530_97811C.1
atgagacagagacgggagcgggagtgggagcgggacggacctacgattggcgttggtgagcttaagacgagcacacgtactattaaagcgagaggtgcatctaaagcgagcatgcacggggtgagcatgattgacacgagcgtggaagatgatggtgtaaagataaagcataaccgctatcaagagtgcgggaggaggcaccacgtggaagacggtggcgaggggtacacccctggtttggccgaaccagggactccaccattcactaccgaccttgtcctgaggctgacatgtgggcccttcgattgagcgcgcatagatgggcttagggcgagcgtggacgtacggttgcgtgtgcgtgagctcgaggcgagcatgaccaacagctag

SEQ ID NO: 100059 - DNA, 208 bp, Oryza sativa
  Clone ID: PAT_MRT4530_97812C.1
aaacattggggtgaaaacaaatagtttttttaatgaatttaagttaataaaatggttgggttgttaataatgtgtcttcagcatgcttaacgatattatgatggtccccataatatttttttttataatgaacttgtttaaaacctttgtctctaacattatatgagcagaatcacaattttcttgattaattgaaatgctttttttt

SEQ ID NO: 100060 - DNA, 342 bp, Oryza sativa
  Clone ID: PAT_MRT4530_97813C.1
atggccatgacgacccgcaccctcctcctcgccgccgtctgcgccgccgccgccttgccccgaggctggagcccgataaagaacatcgacgacccgcacatccaggagctcggcaggtgggcgatcacggagaacaaccgggtgtcgccgagcgacgagctcacgttccacagggtcaccggcggcgagcagcaggtggtgtccggcatgaactaccgcctcgaaatcgaggcggcgagcggcggcggcgacgtcaccggcagctacggcgcggtggtgttcgagcaggagtggagcaacacgcgcaagctcatctccttcgacaagaaccacaacttctga

SEQ ID NO: 100061 - DNA, 206 bp, Oryza sativa
  Clone ID: PAT_MRT4530_97814C.1
tggggcagcccgagcagcaacggtgccagctccgaatcaatgtcggcctcgacctcatgctcgagctcctctgcctctccgtcgcctccctctccccttctgatttcctccgtcgcgcatccctcctcctcgtccggccgccacgcctctcctcctccagccgccgcggcgcagaatggggtggacagggcaaggtggcactcgag

SEQ ID NO: 100062 - DNA, 383 bp, Oryza sativa
  unsure (1)..(383): unsure at all n locations
  Clone ID: PAT_MRT4530_97815C.1
tagtctgctatgagaaaatctttttttctgcatgatcagggttgatttgatgcgcattgctacccagtgtttcgatctaggaagggtttttgtagggtgttgacaatttaggtgttcaggatttgacttggatcgttgacaatgttcggttatgtctagcatctctgattttcttcatgctggcttgcgagctcgttgatatcaatgatttctggtgttcttttactgttactttctggttcaagtgctggtggttgaagaagatttatggtgttctttactttgttactctctgcttctaatgctagtggatggagtgaattacttaatttgtagtaaggagctatgattttntttctgcactgtcattttttcctgattaa

SEQ ID NO: 100063 - DNA, 291 bp, Oryza sativa
  Clone ID: PAT_MRT4530_97816C.1
ggagagagagagagaactagtctcgagtttttttctattttttttcgagaatgatacggatatatatatacccgcgtagtctgtaggacgtacggtaggagtacgtgccatagctagctgcatatgctaccctagacgacctgccagattccatgagaacacagctgctaagcatgctagccactcacatgcatcgccaactcttcgccgcgagcgcatggcatggcggcgtgacctgatgcgtgtgcatgcatgcgtgatcgtcgagctcacttgggagcggaggggccc

SEQ ID NO: 100064 - DNA, 549 bp, Oryza sativa
  Clone ID: PAT_MRT4530_97817C.1
gtgggatgggtgccaattcaacccctccctgaatctcttcagttacaccttctggagctataccctgtcttggagactatacaaaagtacctctggcctcgtctgtgtaaacttgatcaacaaacactgtatgagttacattatcagatgattacttttggaaaggtgttctgtaccaaaagcacgccgaattgcaatgcatgtccaatgaggagtgaatgcaggcattttgcaagtgcctttgcaagtgcaagacttgcacttccttctcctcaggacaaaaggttggtgaatctgagcaatcaatttgctttccataatggcacaatgcccacaccaaattcaactcctctgcctcagctcgaggggagtatccatgcaagggatgttcatgctaacaacacaaatccaataattgaggagccagcaagtccaagagaggaagaatgccgagaacttttagagaatgatattgaagattttgatgaagatactgatgaaatcccaacaataaaacttaacatggaagctttttctcaaaacttggaa

SEQ ID NO: 100065 - DNA, 1429 bp, Oryza sativa
  Clone ID: PAT_MRT4530_97818C.1
attgacgtcttcgcacaggcacccagccatgctgaagttggagccggagttccccggcctgccgcagcggtgcgactcgtgccggtcggcgccgtgcgcgttctattgcctcgccgattcggcggcgctctgtgccacgtgcgacgctgacgtgcactccgtcaacccgctggcacgccgccaccgccgcgtaccaatgggcgtggtggctgcccccggcgccgggggagccttcgtcgtccgccctgcaggcggtgtcaactcctcctggccaatccgagagggcaggaggtgcgactacgacgatgacgacgccgacgccgctggggaggaagacgaagaggcgacgtcgtggcttctgttcgacccgctcaaggactcctcggatcaggggctgccgccgttcggcgacgcgctggtggccgacttcctcaacctcggcgggggcgccggggagaaggaggacgcgtcgtcgagcaaggactgcagcagcagccacgggaagagcagcgagggcagccacgagttcgccgtgcccggcgagcccgtaccggagcgccagggcttcggggcggtgagtatggacattaccgactacgacgcctccaatttcaggcgcgggtacagctttggcgcatcgctcggccacagcgtttcgatgtcatcgctggagaacatgagcacggtcccagactgcggtgtgccagacatcaccacctcctacttgaggtcatccaagagcaccatcgacctcttcacggcagcagctggctcccctgtggcggcgcacagcataatgtcgccaccgcagttcatgggcgccattgacagggaggccagggtgcaccggtacagggagaagaggaagacgaggcggttcgagaagaccatcaggtacgcgtcgcggaaggcgtatgccgagacccggccgaggatcaagggacgcttcgccaagcgcagcgacaccgaccttgaggtcgaccagtacttctccaccaccgccgactccagctgcggcgtcgtgcccacgttctagcgagcagcttggccgcacgcctggaagacaatcaaagaagctcaggaatgaatatattctcccactgtatagtacatcttggttgcttagctatatatatatatatatatatatatatatatgtataattcgccgaatcgcctctaaatttgtgggaggtatgaggcttcagctgtaggtatatatagatgctagaaagatgctccttgtaaaattgtgcaggagtaaatgtaatcatgtagtcatccctccttctccaatcctttacaatacatttctgtttttttattcagcttaaaaactacgttttgttttttctcccgataacgctattgatctgatggtaaattttgatcaataataattctcgttcagaaaaaaaaaaaaaaaaaa

SEQ ID NO: 100066 - DNA, 1377 bp, Oryza sativa
  Clone ID: PAT_MRT4530_97819C.1
atggcaacaggacaatgcatgcaagcccttcccatggaagtatggaacagttggttacttgagaaggctgttcttccagcactggatgttgcacctcctgtaaaaataggagggcctcggcgtacgagcgtgctgcgcaatccaaacatggagaagcttcagaaggggtacttattcccagagattagcatcaaacgtgaggaacacctgaagaagtacccagatgcgaaggtgataagtttgggtatcggcgacacaactgaacccataccaagcatcgtaacatcagctatggctgaggatgttccatttccattttgtagatatgctcttgcattgtcaactcctgaaggataccaaggttatggaccagaacaaggccacaagaatctgaggaaggaaattgctgacaaggtgtaccctgacatggggataaaagagagtgaagttttcatttcagacggagcacagtgtgacattgctcgtcttcagacgctgttcggtccaaacgtcaccattgccgtccaagatcccacatttccggggtacgtggacaatggcgtgatcatggggcagaccggcaaggcggacgacggcggcaggtacgccggcatcgagtacatgcggtgcgcgccggagaacgccttcttcccggacctgtcgcgggtgcggcggaccgacgtgatcttcttctgctcgcccaacaatccgacggggcacgcggcgtcgagggagcagctccggcagctggtggagctcgcgcggcggaacggctccatcatcgtcttcgactccgcctactcgtcctacatctcctcctcctcgtcgtcctccacgccgaggtccatctacgagatccccggcgcgagggaggtggcgatcgaggtgtcgtccttctccaagttcgccgggttcacgggcgtccggctggggtgggctgtggtgcccgacgagctgctctactccgacggggtccccgtggcgcgggacttcgaccgcgtggtgtgcacgtgcttcaacggcgcgtcgggcatcgcgcaggcgggcggggtggcgtgcctgtcgacggaggaaggccgcggcgcagtggcgcgggtggtcggggtgtacagggagaacgcgcgggtgctggtggagacgttcaggtcgctggggaaggaggtgcacggcggcggcgacgcgccgtacgtgtgggtgaggttcccggggcggcggtcgtgggacgtgttcgcggagatcctggagaagacgcacgtcatcaccgtgcctggcagcgggttcggccccggcggcgagggcttcatcagggtcagcgccttcaacagcagggacaaggtcctcgaagcgtgccaacgcctcaaaagcttcctcgcatga

SEQ ID NO: 100067 - DNA, 1471 bp, Oryza sativa
  Clone ID: PAT_MRT4530_9781C.1
atggtggacaagaatgaccggtctgacactgatcgcatcagcaacgggcagccacgatctcacgttgcgcctgtctccgccgggagtggaggggctacaaaggcagagcgcgtcgttgccgacattgagaccacagacgactggcacaccccactcatcaaattcataggcagcgaagagttgcccgaggacgacgcaaaagcagagaaaatatcccgtaaagcaaaagtctactgtatgataggcaacgatctatacaagaaggcgccaaacggggccgacaggtgggacccgtggaccccacctgtcatccccaacctccggccagctccaaccgccgcccacgccggccactccctccgccgatcccgcacctcccctcgtcccaaccggcgtggacccgagaccccttccacctcgcgaccacatcccgccccactccccctctctccccgcgggaatcaacgccacgccgagccggcacacccccacgacgccggcccactttccctcgaaatccggcgctccccggccctctcctcgcccccttgagctataaaatcaatccccgtggactcctcttcctttttccccgttttcccgagtcccccacgctctctaccgagctctccacgccgatccccttcgccgccgctcgccggcgatctccagccgcccgccaccgccgctcccgtcgctgccgcgctgcgccgccgccaccaatagcatcacagcgcctcgccgcaccccggcatccactccatctccctcctccaccgccggaaccaccttcccatcacgaggccgagccactaccgccacacaccgccttcagccggccgctgccgccgcgttagtcgtcgccgcacctcgccgcttgcgccgtcggcaacgccgtgccaagatctaccccggcctccgctccgtttccccattccaccaccgcaaccacccttccaccgtgcatcccgagccacctccaccatacgccgcctccagcccgccgtgcagcacctcggtcaccattgttcatcgccggaaacccaccggaacgtggtatctctcggtcgccggtcttgctggccctcggccgcggctccgccatggtcgggcgtcgtcggaacgccgttcccgtcgcctcccgtgccggccgccgccatcctttccgccgccggtcgcctccccatggtcgtcccgtcgccggcgctcctcggtgaggaccccctccgtctcctctcccttttccctcttttcgccgcctcccgcgcgtgccttcgcgccggtggtcgtcgccggcgaccatcgggccgtgcgccgtcgctcccggccggccgaccgccgtccgtcgtggccgccacgtgtctgccacgtggtgcgcccgcggaccagcgcgtgcgtggactcggtccacggtgcgcccgccacccgtgagtcaccgacaggtggtactcgtagcaaattgctggctcgt

SEQ ID NO: 100068 - DNA, 411 bp, Oryza sativa
  Clone ID: PAT_MRT4530_97820C.1
tcagtcgctgagccagccggcgtcattgcctcctcttccggcgttcccgtacccccctctaccattccctccgttctgcacccagccactgccgtcttcatcttcggctccgccggcagtcagtgcaacgacggacacaccgggttcaacgggcaagaaggcaactccaagtttgggactggcggctggctctgcagcgacgtgcaagccatcctcgagctcgagagcaggacgccggcaccgtgtgacaacaacccttgctccttcccctgcccctggacctgcccctgccgcctttcccctcttcttcttcccgccatccctagccactctggacggggtataggtcaggaggagcagcacaaggccactacggagctcgatctgcatgaacttggggtagtcgtccat

SEQ ID NO: 100069 - DNA, 600 bp, Oryza sativa
  Clone ID: PAT_MRT4530_97821C.1
cccacgcgtccgaccctccttaactcattcctcctactcctaactgcaagctactgctcaccctctcccggtctccctcctctcctcctcgacctcgcgcgcgagctcatggcctcgagctcaaacccggacaccatggacacggaccctcccggcggcggcggcaccctctccatcgccgtggagcgcaacccgccggagtcgcgcctgctccagctaggcgtcaagtcctggcccaagtggggttgcccgacggggaagttcccggtgaagttcgacgcgcgggagacgtgctacctggtgaaggggaaggtgagggcgcacatcaagggctcgtcggagtgcgtggagttcggcgccggcgacctcgtcgtcttccccaaggggctaagctgcacctgggacgtcctcgccgccgtcgacaagtactacaagttcgattcatcttgacgtctgtctcgtcgtcgatcgatctctctccctcgccgaattcggtgactaattcgcttcctgattagttcggtgactgcgcttagcctcattctgtagctaatttgctgctagataattaagcccgtgcctaatgtgataatgtctctt

SEQ ID NO: 100070 - DNA, 500 bp, Oryza sativa
  Clone ID: PAT_MRT4530_97822C.1
cgggggggggggggtgcttatcgtattgaatgagaggcgacgggaaaatctttaatatggatcccccgggcggcccgaattcagacgaggggtttggtgaggccatcatatcatggtatggaggaaggtgtttgcttccatttatgatgctctgcctcatccttatttgatatccacttgtgcaaaggttctttcgtggagtcaaatttgaatcctttttgcaaattctacatgcctaaaccagtaaaccgggaatagttaagtgctccttcaggacattgtcgcattgccattcagtccttggcggctcttcagcctttcacattctcgtgaagagctgcctcatttattttctcacataaccaacactccctggtctcgggcggtgggaccgaattttgggaaatgaaaggaaaaccattcggggttcttccctccccctaactagaaattagtggaactctggggcccggaaaatttggctcctggggccctctcca

SEQ ID NO: 100071 - DNA, 190 bp, Oryza sativa
  Clone ID: PAT_MRT4530_97823C.1
tttattctgacgatactatgtacttcccctccggggggtattattgacgacgaccgcgacaagctacatatccttcgtgctgaacgcgtggagtcgtggagaggagattctgtcaacgctactaggagtggacagttgtatatgggaggtgagtatccatttaattttacacctaactatcatttaatat

SEQ ID NO: 100072 - DNA, 628 bp, Oryza sativa
  Clone ID: PAT_MRT4530_97824C.1
atgtgcatcatctggaacaacatgcaaaaagaaaaagaaaaaaaatcaaatctagctgaaggcggagcaaggtcgacggtggcggatccggcctccccgctgcccagcggcggcggatcccgccaccccacggcctggcggcggcggatccgccctccccgcgggctgccgcccgctcctgagcgccgccgcgcccgcgcccgagctcgccgcgccacctcccgccaccgtcgcccacccgcctaccgtcgccgccgcgcacccgcctcgcgtcgtcgtcggtggagaagagagggaggagagagggagagaagggaggggagctggagagagggggcgggtgggtggtggactggtggtggtgaccgcctgcgctacgtcaacggcaaacaaggaagagcaagaagaagaagaagaagaagagaaaaaggaaagcagcgacggccgtgcctgtggaagccgcaacgacgacgccgagctcgcccaccaagcaatgcccgaacctccgagcagctcgcattttggtccgcaccggctgcatgctcggtcacgccatcccgcacatgaaggctttaggttacattgttcaacgagagtaggaggtggtggaggtgacctgatatgaata

SEQ ID NO: 100073 - DNA, 498 bp, Oryza sativa
  Clone ID: PAT_MRT4530_97825C.1
atgccacctctaccttgccgttaccgctttcttcctcgatcgtcgtatccaccacaccgtgcaccatccccttctcttcctcgtagatctagatgccccaccgcacagccgtaccctaccgccaccatccttgctcgccgtggagcccggtccctcgctctggtggtggtgaggcaaaggagggggaggatggcagcggctagggttgccctatcctcccatgtcatccacgaggggaggggagcgatacaggctcggaccggcggtaagcggcgaaggatgaaagagaaaccacatgggcgaaggccacaaggcgaaagccgaagacttggagtacgccagcttcgccgagcgaagacctcgttagagggccgcaaggatggagatggtgaggcgaaggcctcggcgtcaaggcacgggttttgccaaaaagtgccgaactacgctgccaggaggcccaacgagccgctatgccctcggggggacctccgtaaatag

SEQ ID NO: 100074 - DNA, 252 bp, Oryza sativa
  unsure (1)..(252): unsure at all n locations
  Clone ID: PAT_MRT4530_97826C.1
ctcgtctcgtnttctgtctcgcgcgcgcacgcactcgctgggagctcatngangtcggctcgctgcagcacctcggcgacagttctcctaccggtngctcaagcacncggcgcaggcntcgtttncaagcgcctngtcgacgacgattgtcggcgtaagtccaggtacttcatcgacatggaccccnccgacctactntncatgcggtggacggctncgggcaccgacttcgacttcgacttcgacctgccc

SEQ ID NO: 100075 - DNA, 2131 bp, Oryza sativa
  unsure (1)..(2131): unsure at all n locations
  Clone ID: PAT_MRT4530_97827C.1
nataactatttaatttattcattaaacttcttatgaatgtttagtgtatggtatctatatgaatgatagaagaaataataatattaagataacgaaaaaataagaaaatggtctcggcgcacttcataagtagataataaagggaaagaaaacataaaaaaagcgcgttcggcgcgggggcacactcccagctctagtgtttttttaaaaaaaaagaaaaattgcagattacattacattattattattcattaatgacacctcaaaatacatcgcttgtcgtgttaatcatattacaaaattctatctgaacaaaacaccttaagtacatagtcatattgtacaaattacaaaagtcgatctgctctcgataactttacgagattgattgattcgttcattcacaaggcaattaacacctcaaattttacaacaacaacatcatgagcaatagctgaaactttgaaagcagaactccagtctgtctgtataaccagcagcagcaggcagcaaagcaaactgttcgatcacatctcgacagggaacctcttgtacaggtccgggttgtcgagcctgggcttggcgatgacctgcagcgacgtgctcatgaacgtgacgacgccgttggactccatcatgttgacgtcctccggcctggtgccctcggggagagaccactcgaactggtggaggaggtgcccgatcatggaggcgacgaggttgatgccgagctgggcgccggggcacacgcggcggccggcgccgaaggggagcaccctgaagtcgctgcccttgatgtcgatgttctcctcgatgaaccgctccggcctgtactccagcgggttgctccacaccttggggtccctggcgatcgcccacacgttcaccatcacgttggcgcccttggggatgttgtacccgccgatcttgacgttcgtgctggccttgtgcgggagcatcagcggcgtcggcgggtgcagccggagcgactccttgacgacggcgttcaggtaagggaggctctggaagtcggtctccgacatgacgcggtcgcggccgacgacgcggtccagctcctcctgcagcttcttctgcaccctggggttcctgaccagctctgccattgcccactcgactgatatcactgtggtgtccattccagcagtgatcatgtcccatagaagcccaataactgtgtcgtcactaaggtcatactgttctctgagagtgaacagagcatccacaaagtgctgcttggcaccactctccttgagggccttcgcatgctcatctatgatcttcttggtcagccgatcccttctctcgttgtgggtcttgtaaagctcctcgttaagtggacacaaccacctcaaataccaaatgtactcagcaacagaaagagatgcaccgatcttgattccattgttgacaatagtcttaaactcacgcccttgttcatcaatgtcaccatttgcattcatgaacctcttgccgaaagctagccttgttatattgttgaaggccaccatagcaaggtgattcctcactacgattggtttatgttcactacctggctgggtgacggcgcggtggacggactcgaccatggcggtgacctcgtcctcgcggatggggcggagggcctcgaggcgcttgggggtgaagagctcgaggttgcagagcttgcgcaccttgatgtagtgcgggccgtagtccgcccagatcaggtccatcccgttgcggctgaagcgctgcgtggagcggttgcgcggccggtcggcgagcagctggtcgttctccttgagcacctccttggcgagctccgacgtcgacaccaccacgttcagcgacgagccgaaccacaccgacacgatcgggccgtacctctccgcccactccaggaagccgcggcaccgcaccggcttgatctgccacaggttccccaccatcggccacggccgcggccccggcgggatccgccccagccgcagccggtccagcagcgccagcgagatcgggatcgccaccagcgccagcgcgaacgggagcagcgacgcgacgtccatggcagcggcggcggcggtgaacggcggcgagctcgcctccgtttggttttgggggcggcaagggg

SEQ ID NO: 100076 - DNA, 387 bp, Oryza sativa
  Clone ID: PAT_MRT4530_97828C.1
atggcgtccgatctatcccagtcacttgatttgaatatatatcgatataaggattacatattattgatatctacagccgatcgaaatcaaatcaactggcacgctcatacatccgaaggcgatctttggacctgcactggagttaagcagatctcccaggcctcgtgttttttgtcaacacgcttttggcacgcccggtgggacacattagaagtcagaatcacagcagcagttttcctcatagccgagaagccgccagcatcgccgtcctcggctggagaacctggatcagttaaagctaagatgcttaagttgggtctgcctgaggttgatgaaagcaacattattgtaacgccccgattttcgttcgggattaaaaatcattaa

SEQ ID NO: 100077 - DNA, 1344 bp, Oryza sativa
  Clone ID: PAT_MRT4530_97829C.1
atggcgccgtggccaccaattgaggagcagcgtgccggcttggctccccgacatcctaggtcccctaactttacaaaaccggacaccggaggtccctcggcggttttcaacccggttttgttcgacgtggcggctgagtcagcatgggacccacgtgggccccacatgtcagccggccacggacgacgccgcggaggcggccgggagggagcagcggggcacgctgtcgatgcggcggcgaaggaggaggaggacgccggcggtgaaaggcggtggctggcccggagctcggcggggcgaggcaggagaggcggccctatccatgatggggagcatggcggcggtggcggccccatccccttggaggcgccgccgccgatgaggccgagcgtcgtatccctgcccggagccgccgacgacgacgaggccgagcgctgccactccccatccgcggcggcggcccgtgggaggaggacaaggcggcgcggtgatgcgggagcaggaggcggcatctcccctgccggccgagcaccgccactccccatacgctctccccttgccggccgccgcgcgcctcctactgtcccgcggccgccgttgttcttctccccagcttactcccgcctcgccgctgctcttctggcgcacatcaccgcccaccttgccgtcctcggccactgccaccacgagctcctccccgacgcgtcgctgccacctccgatttgggtttccgccgatttgactcacggcagcctcagcccagagcgaagagggcgggggaggccgccgccgccgccgctgccaccttgctcccccgccaacagagacaagaccgtcacgtcggataaaaccgagttaaaaaccgccgagggacctcaggtgtccgcgcacggagggggtgagcagccgcgccggctcgtggagggaggaaggaagtggcggcggcggcagctaggggcgcggaatgagggaggtggaggcggcggcgccggcgccggcgcaggcgggtggaaggagggagaaggcggcggcagcggccccgacgcaggcgcgcgggtggagggaggaggcggcagcggcggccccggcgcaggcgcatgggtggagagaggaggcggcgccgccgccgccggatccgctgaccgcagctcgagctccacccctcggactcgccgctgccactcctcctcgtcgtcgtcgtcagcagggccgatgccagctcgccatctcgccattcactgcctctcctgtggtgaaattgctattgttactgcaactttagcagtagcacctgatctgaccatccacgaagcatccgacgtctacgaatcaacaaccctttag

SEQ ID NO: 100078 - DNA, 613 bp, Oryza sativa
  unsure (1)..(613): unsure at all n locations
  Clone ID: PAT_MRT4530_9782C.1
ctagagcggctggatccgtctaccgatgaagtcagcagcgacttcataccccgacaaccctcgcactcggaggtcatcgatgacatcgatgaaagactgaagggagggggtcaaggcgggcttggcagtccaagacgaaatattgttcggttgctcctcgggaacaaccaagaccggatccgaattttctaaccacctcacccgccatttactacgagaagaggggcactggaaggggatatagcgcgacttcaggccatccctaagtcgaaaaccaacgcatcctgacaccctgttggattccatccaacgcaactcatagtagaagcgaaagaggtcaagaaacggctctacccctgtcggtgatatgggaccgggagtatcatgaccagaggcttgaggcagacgcaatcgcccacgtggcctggcaccttcggggacgtcgggcccgagggtgaggtgtccgccctcctcctgatttcccccgaggggggggggtcgggttgcgcttgcccggccccgagggccgaggcaccacagaccccttaaggaagtctgcgccacatatatgagntaagtgagcacagctgtgctcacctaacagcatttattg

SEQ ID NO: 100079 - DNA, 440 bp, Oryza sativa
  Clone ID: PAT_MRT4530_97830C.1
atgaagaagataaactttttggatatttggaatattttcggatattttggaatatttccgatattgagtaagaaaaagatatcatcaggattcttgcaagttgatgtgttaccaaagatcaaatccttggggggattctacactttgttgaggagcccataatgggccgggtcttttccaactctatcctcgtccctcggcacaccacaaacaaatcggtatctcgaggtttactcctaaccatctaggtgtcctcaaccaccaagagtaacaaatgcacagagatttcttggcgatgaatcgagtgctcaacaaatcttcacgaagtcaacaccaagcactcaaacaaactcaaatcaaccactcacgcacacacacgaaatctgagattgaagatcggtggagaggaagaagtgagaaggcaaaggctcaaactgaat

SEQ ID NO: 100080 - DNA, 981 bp, Oryza sativa
  Clone ID: PAT_MRT4530_97831C.1
cagacacccgaggtcccctaactttacaaaaccggacacctgaggtccctcggcggtttttaactcggttttatccgacgtgacggtcttgtctctgttggcgggggagcaaggtggcagcggcggcggcggcggcctcccccgccctcttcgctctgggctgaggctgccgtgagtcaaatcggcggaaacccaaatcggaggtggcagcgacgcgtcggggaggagctcgtggtggcagtgcccgaggacggcaaggtgggcggtgatgtgcgccagaagagcagcggcgaggcgggagtaagctggggagaagaacaacggcggccgcgggacagtaggaggcgcgcggcggccggcaaggggagagcgtatggggagtggcggtgctcggccggcaggggagatgccgcctcctgctcccgcatcaccgcgccgccttgtcctcctcccacgggccgccgccgcggatggggagtggcagcgctcggcctcgtcgtcgtcggcggctccgggcagggatacgacgctcggcctcatcggcggcggcgcctccaaggggatggggccgccaccgccgccatgctccccatcatggatagggccgcctctcctgcctcgccccgccgagctccgggccagccaccgcctttcaccgccggcgtcctcctcctccttcgccgccgcatcgacagcgtgccccgctgctccctcccggccgcctccgcggcgtcgtccctgcgagtgcgagcaaagagcgagaggaaggaaagagaaatagagaaagagaaagggggaagagagaggctgacgtggccggctgacatgtggggcccacgtgggtcccatgctgactcagccgccacgtcgaacaaaaccgggttgaaaaccgccgagggacctccggtgtccggttttgtaaagttaggggacctaggatgtctggtattacggttcaaggatgttttcgtatctcggtga

SEQ ID NO: 100081 - DNA, 816 bp, Oryza sativa
  unsure (1)..(816): unsure at all n locations
  Clone ID: PAT_MRT4530_97832C.1
gcacgaggcgtcacatctccgcccaatgtggcatataaaatcccccangatcagccctccccacctccggtcccttcctcattgcacacacgagaaacacagattcacacccacgagtgttcgttcgtgcccgatcttgcaggtggctctgtgttccgttcttgttgcgcgccggtttcttgcgctaatccatcatgttcgcaggtgggggtggggggttggtggtgatgcctgggcgcagtggtttatcgatcccttccctgccttgtggcgctgatccaggagcggcgaatttctttgagagggtgttctttttttttcttctttttggtccttgttgcagccaacgacaacgcgggaatcgatcgataaacctctgcatccagttctcgcctttttgtgttcaagggcttgaggcagtagtactggctattgcttcttgcttcttggctgctcatggggtgtaaacatgtttactacttgtttaggcttgatatatatgtttatgtaggatatgtctctttttaatgacatgactatggtgatagaactgtaaaaatcttttattctgatggttgcatgatttgatatgtgcttctgataggttcttttattctgatggttgcatgatttccatgtttacatggtagctgtaggttttgcactacaaatttcccctggatatattgtctgagacttagcatcagccatactntgaccatgccattgctaatgtgtaaggataatgagatgatgcattgatgcttgatgtaatttgtgggctttggcctatnntatgcttncanagtattttgc

SEQ ID NO: 100082 - DNA, 305 bp, Oryza sativa
  Clone ID: PAT_MRT4530_97833C.1
agacgaaacctgcataagataaccgcccctcgcacaaattgtggacgggtcacacgaacgacaaggatgtgtataagacgcttttagcgagcccgcattggaacgggactgatatgataatcacctatgatgagccgggcggaaactatgaccatgtgtccacccctctggtctgggtgccacagcattgaaggaagtgtaggccctgatccttactacttcaacaccagatcaggttaggagtgccgcgcgcctataattgctgatctcaccacggatcgagaagcgcattgagagccatgaac

SEQ ID NO: 100083 - DNA, 534 bp, Oryza sativa
  Clone ID: PAT_MRT4530_97834C.1
ccggccgggcctcagcaaccaaagcccgaagcaacatctcgtgctcaatcagcaacaacatctatctccttcttgcttagttaagtccttcgccctcccaagaagaacaagatgtcttgctgcggcggcaactgcggctgcggcagcggctggagtgcggcggcgcatgcggacgatgcaccatgatccctgatgtggaggccacagccaccaccaagaccttcttcctcgctgctccatccaccatggccagctctggaggaatgcacatggcgatggagagcggcgagaacggcggctgctgctgcaacacctgcatgagcgcaccagctggcgggggtgctcctgctggtactgcaactgaatctatcacgcgtcgactaccctggctgctatgaggcataggatcagtaacggcatggctgctacatgtctgatcaagagctgctgatcgatgccttaatttgcttgcattaccacccagcttatatgtgagcaggccttgccttatgctctgacgcctaaataaaaccg

SEQ ID NO: 100084 - DNA, 460 bp, Oryza sativa
  unsure (1)..(460): unsure at all n locations
  Clone ID: PAT_MRT4530_97835C.1
aagatttccagagaagcttgaccaaaacttttcccggagtatgggcgccgctcccaccggccaccacgcatggcgcgccacggaagccccgctcgagcggaccatccccacgcggcgcccatgcgctcacccgcgcgtcgtcgcggcgtcacgtagcgcaggcaagccagttcgccgcggattgtcgtgagggcttctttttgacctcgttccctacctccatccatccacgcacgcngccccccacattgggagagacaaaaggcgggacgctgatcgagcttcttctcgggattttagggaaggtaaaacaacacgagtgatgctctttgtcattttcatcctggaacacatatggaggactatttttcacgnatcctagaccttgcttggcaatttacgacatcaactgacacgattaatagaacatgtgtttgggtatattgattggatcccagaa

SEQ ID NO: 100085 - DNA, 1995 bp, Oryza sativa
  Clone ID: PAT_MRT4530_97836C.1
atgggcatctggtaccacaaaacccgagaacacaccaagctgtgggttgccaacaggcaggccccactcaccgacccggaatcgtcgcagctctccatctcgagcgacggcaacatggtcctcctcgaccgcgccaccaggtcaccggtctggtccaccaacatcaccggcatcgccgccgccgccaactccacggtcggtgtcatcctcaacaccggcaaccttgtccttgccgacgcgtccaacacctccgccgtgctgtggcagagcttcgaccacctggacaacacgtggctccccggcagcaagctccgccggaacaagctcaccggcgaggcgacacgcctggtcgcgtggaaaggttccaacgacccgaccccgggcatgttctccctcgagctcgacgccggcggcggcggcgcgagccagcacctgcggctcgcctggaacggcagccaccagtactggagaggcggcggcggcaactggacgaccgcgccggaggaatcgggacctgaaggtcagtcgccgtacaccttcctctacgtcgacgccgagaacgagagctacgtcgtcttcgaagtcaaggacgaggccctgttgtcgcggatcgtcgtgggagtggcggggcagatcatgctgtgggggtgggtggagtccgccgccacctgggtgctcttctggtcagagcccacgctgtgcgacgtctactcgctctgcggctccttcagcgtctgcaccgacggctctgtgccggagtgcggctgcctccagggattcgtggagcggcagccgcggcagtggctaatttcgatccgcctcggcgtggcgtccgacttgtccggcaccgggaacaccaagaaaatgaccatcggactcgtcgtcgccggagttgtcgccgccgcagtgaccctcgccgttctggtcgcggtgctcgtcatgagaagcagaagggcgaaggcgttgcggagactggaggactcctcctccttcttgacggtgttcacgtaccgtgacctgcagctcgtgaccaacaacttctccgacaagatcggcggcggcgccttcgggtcggtgttcaagggcgcgctgccgggggacgcgacgccggtggcggtgaagaagctcgagggcgttggtcagggcgagaagcagttccgcgcggaggtgagcaccatcggcatgatccagcacgtcaacctgatcaggctgctcggcttctgcaccgaccgaacacggaggctgctcgtgtacgagcacatgcccaacggctcgctggacaggcacctcttcggctccggctccggccatggcggcggcgtcctgagctggaagacgaggtaccagatcgccctgggcgtcgcgagagggctgcactacctgcacgacaagtgcagggaccgcatcatccactgcgacgtcaagccggagaacatcctcctcgacggcgcgttcgccgccaaggtcgccgacttggggctcgccaagctcatgggccgcgacgactccagccgcgtgctgacgacgacgcgcgggaccgtggggtacctggcgccggagtggatcgccggcacggcggtcacggcgaaggcggacgtgtacagctacgggatgatgctgttcgagatcgtatccgggaggaggaacgtggagcagcggcggcggcaggcggaggcggccgacgacgacgagtacgacagcggcgccggcggcacggtggaggcggacttcttcccgttgacggcggtgaggatgctgttcgacggcgacggcgacctcagggacgcggtggacggcaatctgggcggggaggtcgacatgggagaggtggagagggcgtgcaaggtggcgtgctggtgcgtgcaggacgcggagagcgcgaggccgaccatggggatggtggtgaaggccctggaggggctcgtcgacgtcaactttcccccgatgccgaggttgttcatggtagggctgtcaacgggctcttctcacacataa

SEQ ID NO: 100086 - DNA, 1166 bp, Oryza sativa
  Clone ID: PAT_MRT4530_97837C.1
ggccccccctcgagttttttttttttttttgctaattttcttctgcattgcaaagaatctcgtgatatacgaaatgatgcaatttacttcccacggagagagagaaaaaacagggccatggctattatcacatattctgtctgaactgaagattcagttacaataccctcttcgaagattcacagcagccgaatccatatcttcaaattctttttcttggacaaaacattcttactggtattgacgcattatatatagaccattgcttcaaggaaatgctactccgatcatgtacttgtcaggcgattcagattcaattggcgtcagaaatttagaatcctttgagctgaccactcaaaccggctgaagctatccatttctccagcgttgtggctgacgacacaaacgccgacttggatgaatcaacatcactcttgttcacagatgtaatcaaggaggccaaggaggaattgaagctatcgaccatgttcttctcctctgggctagagctaaacttggtgaaagctacattgatgttctgaacccactgagcgtcagagtttgggcctaggacactgcttgcagcagggaggtcattcttgtcaatggcttgccctaccttgctcagcttgtagatgagatcctgcaagtaccctgtctcggtgccagaggagctgatgacgccctgcttctggagccgcttcttcctgtcctccttgacgcgctccaggagctcgatgtcgtcgtcggcctccaggaccgcggcccgcgcttcaccggcgccggagagggaggcggcgacggcggcgagcaggcaggacgccatgccgctgcgtctcccgacgacgacggcgcgccgttcttggtggcattggctactgaccgccgccgccgccaccgctctgaacgaaatcggtttcttggccctggctgcagaaagactatgctgctgcagctgcaccggcgcctcctgcgccgccgcggccgccgacttggccgccgcgccgcatccggcgagcgcccacgcttcggtagcgatggccaccaccatcgggcgatcgattcgagagaatttttcagcagcagcagcagcagatagcagaggaggaggagaagggtgtgagcctggcgccccagcctggcctgtccgaattcctgcagcccgg

SEQ ID NO: 100087 - DNA, 1015 bp, Oryza sativa
  Clone ID: PAT_MRT4530_97838C.1
ttttattgtggaacatcgtgatgattcaatcggctcggttgaaattgtgcccttgactttattcgttgatggatcggtttgtactcatgattgtggtatcagcttggttataatctctcctcggggggcaagttttgaatttgcttatactattaaaccttatgcaactaacaatcaagctaagtacgaagcagttctcaaggggttgcagttgcttatggaagttgaagcccacgccgtggagataatgggggattctttgttggtgatcagtcaattggcaggggaatacgaatgcaaaaatgatgcgttgatgatctacaacgagaaatgctgggaattgatgaatagttttcggctggtgattttgaagcatgtctctcgggagcagaacgttgaagcttgcatgcctgcaggtcgactctagaggatccccctttgatttgcttgcaggaataaggttgatctgcactggcaagatcaacaacctatggagaggtgtatcgatcgctaaggcgcaacacaataatgtctagtacggttgtagttgggtcgtcaacgtttctcccaaatcgtagttatcatcaactcaccgaaagatcgggccaacaacagcctagagtggagctcaaggttcatgcctgcaggtcgactctagaggtttccccgtctagttcatttagagtttcgagttctggtcatgttttgtaccacagtcatcgcagccaccgtgtctctgttgtcgtcgggacctacgaaaacggaatcggctcgttgccacggttctattttcgtagttttcagaagtttttatcggtcagttttggagttgcatctaggttttgcttgagtttctggtttgcccgtgaatagatcggtcgtgctgtttccggcactgggaggaggaagaagaatttccaaatctagaaggaaatagtagatcagattgattgaaaatcagtttcccttttcctctcaccaaatccggactcgagtggtgtcgtactgtaacata

SEQ ID NO: 100088 - DNA, 2022 bp, Oryza sativa
  Clone ID: PAT_MRT4530_97839C.1
cgccccggcacgaggcgagcttcatctccactagtctcatccctccttctccctctcctcgttgaacaccgcactatcaaatcacccagctgaaagccaagaccgcgcgcgccggccggccgggcagggatcacctagctaggatacgcgccatgatgtcgtcggcgccggagacgttctcgctggaccacctctcgcagcatcagcagcagcagccgccgccgtgcgccgagcaggagcagctctgctgtggtgcactgcaacttctgcgacaccatcctcgcggtgcgcctgccccgtagctgcctcgtctcggccggctccgtccggtccgaagccagccagccctctaaccacctcatcacatcaaagcgggaccaaaaggatatctctggtggctaccccctctcctccggccgctcgtgtaaaatttcccttctgatcctgcgctgtgccagattataaggccattgcgtagctcgatcgaagaaagaagcaggccagccacagtactgcctctcttgtcgatcgatcgacagccacagcctgcaggtgtggggattcggctggccgtcgtcttcgtcttcgtcttcgtcgtcgtcctcatcatgtcgtcctcgtcctcgtcgtcggctgtcttcccactggaccacctcgcggcgccgtcccccaccgagcagctctgctacgtgcactgcaactgctgcgacaccatcctcgctgtcggcgtgccgtgcagcagcctgttcaagacggtgacggtgcggtgcggccactgcgccaacctgctctccgtcaacctccgcggcctcctgctccccgcgccggcgccggcgccggccaaccagctccacttcggcccttccttgctctcccccacctccccccatggcctcttggacgaggtggcgttccagacgccgagcctactgatggagcaggccgcgagcgccagcctgagcagcatcacgggccgcagcagcagcagctgcgccagcaacgcgccggcaatgcaaatgcctccggcgaagcctgtgcagcaagagcctgagctgccaaagaacgccccggcgtccgcgaacaggcctccggagaagcgtcagagagtcccatctgcgtacaaccggttcatcaatgatgagatccagcggatcaaggccggcaacccggacatcagccaccgggaggcgttcagtgcagccgcaaagaattgggcccatttccctcacatccattttggcctcatgccggatcaggggttcaagaagaccttcaagcctcaggatggttctgaagacattcttctcaaggatagcctgtatgctgcggcagccgccgccgccgctgcagccgcaaacatgggcgtcactccgttctagcgagctttggcaaagcggccgcaagcaccgaattcttggtggtggccctagctcgctctcatgtgtggcgccattctagctatatagcaagggtttaattagcatcagatcatcatctcttaatatcatgtgtgttgcttaattagagtacttctgagtgtgtagaagagagatggggaatcctgttgagtgcctaggtttatgcttataaccatattcctcgtagagacttttttccctgtttttctcttttcttttccttctttatttttttatcctttctttctttcaggactatcttcgtactccctattcacctgtagagtgtagagaagttgctgttccgttgcctgattgtgtcccaaaagacgtgtcttaattacgaactcatgaacatcatctagcaatataaattctagaaacccatgcatgcatgcgttgctttctttaatatttcatgtgcttttcttcaatagaaaatgttttgggtttttatcaccatacattcgttatgagattaagtgcttagtgctaagattttggcaaataaatttgtaaaatttcaaaaagagaataatataacttctttgcttccttcaactaaaaaaaaaaaaaaaaaaactcgagactagttccctcgtgc

SEQ ID NO: 100089 - DNA, 219 bp, Oryza sativa
  Clone ID: PAT_MRT4530_9783C.1
atgtcaacgtcgagcctccagagctcgagccttcggacatgtcaccagtgcagcagcgtggtgttcatgggcgcatctcgtaccagggggcaccacccagcgccgacgacagctgtggagacggtgggcgccgtggaggcccagggagacgtcacgcgcaccgctggccgcgtcgccgttgtcccccgccggagccggtcgcccccgccgccgggctaa

SEQ ID NO: 100090 - DNA, 546 bp, Oryza sativa
  Clone ID: PAT_MRT4530_97840C.1
cagcagcagcatcggtactcctctcttcaacgtcaaggcctaccttcctgtcaaggagtctttcggcttcactgctgatctccgtccgccactggtgccaggccttcccacacaggtcttcgaccactggcagattcttgagggtggctcaccacttgacacaccaccatggtgggtaaggtcgttgcggacatgcgtaagcgtaagggtattaaggtcgacgtgcctgatgtttccaactactacgacaagctataaaggagagcttgcaaaagtgtttacaatttccttttccgcaccgtcatggagcattcggccattttgggcgtgttcacaaaccgctggtcgccgtctgacactaaacactcccttttggagcacctagagccagtaaacgacggtccgggctactggcccttgatctcatcggttttgggacgttttgagcttacatcagacagttgatgcccctttccattggacgttctgagagtgtaattgtagttagagaaaatcgatgctatgttacacaaaaaaaaaaaaaaa

SEQ ID NO: 100091 - DNA, 432 bp, Oryza sativa
  Clone ID: PAT_MRT4530_97841C.1
atgctgacggcgatgataagcgacgcggcgccggtggggggaggagctgcgggcgggcagcgggggaggggcgacggggggaggagcggcgtgcaggctcccccgctggccgccacccacgaggcccacgaggcggcggcgggggaggagctacgggcgggcggcgacgcgcggctggcggcgggaagcgggacggggagagcgaggacgtcgccgctgtcgtcgtccatggccgcagatctcgcgccagcgccctcaacagagcttggggagtctggcggtggtggcttgcctcgacctcccgacgagctaggcgccatcgcggaggcacgacccgcggctcttccgctggttggaattgaagctgaagcgggcgcaatcgccgaaggggaccgcttccacatcggtgtcggtgtcctgcggccgtggtga

SEQ ID NO: 100092 - DNA, 216 bp, Oryza sativa
  Clone ID: PAT_MRT4530_97842C.1
tttttgttttttgaaaaaaaacggtcaaacatagcctttttcaagaacccctcaaaatcgggtggtttcacttatattggtaaaatgctagatcaaccgcattccgaacaaattacaatcaaacaaaacccgtatcaaagattgaaaaactgccctgggccagcttgaacattcggtgtcggcacaatagcaacttcttcaactccggcagaatcc

SEQ ID NO: 100093 - DNA, 360 bp, Oryza sativa
  unsure (1)..(360): unsure at all n locations
  Clone ID: PAT_MRT4530_97843C.1
agggaaaaggggggaaacccctttaangggccctttccccncctttaaaaccccggaaatttttttattnttgggggttaaatttnttnttnttnttttattnttatttntttnttggggtttacccctnattattgggttttacccttattntttattcctccggccttaaaggggccctttaaaacccttnancctttttgggaaaaaagggnaanaanaanaaaaaggggaanaaanaanaatttaaaaaatttgggtttgggttttggaaaattgggncccttggggggttttttgggcccgggggaaaccccanaaaaaaanaanaanaaaaanaanaanaanaanaannaaaaa

SEQ ID NO: 100094 - DNA, 1163 bp, Oryza sativa
  unsure (1)..(1163): unsure at all n locations
  Clone ID: PAT_MRT4530_97844C.1
gctccaaggatggcgagtctattaagattgctgaaccattagatggcccaataatgcagagatattgctcacttgcaaagttatttaaggaccagtgtgcacttgtcgtgcttattttgaaagctaccgcaaataaggaatcaagtatgtggttgtctcttggagggtttcaagaaaagggtcctgatgattcacaccagtacaatactcatgtactaattgatgattctggagaaattaggagctcatatcggaaaatacatctgtttgatgtagatgtaccaggcaatatggtgtacaaggaaagtcgttttacgacagcaggtgatactgtcgttgcagtggatagtccttttggacgacttgggcttactgtttgctatgatttgagatttccagagctttaccaatgtttgcgctttaagcatcaagctcaggtcttactagtaccatccgcgttcacaaaagtaactggggaggcgcactgggaaattcttctccgagctcgtgccattgagacacaatgctatgttattgcagcagctcaagctggaaaacacaatgagaaaagagagagctatggtgattctataattattgacccatggggaacagttatagctcgacttccagaccggctgtccactgggtttgctgtcgcagatgtagacttgtcaaaagttgaggctgtgcgaactaaaatgccaatctctgagcaccggaagtttgacagcgtctggaaaacctcatcactgtaatagtatagaggtcttgcacgcctcctgttctctttcttttttctttagagaacagtcgacctattattttgtgtatcaaatatcaattgcaaggcacacatgatgatccnatggtttgatcggcggtaaacttcaattgcgaagccatggttgctgaggtttcttggtttgaagaattcctggttcagtggaacttcaagatcccaaatcccccattaggctaggaatgatttgtcagaccaaatagtccataaataatagtgttggcttgaacgcgacgccaccaacctaggacatttcaaataagtgattgccattgaatctaatgtaaatttgttatggtacatttgttgataaatcaaagcttggattttttctcttggttaaaaaaaaaaaaaaaaaaaa

SEQ ID NO: 100095 - DNA, 237 bp, Oryza sativa
  Clone ID: PAT_MRT4530_97845C.1
gtcatacatccggagaggcgtgtttagtggataggatctgacctgctcactgatgcgacactcagtcactgactcatgaagtacatgaggctaacctacatccctgctgctgattacgctgctacacagagccacagctatggtacggaagaaaaacgccttcgacgatatgccatcggctgccagctgcaccaccggtctaacctccccgctggagaccactacccatactccgaa

SEQ ID NO: 100096 - DNA, 1281 bp, Oryza sativa
  Clone ID: PAT_MRT4530_97846C.1
atggagatctcgttcgaggcgtgggagggcgtgcagcggcacggccaggacatcgcggaccgcctcgcgcaggggttcaccggcctgctccaggcgcagccgccgcagttcccgtggccggcggcgtcgcacaagcggattcccttcgagatcgacctccccgtggtccccttcggcgcctcccgcggtgcccgggccgggaaggagttcttccccgccgcggccgtcgcctccgtcatcgacatcggcgggaggctcggccaggctggcgtggagattggggcgtccgtcggtggcgccgtgcagcacgccgtgcgccagctgcccctgccgttccggaacggccagatccggcgccgcaagctgccgccgcagcctcaggcgccctcgcccgcggctgcggtgggtgaggcggcggtggggctctcggtagagagggctgtcgacaggtgccctctagaggcagctgcggcggccgccgctgccgcaaccggtagcgctgcagcgtccacggtcagtggtgctgtgggcggagatgacgtagatgaggaagatgagggattcggctgcgagattggtacttttggaaactttaagaagtctaagggtacagtaaatgtctcggcttcatacaataccaggaaccacgacattgagagttctgttgttgcacgtggagacctttggaggctggaggcatcacgcagcagttcaacttccggaaacgatagctcacctctataccttgttcagttgggaccgttactttttgtccgagactctacactccttttgcctgttcatctatcgaagcaacatctgctttggtatggttatgatcgcaagtccttcatggacctgcagttccccaatggacaactaacatatgttgctggcgaggggattacagcaagtggttttcttccattatttggtgggttgcttcaagctcatgggaaataccctggagaaactagagtcagcttctcttgcaagaataagcaaggcaccaggttcactcctatgtttcaatggcctgacaagtctctgtcatttggagttactcaagccttagcatggaaaagatctggtctcatggtgaggcccagtgtgcaagtcagtttatgccctacatttggaggaaatgatcctgggattgggagatccaagtggaatggtcaaatgggcagttccggagtggtcgttaccttggaaacaccccttaataacattggaaggccatctttatccgttcaattgaatggaggttttgaaatttag

SEQ ID NO: 100097 - DNA, 2552 bp, Oryza sativa
  Clone ID: PAT_MRT4530_97847C.1
acacgtcatcgcgcccccttctccttcctctcctcttctctcctctcctttccccaattgcttcctcctcctcctcctccttctgcacctgtccgattcggttcgattcggtttgattgggttccaatctgcggaggagcggcaacgagctaggcggaacagagggttggtcgtcggatccgtggcatggagatctcgttcgaggcgtgggagggcgtgcagcggcacggccaggacatcgcggaccgcctcgcgcaggggttcaccggcctgctccaggcgcagccgccgcagttcccgtggccggcggcgtcgcacaagcggattcccttcgagatcgacctccccgtggtccccttcggcgcctcccgcgggtgcccgggccgggaaggagttcttccccgccgcggccgtcgcctccgtcatcgacatcggcgggaggctcggccaggctggcgtggagattggggcgtcctgtcggtggcgccgtgcagcacgccgtgcgccagctgcccctgccgttccggaacgtgccagatccggcgccgcaagctgccgccgcagcctcaggcgccctcgcccgcggctgcggtgggtgaggcggcggtggggctctcggtagagagggctgtcgacaggtgccctctagaggcagctgcggcggccgccgctgccgcaaccggtagcgctgcagcgtccacggtcagtggtgctgtgggcggagatgacgtagatgaggaagatgagggattcggctgcgagattggtacttttggaaactttaagaagtctaagggtacagtaaatgtctcggcttcatacaataccaggaaccacgacattgagagttctgttgttgcacgtggagaccttggaggctggaggcatcacgcagcagttcaacttccggaatcgatagctcacctctataccttgttcagttgggaccgttactttttgtccgagactctacactccttttgcctgttcatctatcgaagcaacatctgctttggtatggttatgatcgcaagaatggagtccattctctctgccctgctttttggtcaaaacatcggaaatggttgatgatgtcaatggtttgcctcaatccagtagcttgttccttcatggacctgcagttccccaatggacaactaacatatgttgctggcgaggggattacagcaagtggttttcttccattatttggtgggttgcttcaagctcatgggaaataccctggagaaactagagtcagcttctcttgcaagaataagcaaggcaccaggttcactcctatgtttcaatggcctgacaagtctctgtcatttggagttactcaagccttagcatggaaaagatctggtctcatggtgaggcccagtgtgcaagtcagtttatgccctacatttggaggaaatgatcctggggtacgtgcagaggttatccattcattgaaagaggaattgaatgtaatgtgcggtttgtcttgctcaagacatccatcagcctttactgctctgtctattgggagatccaagtggaatggtcaaatgggcagttccggagtggtcgttaccttggaaacaccccttaataacattggaaggccatctttatccgttcaattgaatggaggttttgaaatttagcattctgcgcagtaagttgtatataccactgtacatagccctactaatgtccatgtcctatctctgtggagatggctgtgcaacgcctatgaatggtatctggaagtggtttctgctcgtttttgttgtcagactcataggtgataagtctcagctcaacaaatcaactggtttattccccatgccaacaaaggcatccatatatataccttaaagagatggtgatcaagtgtgtaggcagttcaaggtttcttttgaagaaattggagagaaaagctgcaagatcagcacttaatactttttggaagttgggagaaggaaaaggctatgaggtgttttgcggctgtgcaagaagccaagacgaatgtggctttgcaagaagccgaagatgttcacccagaagctatgttcctttggagcaggactgaccatactggatgtttgctgatagtgaattgcttactggcttttgctaattgtgatggataattattatccatcacaattgatcgttagacgatctcattgctgagacaagctttgatggatgaattggtgtgcttttttcccctgcactcttgtattcctcatgtaagactcatgatcagtgaagctaagaaatgtctactgggatgggatggaggacctgtctggtggcattgtcaaacccacattgttcttgaacacatgctgagtgattgctgtttccacgtcactgaaaaacgagttctgaagctcaaaaacgagttctgttttcttcagaaggaacaacagatcgtaggtagatttctatcagaagaaaacgacgtaggccagaataaattctactccctccatctacttcttaatagtcatatttttaaatctgaaatttatttttgataggcatattttatt

SEQ ID NO: 100098 - DNA, 124 bp, Oryza sativa
  Clone ID: PAT_MRT4530_97848C.1
cagttatgctgtggagtatctgtggtgtaaagacaaaggaggaaatggagcataactgggagttttgcagaatggacactgctcagcctacacaatgtccattctgcacaactcccagttatgc

SEQ ID NO: 100099 - DNA, 368 bp, Oryza sativa
  Clone ID: PAT_MRT4530_97849C.1
tccttatcgaaaagaattacaaagcttagccgatgatgccaatggataggtcggtgtcgtgcgcctgagaggccaacagctttgatcggaggtcacctcctcgcggacctgcggtgctacagcgcaggtgccagaaggttgtacaagtccggcgctgacgcggaagaaggggctgtggcagggacgaacacgacggcgaaggtgtataagcgcgctacgagtgccaacgcgtggtcgtggccgggctgttctgggggtgtgcatcggagtgggagcaccaagacggtggtgtcctactccgccggatggagccgtcatgggcggtcgacgcccgggtataacctgcggagctacagcgcgtcttacgc

SEQ ID NO: 100100 - DNA, 264 bp, Oryza sativa
  Clone ID: PAT_MRT4530_9784C.1
atggcggcggcaaccatatgcaagctcgggcatggccgcacctcagcggcggacgaggtcgggaacagcgacgatggtggcggcgaagcttggggacggtcgccgacgagctcggaactgcggcagcgagtcgacgcggcagcgacggcgacggcggcggcgggagaaggaaaagcggaggcgagcgggaacggcgacgatggtggtggcgaagcttggggacggtcgccgacgagctcgggtgcggcgacggcggcgacctag

SEQ ID NO: 100101 - DNA, 1562 bp, Oryza sativa
  Clone ID: PAT_MRT4530_97850C.1
gctctctgctcgatcgccccgctccgctgagacgtccgtaccaagcaacaaccgcgcgacgcctgcgcttccccctccccctcctcgtagtcttcctacttagcccaatccccaagccggaattcctcgagggtttgtttcacgcggagcgggcggagagtgataggggcatggaccgcatcgtcggcggcaagttcaagctcggccggaagatcgggtgcggctccttcggggagatctacctcgccacgcacgtggacacctacgagatcgcggcggtgaagattgagagtagcaagacgaagcatgcccagctgttttatgaggcgaagctctacaacgctctccaagcaggaactggaattgcgaatgttaagtggtgtggtgtagatggagagggaaaggtcctcgacatcgatttgcgtggaccgagcttagaggaatgatttgtattctgtgggtcaagtgcgactctgtagacagttctaatgtctccagacccggggactactagatgtaacttaaaagaaaaataaggataagcaagcagagatatagatcctaacaactttctggttggcctcggtcggaaagcaaatcaggtatacataattgattttggacttgcaaaatgattgatggattccactacaaatcgtcatatcccttatagagaaaattagaagctgactggcactgcacgctatgcaagttgcaacactcatcttggggttgaacaaagtcggcgggatgatttagaatctcttggttatgttcttctatattttctccgaggaagcctcccgtggcagggacttaaagctgcaacaaagaagcagaagtatgacaagatatgtgagaagaagatttcaacacctatcgaggtgttatgcaaatcctgtccagtggaatttgcttcttacttccactactgtcattccttgacatttgatcaacgacctgattatgcctttgtgaagcgccttctccgtgacttgtttacgcggcaagtctatgagtttgattatgtcttcgactggactgtgttgagatataaacaaggccaaaaggttcagcatggttccggagcgactattacaagagcaacccctggggaccttgacaaaacagcaggtgtaaatggtgctttccctcataatgaagcccgggagcaaacagggccaagccatctggcagggtcagctgcacaattgcaggtgaaacggtcaactgagagaggtccccaccctaacattcagcatactgagaatattacacaagacatgactgccagaaagcatctcgccgcatctgttttacctggtgccgaatggagaaaagatggtcatctattatatgaggcagcggggaaatgctcagaagatgctccatctatttcaagtggttcagagtcatatatatggtatgggcatattgcaataatgatgatccagacttcttcaggtatgatgctacaaatgctctaccttggcctatcccctgtcaacctcctgaacagccagaaaggaaaaaaggcgttggcaccaggagatgaggaatga

SEQ ID NO: 100102 - DNA, 582 bp, Oryza sativa
  Clone ID: PAT_MRT4530_97851C.1
cagggtcagctgcacaattgcaggtgaaacggtcaactgagagaggtccccaccctaacattcagcatactgagaatattacacaagacatgactgccagaaagcatctcgccgcatctgttttacctggtgccgaatggagaaaagatggtaactcaaggcaactagggcagcttgatgctttacatcagaagcagagttttgtcagcaatactggctcatctagcggccggtttccaacattcttgcatgattcgcctgcaaattgacaggtcatctattatatgaggcagcggggaaatgctcagaagatgctccatctatttcaagtggttcagagtcatgtatctcaaaagtcaattaagcatcaccatgcaacatgtatgttagaaaggtggctgcagatttgtttgatgatgatgctacctgctaattatgcaaggtttgctcgctgttgtgatgaatgatccagcagtttgtttagactgctgcttaaacattttatttgttacaggattcgataacatgtaaattgtttatatgttaatagatatatggtatgggcatattgcaataaaagaa

SEQ ID NO: 100103 - DNA, 331 bp, Oryza sativa
  Clone ID: PAT_MRT4530_97852C.1
aaaaaaaagtttttttttacttatttaagacggccggtggaaaaaaacaagacatcggctaaaaaaaaaaagaaacctcttcggggacgggccgatgggctatcgtttagggattaaaccgctttttcccgggctttatttctgggggggggggggaacaaaaaaacgggggggcccacaaacctaaaggcaagattttgggccccgccctaaagtaaaacaaatcttccaggccttatgtttttcgaaaaaacagggggggcctcccatcccgccggggggcagccacccatcccggcgtttcccctccggccggatttgggggaggggg

SEQ ID NO: 100104 - DNA, 247 bp, Oryza sativa
  Clone ID: PAT_MRT4530_97853C.1
ttgcgtcgttatggctgaaacaaagagtttacgccagagcgcctcatggttcggtctcaacgccggctgtcttcctcatccgcaactgccagtgtcgctcagacttcatgacagcgtgggcagcgcatgggccccagcactcagcacaggagtacagccaaggttgggggagcgtgctccaaccgacaccgctccgggggggaaagtcccgacaaaggagtcccgaccgaacagttcggccgctccg

SEQ ID NO: 100105 - DNA, 381 bp, Oryza sativa
  unsure (1)..(381): unsure at all n locations
  Clone ID: PAT_MRT4530_97854C.1
tgggtttttttttttttttggccttcaaatcatttcatttataggggatgcaagataaccgctcaactaggagcaaacatacaccttcagaggaacattaacacaaacttaaaatctttcggacaaacacacttccaaactgaatcctaatacaaagagcctcttggggcanaacacacttccaaacttcacagccgaaactttctttcacccgagctatttaaaagaggattgccaaagaaagcaatcctccacctcttgcatgccatgctctctatttatagggctaagactccctaagacattgtctcaaatacccctagggcgaaaccctaactcagaagggatctggtccacccattcttccttagaaccgaagga

SEQ ID NO: 100106 - DNA, 444 bp, Oryza sativa
  Clone ID: PAT_MRT4530_97855C.1
tcttccccagttcttctcctcgatacatctattcatccatccattgccggcgaggcgacacacacaccaacaactccgccgccgccgtcgtcaacctcgccagccccggttattgattagacgcttcggggtcgcggagatgaactgcgagacctgtcagctgaaggagctggaactggagcctcgggagatcaaggatgtgctacgatgcattttgcataccatattcttccacagaaccttgagccttgttcggcccaaagactttgattgtgatttctttgagattacctatgtgagtatttatcctgtataaaggtcttgaactatttaatgtactgaatctatttgggttttctatctaatgtttgctggcactaagcacatttcatggctatcaaatgaagtatgaaatttattacctactgcaaaaaaaaaaaaaaa

SEQ ID NO: 100107 - DNA, 696 bp, Oryza sativa
  Clone ID: PAT_MRT4530_97856C.1
atgggcaaaacagcctcgccgaccgccgcgtcgcgcgttgcgggtgggctccgtgcccgtgccgccgcgacgacgatctcctcggtggcggcgtctccgcctgtcgtacgcgtgatgccgcgcgcgccgagccgaacaagtaaacaaccgatcggtccgcatcacccgccgtcgatcggtgagacgaaaaatgatttcatccgtgaagcggcggcggcggcggcggcggcttggaacgacacacggaaatccaccactactactcccgactattctaccggcaaaaacacgcacgtcgacccgtcgttgcatgctggtctcgtgcgtgtgcttcagcagctgacgtacgagtcgatcgatcagctccgcgctcgcttgatatttccggtggccggcacgctggggccctacgttgcacagttccacgcagcaggggatgccgagagcgcccgggccgtcgagtggaagcatcgatcatgcggcccgaggggggcatttttgccggggagaggagggcctgcagccgcgcgcgcacagtgcgcgcactcgcagctgctcatgtctcgctactcgctagcgacgccccgcgcgcgcgccatcgggtggtttcagctagtttcgtcccgtgaaaccgagtacggccgcccgcgccgagaccccacgcggccacgccttgccggccgagacgtatccatt

SEQ ID NO: 100108 - DNA, 198 bp, Oryza sativa
  unsure (1)..(198): unsure at all n locations
  Clone ID: PAT_MRT4530_97857C.1
cgtgtttcaactgagaaactgccaagtcatgcagcagcagtgcckaacagctcasgatgatcgcacaacagtctcactgccaggccattagcagtgttcaggctattgtgcagcagctaccggctgacaacagttngctgagcgtctncttcgatcagagtcaatgctacnngcacacaanctgatcgttggggctaa

SEQ ID NO: 100109 - DNA, 567 bp, Oryza sativa
  Clone ID: PAT_MRT4530_97858C.1
agtgagtgaataatgaaggaatcccgggggtggtatttgcaaaaatgatttcgtcattttattttgggggttagattagcatttgcttgacagccggccaggccttactatcggaagcgtttaaattaaagatttgtcttgattatctacactcgcagttgagccgtagccaattttgaattttagaaacaatttaggttattttatcgcttttgtcactcagttttgacttgtgaccggtaagagtagaagcataaaattctcgtgttaaaaatgtatttttcataacattgatcacgtgtcttcatttgtttgaaagatccgattgcctgtctatactataagaatgttgataatggccatgtttaggtgtttatttgttttggcaaaaaaaattgacgtatacggacacacaattaaagtattaaatgtagactaataagcctaattaatctatcattagttgtagcatcacattatcaaattatgacgtaattagactcaaaagattcatctcttaatttacatgcaaactgtggaattgtttttttcgtccatatttaatgc

SEQ ID NO: 100110 - DNA, 213 bp, Oryza sativa
  Clone ID: PAT_MRT4530_97859C.1
atgaacaatgcggatgaattgaacttagagtacataaaaagaagatcggttaggcaagttggcccaacaagcaagattccccccaaaaaggacatagacaaggtactttttagggcaatatattggcttcggggttgggctcaagtacaaatatatgatgatgatgatatcaagctaataaataatgatggcccaagaaagttattcttttag

SEQ ID NO: 100111 - DNA, 1718 bp, Oryza sativa
  Clone ID: PAT_MRT4530_9785C.1
atggtgcagggatgccgatgcgaagtagttgacgcctgtgttcgcgaggtgcgcctcgcgtcgccgtatcgtatccatcagatattcagattcacaaccccacgccgcctcgccctcgcccaccgcggcgacacctacaaagcccgcgacgagggccaatgccattggcgtgacaaggcggggagcgcgacgcgacgcgagggcggagagagcgagggaggggagaggaggaggaggaggttgatggcgtcgccggcggtggtggcgttcgcggtggcggtggcggtggcggcgctggcggcgttctgcgggacggacccgctgcggacggggagcatggtggacttcccgggcttcgtcccccacgtcgtcgagctccccgacgcgtcggagatgccgccccacgcggacacccgcgagcgcctccgcggcgcggagatccggttccgcggcgaggtgcagggccccgagagcgtcgcgttcgacccgctcggccggggaccctacaccggcgtcgccgacggccgcgtcgtgcgctgggacggcgcccgctgggtctacttcgcgcactcctccccgaactggaccgccgagctctgcggccacaaggcgtcgccgctcgactacctcaaggacgagcacatctgcggccgcgcgctcggcctccgattcgaccggaggacgggggacctctacatcgccgacgcctacttcggcctcctcaaggtcggccccgacggcggcctcgccaccccgctcgccaccgaggccgagggcgttcgcttcaacttcaccaacgacctcgacctcgacgacgacggcaacgtctacttcactgacagcagcatccactaccagagacggcatttcatgcaattggttttctctggagatccctcagggaggcttctgaaatacgacccgaacacaaagaaagcaacagttctccaccgcaacattcagtttccgaatggggtgtccatgagcaaggatggcttgttcttcgtcttctgcgaaggatcccgtggcagattgagccgatactggctgaaaggggagaaggctggaaccgtggatcttttcgccatcctgcctgggtttccagacaatgtgaggaccaacgacaagggtgaattctgggtagcaatccattgcaggcgcagcatatacgcccgaatggtcagtcgcaatgtcaggctgaggaagttcttgctcagcctcccaatccctgccaagtaccactacctgatgcagatcggcggcaagctccacgctctgatcatcaagtacaaccccgaaggcgaggtgcttgacatcttggaggataccacagggcaggtggtaagagccgttagtgaagttgaggagaaggatgggaagctctggataggatccgttctgatgcccttcattgccgtcttcgattacgccaatgcatcttagcaaactttatgcctggatacaagggttaaaatgtggaatcccagaatgacgtttgcacaccatttaccactatcccgggtgacatttcataaatgccgctttcaagtaacaacctaagttgtttcatgtttcagttttttcgaagcagatgtagcttgcttacatttttagttcattttcacagtccatgactccatgttcgtttggtgccataaaaaagcgctcgataataatttgagaaattgccggattctctgatccggtgcagtctgttc

SEQ ID NO: 100112 - DNA, 165 bp, Oryza sativa
  Clone ID: PAT_MRT4530_97860C.1
atggggagcaggatgttggttttctccactaagttttccagagacgtgtggaatgacccatcttgtggatatgtagcaaagaaaccagaggtcatgtctcaggagtgctgtcttgctggtgatcgccatttctcaccagcaaagccactcaactttatgtgttag

SEQ ID NO: 100113 - DNA, 171 bp, Oryza sativa
  Clone ID: PAT_MRT4530_97861C.1
atggggaggcctgattcgtcgccggccatcgcggggaggctggattcatcgccagcaaccgcggggatgacagcatcgggcctcgggcaaggcggtgacaacaacggtggtggcagcgacgatgacagtggtgacggcggcggcggcagccgctggattaggattatataa

SEQ ID NO: 100114 - DNA, 2007 bp, Oryza sativa
  Clone ID: PAT_MRT4530_97862C.1
ccgggatgcccgagccgcagccagctgctgcgccccaaatccccgatccgccacactcacgcgcggccggcggttctgccggagagcctcccctccggccgccgccatgccgccgcctctccaggcccagcgcctcctcctgtcccaccgacgcctcccttctccccaccgccgccgcttcaccgccgtctcctccctcccgtcctctcccgccaagacggtggcggccgcggcggcccacgccccctcctccatcctctccatccgcgagtcgctcctctccggcgagaggaccgcggcggagatcaccgcggaatacctctcccgcctccgccgcaccgagccgagcgtgcgcagcttcatccacgtggcggacgccgccgccgagcgggaggcggaggagctcgaccggaggattgccaccgaggggctggatgcggtggggcctctggccggggtgctcgtcggcgtgaaggacaacctctgcaccgccaatatgccctccacaggtgggtcgcgaatactggacggttaccagccggcgtacgatgccactgcggtgcggcggcttcgtgaggcgggcgccattgttgtggggaagactaacctagacgagttcggcatggggagcactacagagggctccgggtttcaggtcacaacaaacccttgggacgattcacgtgtgcctgggggatcctcaggtggttctgcttctgcggtctctgctagacaatgtgtggtatccttagggagtgatacaggtggaagtgtgagacagccagcatcattttgtggtgtggtagggttaaagccaacctatggccgggtttctcgtttcggcctcatggcttatgcttcatcactagatgttgtgggatgctttggttcatcagttgttgacactgcgacaatcttgtcagtaattgctggccatgacaaaatggattcaactagtagctctcatgatgtttcagactataaatcagagttggtcccactagatttgctagaatcaaaaccattaaatggtatgagaattggaattattcaagaaactcttggtgagggtgtagaaactggagtcatatcatcaatcaaggatgctgcttctcacttggaacaattgggatcagtggtggaagaggtttctctgccttcattttctcttggcctacccgcatattacatactggcttcatctgaagcctcttctaatctatcacgctatgatggtatcaggtatgggaggcaggtttcaggtgatgacttgaatgaactttatggaggttcccgggctaacggtctgggtcacgaggtcaaaatgagaattttgatgggaacttatgctttatctgctggatactatgatgcatactacaaacgagcacaacaggtaaggacactggttaagaaaagcttcaaagaagctctggaaagatacgatattcttgtttcacctgctgcgccatcagcagcttacaagataggtgaaaagataaatgatccattagctatgtatgcaggagataccatgacggtgaatgttaatttggctggtctccctgcattggttgtgccttgtggatttgttgagggtggatctgcggggctcccagttggacttcagatgattggatcccccttcagtgaggggaatttgctgagaatagggcatatctttgagcaaacgctccagaattacagttttgtcccaccattgctggcagagagttagctgcaatgcgccatcaatcatctctgccttgttcatggcttcgaggccctttctattcaagacaagattcttttcatgttgtatattgaccgagacaatttgttaaatgcttgtataattgattgggttctctcgtgtaatagttgtttagaattgagaccatgtgatggcccatctggaaacagcacacacgcggccaaaattggttcatattaattatgttttttccctctatatattggataataatagtagagggagggacaggg

SEQ ID NO: 100115 - DNA, 270 bp, Oryza sativa
  Clone ID: PAT_MRT4530_97863C.1
atgcaggctgcagctgagctggagaagcagctgaagtggccgcaacctgatcgcggctgtggccgcagaagatcccggagtccgtggcacggaaggtccgcatgggcccacgcgtacagcatgcgtccacgtggtggggccgggtgccacgtcgcctacacgttcttctgccaaccaaaccggctcggcccagatcggcttcacggctcgagccaggggaaggttctggagatggctgcggcggcgggctctggctggactggagtatag

SEQ ID NO: 100116 - DNA, 1158 bp, Oryza sativa
  Clone ID: PAT_MRT4530_97864C.1
atgatgatgagtagtagtgccgatcatttcagcaacaataataataatcaggcgatgtacttggagcaagatgaagatttctcccagatgatcatggagctgtgtgattttgatgcgagtagcacgacgcaagctcgccatggcggcgaagcagcagcagcagcagctgggaacgcgagggcggtgctgacgtacctgacatttctggagcagaagatcggccacctccgcggcataatctcgtcgacgccgaacccgccgccgcagatcgtcgccgccgagctcagctgcatcgtcgtgcagctcgtctccatctccaagaacctcgccgcggcgcgccgcggcggcgacgacgcggacgcggacgccaagcacgacggcagcagcgacgccgacgagggcgccgatggcgacggcgagcgcgccccgccgcggggctcctacgaggtggtccagatcgagaaggaggagatcctggcgccgcacgtccacttctgcggcgtgtgcggcaagggcttcaagcgcgacgccaacctgcggatgcacatgcgcggacacggcgaggagtacaagtcggcggccgcgctggccaagcccggcggttcgccgtcgcgttcgccggcggcggcggacgcggcggcgaggaggcgcttctactcctgcccgtacgtggggtgcaagaggaacagggagcacaagagcttccagccgctcaagacgcccacctgcgtcaagaaccattaccggcggagccactgcgacaagagcttcacctgccgccgctgcaacgtcaagaggttctccgtcgtcgccgacctccgcacccacgagaagcactgcggccgcgaccgctgggtctgctcctgcggcacctccttctcccgcaaggacaagctcttcgcccacgtcgccatcttcgacggccactcgccggcgctgccgcccgaggactacgacgacgacgccgcctccggtcagctgccgcacgccgccggcgaggcagtgggcagaacggtggacacgaaccgcttcttctccgatggattgatgatcaaaggcagcatggaggatgagcgaggaagcctctcgccgatggggctcgattactgtgaattcgatggaattgatctctttgcagcagcagcattcgatttttga

SEQ ID NO: 100117 - DNA, 180 bp, Oryza sativa
  Clone ID: PAT_MRT4530_97865C.1
ggaggaacccagtgctccaaccatgccaacccaaatgcgtgttcaaagaaacaggagaagagcttggatgcccacccgagagactgttcggaccatacctgggcgacacctggggcagtgcaaacacacacgaccacctagagtatactcgctgggcttgccaagacagacatggcttcc

SEQ ID NO: 100118 - DNA, 440 bp, Oryza sativa
  Clone ID: PAT_MRT4530_97866C.1
gtaaaaaaaaaaaaagatgataaaagtatttgacttaggtcaatggagggagtagctaagtttaccacggttatcggctttatcaaggtaatacaatcgacgaaaccgctcgggaaaccagccaagttagagaaaagaaaaccgaaagtccaattttcagcaaatttgtttgaattctaccccctttttgtgtttgttagtaatcgaagtgaaaccacggttaccggccgagccaaaagcacttaagaagttatgattccctgcagacaccacatattaccaaatgcagatgatgcttgtctgtctgtattttcattgcccaaaccccctcaagttaaatcagagacaactgaaaagagaagatacacaactacacttcttacatgacacatcaaaaccaaaaaaaaaaaaaaaaaactcgagactagttctccctcgtg

SEQ ID NO: 100119 - DNA, 788 bp, Oryza sativa
  Clone ID: PAT_MRT4530_97867C.1
tgtgctttcatcatccgtcaaaaaaccgaacgaaaaaaataagatctgtccgtaaaaaaaccgggtggaaaaaagaagaaaaccaaacctgtccgataaaaaagggaaaaaacaaaaaaccgggcgaaaaaatcaaatctatccgatcaaaaaaaactgggtgaaaaaaaacctaaacctgtccaatccaaaaaagaaaaaaaaacggatctatccattaaagaaaaacgaatccgactccgggtaaaaagaaggacgaaaaaaataaaaaaaaaaaaaaaaataaaagggagataacaaagaaaaaaggtgcataaaaataaaaggaaaagtcgcaaaaaaataaaagaaaaaagaaaaacaacaacaacaacaacaaaaatctgtttcccctaagtggaaaaaaaaaaaaaaaaatagaatgggtgaaacaaagtctgatttaaaaaaatcagactaactatttaaaaagagaaaatgtatgagaaaataaaaatggttcaaaaaatgcgtgagaaaaaagttagaaaaaagcgcaaaaaaacaccctaaaaaacgtgcacgaaaaaaaaaagcaaaaaagaacattcgaaaatacaagcaaaaaaacacgcgagaaaataattatctgaaaaaataggcaaaaaacacgcgagaaaaaaagcaaaaaagggggagaaaaatatggttttcgtcgtcagtaaaaaaagcaaaaaaaacatgctaagaaaaaatattagaaagaaatgcgccatttctaaaaaatggtttgagaaaatcgcgaacac

SEQ ID NO: 100120 - DNA, 436 bp, Oryza sativa
  unsure (1)..(436): unsure at all n locations
  Clone ID: PAT_MRT4530_97868C.1
gccgccgccgcagcggagcagcaacagcaggcgagcgacatgggagggtttgtctatacccanatgatccatgcctacttgaaggcgattcctattcaagttgaactgacggttgttgggcaccactgactacacggtctgcattaggttcaccaacaccgatccatatcggtgcccttgtttcggatccgactgagtgagtactttggtccattctccgttgagctttcgagctacctgactggagagctctctagcgattacggttgagtcactgccgctctattcggcgattccgagaccttagataggaactgtgatctataagttattcacaggatatgggctattctatgagccttaggttgcgttttccctgatctattggctaattactgactgtagttcgtaaaagcggtttggtgcttgggtggtt

SEQ ID NO: 100121 - DNA, 219 bp, Oryza sativa
  Clone ID: PAT_MRT4530_97869C.1
tcggctgttgctgctgcctgggcggacccgatggcggtgcttgcatgacctgtcaggagatgaccactgccacttacagcttccttggcgctgccaccaacaaggggtctggtgctgcttccggaggatcagagatgggggcggtgaactgcagctgcggttgcaacacctgcaagtgcggttccagctgtcgctgttccttgctgcatctgctacttg

SEQ ID NO: 100122 - DNA, 188 bp, Oryza sativa
  Clone ID: PAT_MRT4530_9786C.1
cgggtaccacaccaccaattgcacttgcacacactcaatcacacaccaaccgggcctgcacgccgggctctagctagcttgccactggcagccaggtttgcagtgtgtgcacagcggttcatcctgcactcttccacccaattcctaaacggattctcaaacaccatgtcaaccggtgagcctcccag

SEQ ID NO: 100123 - DNA, 501 bp, Oryza sativa
  Clone ID: PAT_MRT4530_97870C.1
gatgactagacgatggttcgtggcgggagtcgccgatcaaacactgtcaaaaccgcatccggggcgtctacttctagcgccgagagtggcgcagtggaggcgggcacggagaaatccgatacgtacagcaccaacatgacgcaagctatgggagcagtgttgacgtatagacatgagcttggaatgaactacaatttcatacgcccagacttgatcgtgggctcctgcttacagagcccacttgatgttgataaacttagggacattggtgtaaaacagtattctgcctgcagcaagatccagaccttgagtatccctattattgatttttttttctcatcatgcttataaaaagaaaggagcatgccaattatgttgcctggtttagagaatctgagcctcttgattcttgaaatgtatgctgtcacttactgtgaatcacaccaactatatcgaagagaaattataaattctggtgatggctttttatcaaaataacta

SEQ ID NO: 100124 - DNA, 294 bp, Oryza sativa
  Clone ID: PAT_MRT4530_97871C.1
gttaaaaagctcgtagttggacttgggccgggccgcccggtccgcctcacggcgagcaccgacctgctcgacctttccgcgacgctcctgctactgccggtcgcctccgcccgtacttgaagaatagagtgctcaaacaaccatcgctctgatcatagcatggatacatcatagatccgtcctatgttgcttcggatcgataatgatataggccatcgggcatctattcatatcagagtgaatctggattagaagcgacactcgaacattccagagttcatacaaaaaaaaaaa

SEQ ID NO: 100125 - DNA, 302 bp, Oryza sativa
  Clone ID: PAT_MRT4530_97872C.1
atggtatacttgcgcgtatatggacgtcttcggtacacgttaaggaaattcgccatggagttcacagatggaaagagtcctacttggacaagactgggtcgtcattgtatcgtgccgagtccgatgtcttcgagtcctacttggagaccagttgacctgcgatataaaagggaccccgtgaggacctaaggcatcgaatctcatagccaacacatccaccacagcctacggagttgaagcctacaggagccaagtcgccgggagatctaatcggaccttctcgattacgatctcggcggtat

SEQ ID NO: 100126 - DNA, 367 bp, Oryza sativa
  unsure (1)..(367): unsure at all n locations
  Clone ID: PAT_MRT4530_97873C.1
atcctctatgaacagacatcaaggtcntgtgtcttgcgggtaagttggaggtgctgtactgggagaagccgcggtggaggacaacgtcggagctggtggcgacggaaagtccgctccggccgcggcggcggacctcggcagcggcggcggcggatggggccgaggtcggaaccggacacggcggctctggcggcggggaagaagcagcggctccggcggcggggatgcagcggcagtccacgcggggaagaagcaccggctccggcggcggcgaagaatcagaggctccggcggcggcagtccacgcggggaggatgaagtcttcacccgtggagcgatgtcttcgcgggtagaggaagaggagtga

SEQ ID NO: 100127 - DNA, 338 bp, Oryza sativa
  Clone ID: PAT_MRT4530_97874C.1
gtgggcagagcccaataacctctcccaggttgacgacaatatacccccttatcgcaaggcacggtaaaggagatttgccgggtccgtgcaaccaaacaaagggtgccatgaaccctaaggcatcaaattatgctaaaagcggaacatccagggacctgggcgcctccagcactatgcatggccccccgcgcgaatccccgagtaacgttggttggcccctgtggaggaagaacacgtggacctcgttggtggtggtggggggcgggtataccaacatggtgctaactggcctggacacgtcccgggggaccggcacggggtcgagcgtcctctcctag

SEQ ID NO: 100128 - DNA, 218 bp, Oryza sativa
  Clone ID: PAT_MRT4530_97875C.1
tttgggggatttttgaaattttggggtcctacattttttttatattttctttggttttatgacaaaggggaaacaaaactacatacagctgttttaaagaaaaaatgaaacaccaaaggttttcagatgaaaaataacaacgagctgcagggggttgtttgacaaaaatattcaagggggcagaaataagccacttttaatttcctgggcccggaaaa

SEQ ID NO: 100129 - DNA, 2697 bp, Oryza sativa
  Clone ID: PAT_MRT4530_97876C.1
cccagacgtagccgtgcgcgctggaggaggtggaggtggaggtggtggtgtccgctgccccccgcaataaataagcctacctccatgttcccacccccctctctctctcttctccgtctcgcctcgtcacctcacctcggcatcacccaggtgggagggggtccgccttgacttttcgtgttcgggtttgggtttgagtgccgcatctgcaagcttgtgcgaggggggaatctctcttccttgctgtggtggcggcgggcgggagggcggcgttgatttcgttggggtttgcgttgcgtgcggaggacggggttgtgtttgtgtgtgtgtttgtgctgatttgggcattggtgttggtggtggaggaggatggggaactgcgtggcgaggagcgggacggcggtggatgcgggtggtgatggaggggaggatgggaagaggcggaggaggaggtggaaggcgccgcgggaagatcagctcgggatggtgcccggccggatcttctccaacgacggccgcagccggacggcgacggtgtacacgcagcaagggcgcaaggggatcaaccaggacgccatgctcgtctgggatgggttcggcggcgaggacgacggcgtgctgtgcggggtgttcgacgggcacgggccgcacgggcacgtggtggcgcggagggtccgcgactcgctgccgctgaggctcatgtccgcggcgcgcgacagcggggcggacatgccggccgccgcatggaggaaggccttcgcgcgcgcctacaaggccatggacaaggacctccggtcgcacccttccctcgattgcttctgcagcggaagcactgccgtcaccgtcctcaagctcggctcggatctctacatggccaacattggggactcgcgcgccgtgctcggctccagggaggccaccggcggcggcatggtcgccgtgcagctcaccgttgatctcaagccggatgtccccagcgaagcggagaggatcaagaagtgcaggggcagggtgttcgcgctgcaggacgagccggaggtgccaagggtctggctgccgttcgacgacgcgccgggcctcgcgatggcgcgagcgttcggggacttctgcctgaaagattacggggtcatctcggtgccggaattcttccactggtctctcacagaaaaggaccagttcgtcattcttgcatcggatgggttcttactgaagttacacaagctatgcacatacttggctgcctttgtagagtttgcactaacaaaaatcttgcaggtatgggatgtcctcagcaatcaagaggctgttgatatagtgtccgcgtccccaagcagatcaaaggctgcaaaatcccttgttgaggcagccactcgtgaatggaaaaccaaatatccaacatccaaaatcgatgattgcgcggttgtttgcttatatttggatggaaaaatggaccatgagcgtgactcaactgcctcattggacaacatcagtattgaagagggttcagttgcagatcctaatgaacctcaggagcaggagcccaccttaactcggaatttcacagttaggacagttgcaggcagcacgcaagagaagaccttagcaggggtggatgcgaggattgctggtgtagcgaacgaccaaaattggtcaggtctcgatggagtgacacgggtaaactcacttgttcagcttcctaggttttctgaagagagggcaattggctgagctgcccatcttatatttacccccgttattttcacctattgttctgaattttagcgtagttgttctagagaaaggtagatgtgggacgatcttgtgatttggtgcggtacttggcaagcgtttcagccactatgcatagaagtcgagttgcacgttttagcccaacaaaactgcacattgcataggacagaggctctcttttcacccatcttgaggcatgtcaactccatacctcgaagatgaagcacaaaagagcaggccattgctccaaatctgcaattttgctgggttaaaactaacaaaagacgacgccaaacacagtggctaaacgcacgccaggccccagtcacccctgggatgatattgtcgggtgacctgtaaattctccaccggcgcttgctttgcttttgtagagaggtgatgtccagaccattttctccgctgcatgcttagcttttgttgacacagggcggtgcgctctgtcgatgtcggattgccaatctttgccccctttgttttgttcgcggtctgtgcccttgcttttactctcgattcaaagaggcccttagccttaatggtggtgaactggtgactgatggtgcatccgtacaccaccgtacatggcacacgctgcatcttgtctgaaatggcatgtgaccggccgagcgttgctgcgctgtaggcgtgcgctggtgagcaaaatttgtccggcgacggtggccggccgacgcacgggcgggtgcaccgtgcaagagagatgcagggggagacaggcatccggcagaccggcaccgtaccactaccgacgggctgcacgggcacattcacgcgcacagtctcacgcacgcgcgcgctgttcatacgtggctcgttgctgttgcctgtctcggtgcgccagccatgggtggacgcgaagtgaccgctcggtgacttcggtccttcaccgatcactggccgctgagcatgcat

SEQ ID NO: 100130 - DNA, 430 bp, Oryza sativa
  Clone ID: PAT_MRT4530_97877C.1
aaatcgcaattccccaatccatattcccttcccttcctttcctcctcctccatctccaccctcccgccgccgccgccgccgccgtcgccgcggcacactccccgggaccagcagaggccgccgccaacgccgcgggggcaggtaaaaaggcgcgcgagacgcccgcctctgcccgctgacctagatcggtagggtttactcgggcgcccgggtcgttcgtgtatgggggcgtgggcggtgggggattaggctttcggggtcggggggtcgggaaggtgtctgatcggatgatgggtggctctgttctccttctggggtgcggggttagagctagggctgtcgcggcgattttattttattttattttagttgaatttgaccggaatttccacgatttggatgggtttgtattggttggattgtggtagag

SEQ ID NO: 100131 - DNA, 399 bp, Oryza sativa
  Clone ID: PAT_MRT4530_97878C.1
atggaggggagagcgggaggccgccgcttctcctcgacggacctcctcctccgccgacccgccattgcgccgggatccactgagccgccgctgcgccgccagggagccgccgacccgccgctgcgccgagaagtcgccggatctggcgaggagcaggagcgccggcgtcaccccgatgaggaggagtggcgccgctggtggggaggggcgtggagaggcaacgctggtgagggaggggcgcggaggcagtgccggtgggggagggacgcggagtcgacgcctgtgggggatgggcgcgggaaggcggcggcggtgggggacgggcgcgggaaggcggcggcagggatgggcgtggagaggtggtggtgggggaggagcgcgggaagatggcggaggtga

SEQ ID NO: 100132 - DNA, 1255 bp, Oryza sativa
  Clone ID: PAT_MRT4530_97879C.1
tttttttttttttttttttttttttttttttgcaaatccgactaaatcagatatacatataatgggtttatttaaaatcaccgactcaaaaaaacataaggatagaccatctaatgttggcggtttctagaaaaaatttgttaagtttagccattacacctgataattataagttattacacagaaaattccctatttcgtctccacgatacaccaattttattgaggtaaatattcattggtataccaaagaaataacgataacgtctttcaatgatattttcaaagtcttccgtacatttacagacatatgaaatacccagataaaatgaccaatatggtcaatacaaagcctttagacaaaccaacaagcataacaaggcttgggtaagaacaggtattatggggatggtaaaatggcattcttgttatgagagttaaatagtacatgataaattggctcccggtaggactccttccaaagcatattaacaagcatatccaaatggcagtagatatccagtttgactccttgtgagcaacccatacctgtaacaatttctaataactaaagaaggtaatttaccgatattgcgacgacgtttataaagaagtcaattaaggttgccgccatccacggggtcaacaagtccttcctgaaaggtagtccatcagtgatgacagtataaattacgactgcagccatcattgcccccaaaatgctgaaaataattctcccaattatgacaaaagaggactttctttcggatagatctccttgcctgaggaataaaagatcaagtggatcttgtgaaggtccggaagtttttatttcaaaaagcttcacaacaacataagcacatgtagcaatactgccaaaacagtacaacagaactacccaaaagaaagaactaatccaatttacttccttgtagataacccaagtcgaaatcgcagtcacattgacataaaaatcaatcagtgttgccaccaaccacggggtgagcagctcgaggcgaaacggcgagccgtcggtgacgcaggtgtacaccagggtgcccagcatgagagcgcccagcgccgcgaacaccgccctgtacacgcctatggatcccgccgccgccatggatgcgcccgctggccgccgcgcggtcgccgagggtatcaaacgaagtggtgtatcaaactaaactaccaaaaactcaccgcgagcctacaggtcgcgacgggggaattcgtcggcggaagagtcgtg

SEQ ID NO: 100133 - DNA, 811 bp, Oryza sativa
  unsure (1)..(811): unsure at all n locations
  Clone ID: PAT_MRT4530_9787C.1
ccccggcgcgcggtgccgaggcggcaggggcgcgcgctctggtggaatacccatggctatagctttgcatcctgaaaggggagctgtggaaagcaagaagcctgatattaaacaacggagagtggtcgtcactggcatgggtgtcgtgacaccgttaggccatgatcctgatgagttttataacaaccttctacagggtgttagtggaataagcgagatagaagcatttgactgctccaagtaccccacgagaattgcaggagaaatcaagtccttctcaactgatggctgggtagcaccaaaattagctaagagaatggacaagttcatgctatatttgataactgctgggaaaaaagcattggaaaacggtggaatcaccgaagaagtcatgaatgagttggacaaatcgagatgtggagttcttgttggttctgctatgggtggcatgaagatttttagtgatgcaattgaagcattgagggtatcctacaagaagatgaacccattctgtgtaccttttgcgactacaaacatgggttctgcaatacttgcgatggatctgggctggatgggcccaaactattctatctctactgcttgcgccaccagtaatttctgcatactaaatgcagctaatcatatcagaagaggggaaactgatgtgatgctttgtggtggttctgatgcaccaattattccgattggattgagtggttntgtggcttgcagagctctttcacagagaaataatgatccagcanaagcttctcggccgtgggatgtggatcgtgatggatttgtaatggga

SEQ ID NO: 100134 - DNA, 1980 bp, Oryza sativa
  Clone ID: PAT_MRT4530_97880C.1
atggcgctagctctccctactagacctgccaacttcgtccaagctcgcccacccttcgtcaagctagctacatgcaccacctacatggcgtacttctacctcgccgccgcagcatgcctcgtcggcgtgttcctcaacgcgcctcacgccaccgacgcgcagcccatgccatggcatcgctgcaacacgagcagcggcaactacacggcgaacagcacgtaccaatccaacatacagtacctggccacctccctcccggcgtacgcctcttcctccccctccctcttcgcctccggctcctcgggcgcaccccccgacgccatctacgccctcgcgctctgccgcggcgacaccaccaacgcctcctcctgcgccacctgcgtcgccgcggccatccaggccgcccagaagcactgcgcgctcgtcaagaccgtcgccatctacgacgacccctgcatcgtccgcttctccaacctggtgttcccggtcagccctccctataacaaaggaatgttcgtcgcgtgggacgacaacaatgtcagcgcggcggcggcggccgcgttcgacgccgccttcgcccggctggcgaacgccaccgccgagcacgcggcggcggactcggtcaggcgattcgccacgggggaggaggcggcgctcgccgtcgccggcgaggtctatcccaagatctactcgctggcgcagtgcacgccggacatgtcggcggatgcctgccggagctgcctcgaggatatactcgtgaggatggtgcccacgtatttagccgggaggaagggcgggcgcgtgttgggcgtgcggtgcaacttccggttcgagacgtatcctttcttcttcggccagccgctgttgcaactcccgggctcgccggcgtcgtcttctgctccggtgaacggaggtccgtcggaggctcgcgcgggtgacatgcaaagtatcggctcgctcattcttgatctgtcaacactaagagttgctacagatgacttttctgagcacaaaaggcttggtgaaggtggcttcggtgtagtgtacaagggagacctacctaaaggtcaagaaatagcagtgaagaggctcgcgaagacttccaaacaaggaatagaagagctgaaaactgaactacttttggttgctaagctgaaccacaacaatcttgtcaagcttattggcgtctgcttggaagaaaatgagaagatacttgtatatgaatatatgcctaatagaagccttgataccattctttttgatgcgcagaaaatcaaagagctcaattggggacagaggttcaagatcataaatggaatagctagagggttgcaatatcttcatgaagattctcaactgaagatagttcatcgtgacctcaaagcaagcaatgttctgttggattctgcttataatcctaagatttctgattttgggttagctaagatattcgaaagggatcaatcaaaagttatcacccatcgtatagctggtacttatggatacatgtcaccagagtatgcaatgcgtggacaatattcaatcaagtcagacgtgtttagctttggtgtcctggttttagagatcatcacagggagaagaaactttggctcctatggttctgatcaacaagattatgatctcataaatgctacatgggagcactggactagcgataaagccctcgagttgatcgatccatcattgggaaatcactatccagttgacaaggtgctcaagtgcatccaaattgggctgctctgtgttcagccgaaacctgctgataggccattgatgtctgctgttaatgtcatgcttactggtacaatccgtctcccttccttgtccagacctgccttttggtttcaggagattggtgctagctcagatgtaaattcagagcagaacctgcttgacccacacaactcaacgaaaatgtatcaaagtgaagcaccgatcacagagcttgagcctagataa

SEQ ID NO: 100135 - DNA, 423 bp, Oryza sativa
  Clone ID: PAT_MRT4530_97881C.1
atggagtttggatgggccctacgacggcctatgcggcttccagattcacctaggcacgagaggggactgcccgctgccttgcgaggagtgggggtaaaacctgagtgggtagtactcagtcttgctctcttttcccccacaccagagttgaagtccttctcagttgaagatgtctcgaagagacatggagtaggtagcgggaggataaggctgatgtggggtcggctgacattgggttttgacagtgctgagaggtgccctcctcagcatgacttcatcaccgatggacttctcgccgctgcattgacatggagctacaactgtgtcatccctttggaccacagcgtcaccgctctcgtcgtctccatcgccgcccgcacatcgacatcctcgtcgtctgcactggtgatcttcagctgctag

SEQ ID NO: 100136 - DNA, 485 bp, Oryza sativa
  unsure (1)..(485): unsure at all n locations
  Clone ID: PAT_MRT4530_97882C.1
acgctcaccctaggcctcgctcctctccggacggagcctgggcacggccgcacggccttctccccctccgccgcacgctccacgcgcgcgcgcgcggnggcggtcgaaggccagggccccgaaggcacgtcgagcacacagcctcatctcccctccccgatcccgccgctcgctagcgcgcgcgccgggggggggaagggtgncaggatttcatttcctctctgaagaagagtcatagttcggatgaagatacgcaaatcattgattccgagatctactattacgcatagaanttttatgaaaaactgctggcgggggagtacaaaggcactgatggccagagctacagctgcccattttgcgnnggcntgaaaaanaangattttgncctcctcnntcttattcaccatgtctttggagaaggccctccgtccaaacggcgggctcgacttttgggctccaatcctccccttgccaagcccttg

SEQ ID NO: 100137 - DNA, 352 bp, Oryza sativa
  Clone ID: PAT_MRT4530_97883C.1
catcaacttcaaacagacctagccgctgatctagatggaatttcgaggcccataagtacttgttggaaagcttatgtagtctactttcatatggttttggtcccacgtcaaaattcctaccgatctgctaagaatctgcaaaacaaaccacggattggacttctcagcgaggtcatttgggttttggcacggttaataaccagaggagatgtggtgctgcgattgcggggctcagtagtgtgttcgttcagaagccagatcaagttgtgtcgggactccacccaaatcgattgtttatcaatacctattggaagatcgggacttaacaatctcattagacttcccccgccag

SEQ ID NO: 100138 - DNA, 303 bp, Oryza sativa
  Clone ID: PAT_MRT4530_97884C.1
atgacgcggcggcgtctcttcctcccgccgccgattcaaactgcgaccgccgccaccaatcccgactgccaagaaatgctagtcctccggcgatctccgccgccgccacctgaggcacgccaccggacccatgtccgtggcttcgtcttggaagggccggaccggggggccgctttccgccggcggcgactccgcctctccacgccgccgcgcaagttcggcagtggcaacagctttgacggcgacgataagccctgcgacagcttcaacggcaattggcaagctccacgacgacagctttga

SEQ ID NO: 100139 - DNA, 762 bp, Oryza sativa
  Clone ID: PAT_MRT4530_97885C.1
attatcttgtagtgcgtgtaacgtgtgtggcgctagggtcacgggaccagtgacgactgtcagtgagccagtgactgaaatcgatcgatcgatcatatacgtgttccgacggcgaccggccggccggtgcaggagcagccgagggggacaccgaccgtgcaatctaggaaccgtccagtttggtacaccaccaccactcccagttagtagtacgcaatgcactgtggtcgaattgaactcgatcgaaacatttgtggggacgtacgtacgtacgtacggtgtgcgcgcgcgcgcgcgcggccgccggcgcagataattgttgggggggaggtagctagggcccaaatagatgtccgtacagcacatttgtgggagtagtctctggttgattaatgtggacttatatataagatgaacaagccccgtagaccggatatagagggtattgaggtgtacgaggatcgacgagatcgtagtcgagttggttcgactagaccacccggcgacttggctcctgtagacttcggcttcgtaggttgtggtcgttgtattggctatgagattcgatgccttaggtcctcccggggggtcccttttatatcgcaggtcaggtggtatccaagtaggactcggagacatcggaccctgcacgatacagtgacgacccagtcctatacgagtaggaatcttttcattggtggactccgtgatgaatttccttagcgtatacagagaacgtctgtacacgcgcagatgtaccat

SEQ ID NO: 100140 - DNA, 528 bp, Oryza sativa
  Clone ID: PAT_MRT4530_97886C.1
cggcacgaggatatcaggttggccagcagcaacagatgccgcaagctgcctacaatcaaggtcagcaggagcctatttctcaagctgcctacaaccaaagtcagcagccagcgcaagccgcgggtgcctacaatcaaggtcagcagccgcctgtttctcaagcctcatacaaccaaagtcagcagtcaacacaagctgcaggtgcctacaatcaaggccaggggccgtcaatgccccaagcttcctataatcaagttcagccgccacaaatgccacatgctacttacaatcaaggtcagcagccaccaggaatgaggatccctcagggtcaggtgcaacctcagcaatcaccgagctttcatcaacccgctcaggtttcacaagtgctgcaaggttcacagtctcaaggacttcaaatgccgtcacagcaaggccaactccagcatggcttccatttgacgactcctcagggaaaacagccacatcatggccatgtaggtcctcagttgagccaagtgtcacttgggc

SEQ ID NO: 100141 - DNA, 540 bp, Oryza sativa
  Clone ID: PAT_MRT4530_97887C.1
gccatcgagggagatgaacggcaaggagctcgacgccgcaacatcaccgttaacgaggccacagtcgctgcacgctccggagcggaggcgccaggtggctacggccagcagcggcggagcggaggctacggtgcaggcggctacggttgtgttggcaggcaggcaggtggctacggccaagcagccagtgaagtgcaggctacaggcggtgccaggtggctacaggtgcaggccagtggtgacaggcagctacggtggtggctacggcagccagcaggcaggcaggcaaactccgacagggaactggaggaactgagcaggctcggggccctcatggccaagttatcatatctatctaatcgagctaccatcatcatcatccgatcgttatcatcgttagttttgtgtggaactatctagtttgtgttaactgtgtggttgcccatctgtgtttttgatcgcaagaagaaagctcgtctcgtttgctttgatcccatcgaatgaatgaatgaatcttacgtgtgcaaaaaaaaaaaaaaa

SEQ ID NO: 100142 - DNA, 264 bp, Oryza sativa
  unsure (1)..(264): unsure at all n locations
  Clone ID: PAT_MRT4530_97888C.1
ggcggcgagtcgccctggctggcggcgatggtgggggcatcggtgatcgtntccgccgcccgcacgcctcatgctccgccaccacgaggcatatatcgagcgcgcattgcgattttncctttacccttctgggtttttnttctagctaggcaaggcagccggctaatcacgccgccgagatcgccggagcccggaggccgccgcccgcntaggcccgtntccacccagcgtctcaactggtcgactcggtggtgatgctccacn

SEQ ID NO: 100143 - DNA, 462 bp, Oryza sativa
  Clone ID: PAT_MRT4530_97889C.1
cccaagcgtgggctcttggagttaatgctactggtatatgccacatgggcgacattgcaaggactggtgagggagaacctgaatcaacttatgcctgagtggctcaagaatcagctcgcgttgatcaagcatgttaaggaggaagaggaggagatgtagctgaagaagaggcgaaagctgctgcttctgggcgtgagtctagaggactgcctaaactacgaaacatgcttgaacctaccgtgccggctctgatatgagggctgtgaccgccatgtagtggaccctggtgtaaacaactaccactaccggcagcagtacctgcacttattattctgcaacacaacgggggctgacgcgtcctactgcataatgacgctgttgttgaaccagaaactctcggcgagaggaaaacgaccttacgcgctctgttatagcttaattgttgcactgagctatctcatg

SEQ ID NO: 100144 - DNA, 1001 bp, Oryza sativa
  Clone ID: PAT_MRT4530_9788C.1
atttgccagtcgccacatctccctatcgtctccgccgcaagcccgcaagcgaagatggcgacgccggcgaacgccaccacattctccggcgaggtgtgggcggagctccgcctggcggactccagcgacgtgccccacatccacgccctcatccaccagatggcggagttcgagctcctcaccgacctcttcgccgccacccacgagctcctcacctccacgctcttcccctcgccgccgcgccctcccttcacctccttcaccgccctcatcctcgacctctccccgtccccgctccccgcctccggcccctccaccatcgcctcccactgcctcgacctctccgcgtccccgctcgccgacccggaggccgccgccttcgcctcccctcgcggcggcgggcgcgtcaccgcgggcttcgtgatctgcttccccaactactccaccttcctctccaagcccgggctgtacgtggaggacatcttcgtgcgcgcgccgtggcgccgccgcgggctcggccggatgatgctgtccgcggtggccggcaaggccgccgagctcgggatggggcgcgtggagtggtgcgtgctggactggaacaagaacgccatcgacttctacgaggggatgggcgccgaggtgctcccgcagtggcgcatctgccgcctcaccggcgctgcactcgacaagtacaaggggaaccaggaggaggggggaggcagcaaggcggcggagtagatcggccatggatggaaacgtcgattcttggctgtccaatctcgagtgagtgattagtgataataaaggtagtggattttggttccacttatctgctccttgtggtgatgtatttcttgatagtgattcagtgcattggatcggttcttcattgctatgaattacagtgatgttttagcttgattatgtcatgaacttgatctgaaacatttcggtatcaaattcttgattgaaccaaaaaaaaaaaaaaaaaaaaaaaaaaa

SEQ ID NO: 100145 - DNA, 341 bp, Oryza sativa
  Clone ID: PAT_MRT4530_97890C.1
agtacttgatagaaagctctcggagtcctctttccaacggatccagcctcatcgtcaaattccatcccaatcatccgcaattgaagaaacaaggtgttgcgtcacctgtaatgggcctatgggcttgtaacttcgtttgggaccccggcccaagtggggcctatgtggggtgcgacccaaccagatggagcacgaccctagggtccccttggtcgtcctcccacctctttaaatagttaggaataaggttgatctccaccgtcaagatcaaccacccacggagaggtgtattgtagcgcccgttccgtcgtggcgcctagcgggaaaatcatctcttaaaa

SEQ ID NO: 100146 - DNA, 480 bp, Oryza sativa
  Clone ID: PAT_MRT4530_97891C.1
atggccaaggctgaagttggccatagggtttgtgttacaggagcaggaggatttgttggttcttgggtagtgaaggagctccttcaccgtggctatgttgtgagaggaactgcaagagacccctctgctcagaagtacccccatttgcaaacacttgaaggagcagcagagaggctatctctgtgctacgctaatgtcatggactacaacagtctccgagttgcatttgatggacctcctgggcgctttgtacctgttgccgttgagggaaccaagaatgtgatcaacgctgcagcagacgtgggtgcaggtcgtgtggtcttcacgtcttcctacggtgctgtacacatggacccaaatagaagcctcgacacagttatggacgagagctgttggagcaaccttgacttcggccttcgctaacgggaacagtggacagcttagctggtaaggagcaaccaagaggcaagagcaagccat

SEQ ID NO: 100147 - DNA, 324 bp, Oryza sativa
  Clone ID: PAT_MRT4530_97892C.1
tggttttaggaggcaacacgccgccctgcgccggcgtcgttgtcgccgtcaccgtctccgccaccgtcagattcttctaagcggcgatggccatggcacggcgtttccgccttccgtcttctttcctcgttctgtcccttctcgctccttcttcaaccgttcgatgacgcctctttgctcttggtcgtggtggttgtagttttggtccgtctgggtatgtcttttgttttattcctctttttcttttcttttttttttctctctctttctttttcattttttcttcttcttttcttctctgctttttttcttttttactttttt

SEQ ID NO: 100148 - DNA, 321 bp, Oryza sativa
  Clone ID: PAT_MRT4530_97893C.1
atggcgagaaaagcgttgcttgctcttaccctcagccagcagatgatctgctggctagaggagaaggagacggcggaaggaaggaggacgagaaaagaagaacacgggggtttttccgcggaaactgcggtagaaatcggagagagaatccgcggcggagatagcggcatcgagattcgtgctgtttgggggctgaggctccagtggccgatgaaaagcagcgggtctgggctcatcaatggttgcgtgtctacgttggttttgccctgcagcgcaaggccggacggtgcaggaactacaagttgtatctacaactactag

SEQ ID NO: 100149 - DNA, 289 bp, Oryza sativa
  unsure (1)..(289): unsure at all n locations
  Clone ID: PAT_MRT4530_97894C.1
aaacaaaagaaaaaacaaaattctgggaatggngcagcagcagaagcaggnncccggtggnggcggcggcggcgtcagantcgtcgcgaggntctgcccctgcgcaccaccgccaccaccacccgacgccgccctcaacttccaggtcgccgccctcaatnaccccgccctaatctccttcatcccccgtngcccaaccgnatccgccgncaccgncgcggcctctggctaggagatggccccaaggataagcagcagcagcagcagcagaagtacagggtcgatggct

SEQ ID NO: 100150 - DNA, 379 bp, Oryza sativa
  Clone ID: PAT_MRT4530_97895C.1
cagtaacgtgacagcatgaatttgaccattacttcggtagcttaaaggcgactttacaatttgcttcaggctcacaaatttcaaaggctgataaccaattctacagctttcagaaaacgtcataatttgctccagcctcgcaaagtcgtagcagcaagaggaatgtgtcatcttccagacataacaagaaattcacagttttctccaaaaatttctgatcccagaagcaaaagatttcaggctcccaaaaagacctgtcttcggttcaacctccgggttctcttctctgtccagtacatttgccttgaccgtcttatcaccttcaattggatctgatacaggtggttcactgacattcttaaaccttgctggactattc

SEQ ID NO: 100151 - DNA, 602 bp, Oryza sativa
  Clone ID: PAT_MRT4530_97896C.1
tcgcgatctagaactaggcgcgtcgaggagagagagagagagaggaggaggaggaggagagcggcggcggcgatggcggggaaggggttgaacgcgacgggggagttcttccggcggcgggacgactggaggaggcacccgatggtggggaaccagctgcgccacgccacgccggggctcggcatcgccatcgtcgccttcgggatctacctcgtcggcgaggccgcctacaaccgcctctaccgcccctccggcgaccaccaccaccactagatcgcgtcggcggccacgcgcggagacccgcgccgcctccccgaggtgaagtggttggagcaatctttaccaagcaccaatgttgttgatcttttccagtttgagttcataaggtctgccatgaggcccatgaccatcatgtaatttgcaaccagggagacatgaatcatgtacttttatatcaatgttctgtgcttataatccagcatttggaaattggaagtgacacttataattctgaagttatgtgaattcttccaaaaaaaaaaaaaaaaaaaaaaaaaaaaaaaaaaaaaaaaaaaaaaaactcgagactagttccctcgtgc

SEQ ID NO: 100152 - DNA, 387 bp, Oryza sativa
  Clone ID: PAT_MRT4530_97897C.1
atgggctgcacgcacactcgtcacagtaggaaaaggtatcagcgtcgtgttacgacccgacgcgccgaacacctgcaggatggacaccccgtcgtgcccgatggcacgtacccgtatgcctcgaattgccacaccccagaagttaccttcacggcccatccattacgggcttgttggccggccgttctctcttctcctcgtcctcctcgtgcggcggccggggcgcgcatgccaagctgcaacggcaaatgtagcgacagcacgccggcgaccacgcacgtacacctacaaatggcggccgcgcgccaggaagacgtacggcaacggcaagacgtacagagagcggggggcgtttatattcgaattcaaggagcagcagcagcagct

SEQ ID NO: 100153 - DNA, 5811 bp, Oryza sativa
  Clone ID: PAT_MRT4530_97898C.1
atggagttctactccgatctactcaggacgtctgcagagccttcgtctgcgttccttccttatcaaggtattcatactttccgacctgttcctggttcctttccctttggattctttgttttccaatatgggaggaatcgacgatcggtgctgcaaaggtttccaacatggtccattatgaattatggtatgaagattggatctgctatattctggtttgggataacggggtttgatcttggtaaacaagaatccttgggtccgaaggtttatcaagatatcctcggattagatgttttgaggaaaatatctgttacgattagttttcctagcctgtggcaatatatacctgcagaagtaagggaggcaattacacaaaattctcgatctcgtcacacgcctcgatcaggttctaatctagggttcttcctccgagtccttgcgagtcttcccatggcagctactggtggtgggggcgacaaagggactatcaatgcgatagttacccgcccgaagctactcggtgctgcgatggcgacgtccaagaacatgaggaactatgaggatctggctatccaggttgttcaatctgaaaatttggaggaacaaagttctgatctgaagactcaaaatccagcgcgggataagagtctgactgggggagaccatgagaatacttcatcaagccaacgcccgacagcgttcatgcaaggtgaaataacagttgaagatgatgatgcagtggagattgagttggaagaggatgaagtgaagaaggccggtcaatggactgttcttgcgaggttctattcccttaagttccctaaccagtgcagaaggagatcacaagttcgttcgtggcttcatagaggcgatgcactgctagtcgcagactttaacgggttggtgagtccttctatggtacccctagaaacagtgcctatttgggtcagaatctacgatcttccccttgttatgatgaacaaagaaagaggtgtaatctatggcagtaaactaggcaaggttcgagaggtggatgttcaggaggacggctgtaataaacatgattttttcagaatccgtgtggatctcccagtcaatcgtccactgaagaggatgttagctatcaaaatcaaggtgaagggggctgaggaaattcggagatttaatctgagatatgagaggataccacacttttgtttcttctgtggatttattgggcattcagataaggagtgtgaaaaaaggcttgcaaatgaggaagatcccctgatgttttctgttgaacttcgctgttctcctttaaaaccttttgagaggaaggtgagtaaagtgaaagcttttcagagttatggggttcagaggaagttgtccttcagaggtgcaggaagcgcaagctcttcttcggctggtcagatgcagagagttaatatccacgaagatactctaccaagagttgatgcatttgatgggtttgattccaaagagggaaaaggggaagaatcggttgatgcacagttagcggataaagctaatcttctgtctgtttctgagcagaattcctcgaagaagaggagtgagcacaaagtcgggcctgtggaggagtctgcctctctgccgtcaatggaaatgatcccagcaatccgcaatttgaattctcaccaagaatcccttgaagaaagctctagtgcagactgtattagtcctactaagaggaaggctttgacggctcctgttgctaagggcttggggactgtaaaacaagctatcctagagtatgatcagaccaatacaggagccgtgtcaggggtgacaccaagagcgttgaagcgccttaaaaagggagcggatatgaatgctaatggtaaagatatggaagcaaccagccccggggctgctggagcaatgagttgtctagcctggaactgtcgcggtctggggaacacggcgacagttcaagatttgcgtgccttaatccaaaaggcaggttcccagttagtctttttatgtgaaactagacaaagtgtggaaaagatgagtcgtcttagaaggaagttggcctttagaggttttgttggtgtcagtagtgaaggtaagagtggtggtcttgctttgtattgggatgagtctgtttcagtcgatgtcaaagatattaataaaagatatattgatgcgtatgtgcgattatcccctgatgagcctcaatggcatatcacctttgtgtatggcgaacctcgggttgagaatagacatcgtatgtggtcactactcaggacaattcgacagtcatccgctctgccttggatggttattggagattttaatgaaaccctttggcagttcgagcacttctcaaaaaacccacgttgtgaaactcagatgcagaattttcgtgatgccttatatgactgtgatttacaggatttaggcttcaaaggggttccgcatacatatgacaatagaagagatggatggagaaatgtgaaggtcaggttggatagagcagtggctgatgataaatggagagacctttttccagaagcacaagtctcacatcttgtgtccccctgttcagatcacagtcctatcttgctagagttcatagtgaaggataccactcgaccccgtcagaagtgtcttcattatgaaattgtgtgggaaagggaaccagagtctgtgcaggttattgaggaagcatggattaatgctggtgttaaaactgacctcggcgatattaatattgccctcggtagagttatgtctgctttgagatcctggagtaaaacaaaggtgaaaaatgttggaaaggaattggaaaaggcaaggaaaaagttggaggatcttatagcgtcaaatgctgctagatcttctatccgccaagcaactgaccatatgaatgaaatgctgtatagagaggaaatgttatggcttcaacgctctcgggtaaattggctaaaggaaggagaccgaaacactcgtttctttcatagccgcgcagtttggagagctaagaaaaataagatctctaagttgagagatgagaacggtgctattcatagtacgacatcggtgctggaaactatggctactgagtattttcagggagtttataaggctgatccgagtcttaacccagaaagtgtcacccggttgttccaggagaaagtcacagatgctatgaatgagaagctctgtcaggaattcaaggaggaagaaattgctcaagcaatatttcaaattggaccccttaaatcccctaggccggatggctttccagccagattttatcagagaaattggggcaccttaaagagtgacataatcctggcagtcaggaattttttccaatctgggttaatgcctaaaggagtgaatgatacagctatagttcttatcccaaaaaaagaccaacctattgatttgaaggattatcggccgataagtctttgtaacgtggtgtataaagtggtttctaagtgtctagttaacaggttgagaccaattcttgatgatctggtttctaaagagcaaagcgcattcatacagggtcgaatgataactgacaatgccctattagcgtttgaatgtttccactcgattcaaaagaacaagaaagctaacagtgctgcttgtgcgtataagttggatctctcaaaggcctatgatagagtagactggcgatttttggagttggctttgaacaagttgggtttcgctcaccgttgggttagttggattatgttgtgtgtaaccacggtgagatactcggttaaattcaatggaaccttacttcgctctttcgctccaactagaggtctcaggcaaggagaacctctgtcgccattcctatttttatttgtggccgatggcttgtccctcttgctcaaggaaaaagtggcacaaaattccctaactccgctcaagatttgtcgccaagccccgggaatttcatacttattgtttgctgacgacacactgctcttctttaaagctgaaaagaaggaggcagaagtggtgaaggaggttctgaccaattatgctcaaggaactggacagcttattaaccctgccaagtgttcgatcctcttcggtgaagcttctccctcatcagtaagtgaggatataagaaacactctgcaggtggagagggataactttgaggacagatacctaggcttccctacacctgagggaagaatgcataaagggaggtttcagagtttgcaagcaaaaatcgcgaaaagggtaattcaatggggtgaaaatttcctttctagtgggggaaaagaaatcttgatcaaggctgttatccaggccataccagtctatgtgatggggctttttaagttcccagattcagtctatgatgaactgactaagatgacaaggaatttttggtggggtgcagataatggccggaggagaacacattggagggcctgggattccctgacgaaagcaaaaatcaatgggggtttagggttcagagattacaaattgtttaaccaggccctgttaactcgtcaagcttggcgattgatcgaattcccaaacagcctatgtgcccaagtgctcaaggctaaatactttccgcatggttctctgactgatacaacttttagtgcaaatgcttctcctacttggcatggcattgaatatggtttggatttattgaaaaagggaatcatctggagaattgggaatggtaattcagtcagaatatggcgcgatccctggatcccgagagatttgtcacgaagaccggtatcaagtaaagcaaactgtagactgaaatgggtgtcagatctaattgcagaagatggaacttgggattcagccaagatcaatcagtattttctaaaaatagatgcagacatcattcagaagatctgtatttctgctcgcttggaggaggattttatagcatggcatccggacaaaactggcagattttctgttcgaagtgcttacaagttggccttgcagctcgccgacatgaataattgctcaagctcgtcctcgagcagacttaataaatcttgggaactaatctggaaatgtaatgtcccacaaaaggtcaggatttttgcttggagggtggcttctaacagcctagcaaccatggagaacaagaagaagaggaacttggaaagatttgatgtttgtggcatttgtgacagagaaaaagaagatgcaggacatgcactgtgccgttgtgtccatgcaaattcactctgggtgaacttggagaaaggtaaatatgtggtgagtgttaatttcccgaaaactacagcaatcaaacatacccctggagcggaaaaccgtcgttgggaaaggccgaggaatgggtggatgaagctaaatgtggatggctcctttgacattaattctgagaagggaggtattggaatgattctcagaaattgcctgggtaatgtgatctttagttcctgcagatctcttgatagttgcagtggccccttggaagccgaactgcacgcgtgtgtggaaggtcttcacttagcgctccactggactcttcttccaatccaagtggaaactgattgcagttctgtgatccagctcttaaatcacccagacaaagatcgctcagttctggctaatatagctcaggaggctaaatcactaatggctggggatcggcaaattgccataagcaaagttcagcgtagtcagaatgttattagtcactttttagcaaataaagctagagctgagtccctctctagtttttggctaggagaaaattgtacctttatctcgcattttgttggcgaggactgtgattaa

SEQ ID NO: 100154 - DNA, 489 bp, Oryza sativa
  Clone ID: PAT_MRT4530_97899C.1
atgataactaaagaaggaaggctcacgacagtaggtgaacttattcctgtcgagggcggtgcggccgaaatcgaacgctgcggtggcgatgtggaggcatggtcggagcgtggcgagccggggctccctgcagttgggcagcaacgagcgcctacctgtgaccccaagacggtgtcctctggagtacccagccatcgagaaatagcctgggatgatcgtgccagacggtggcggcaaccgaggaggacgggaccgacggccgcagggctatccatggtgatggcgctgctcgccgggtcacctagtcacccggtcatcaccggcatcttcgacggtggcgggtcgtcgtccatggccaagaccgccaagatttcatcgcgtggaggcggggatcgcagaaggaggggtggatccatggcgatgagggagaaggcgccgcaagcttttcgatggaggagctacccagccaccttatcggggaggtcctga

SEQ ID NO: 100155 - DNA, 1296 bp, Oryza sativa
  Clone ID: PAT_MRT4530_9789C.1
atgagttcaaaagatagattcttcgacaacaagatactcgacgacttcgctgtgggaagatctaacctgaccggagtatgtcccccgacaagatcggaatcatcgtcatcaacaatttgatctaccgagatcatccaacatcaacgccgcggagaatcaactgccaagacctccgcctacgacatcagctggaacaattaagcactcgattaggtcgtggtcgagtacaccgcattatcgagaacgatctcgacaaatgcagagtcgtcgcgccgaacctaccaacgaagaccgacgacctatctcatagcaccggccgtggctggactactcgagaaaagtacgtagcaatctctcgcaccgcaaacttccattggtgtttgagagatgattctactcactcgctggttcccgaaccagtacgtagcaatctctcgcactgcaacacctctattggtgtccgagagataattctacacgttcactggtcctcgaaccatggtcaaggtacgattacgactggttctcaaccagtcaatcgtagcgatctctcgtacaattacttctagtggtcgagtttagactacaccaggttctcgaccagcggtgtagcgattctcccactacccttacttctagtggtcgggtttagactacaccaggtcctcgaccagcggtgtagcgattctcccactatttccacttcaagtggttgagttacgactactacctagtccccgaccagaggtatagcgattctcccattacctctactccaacaaagttgatatcaggtacacaagatcgccaagtgttttacccagagatcccttaccacgatgacacctagcgttgaaacctatcctactgtcccttgacgccgtcttgacaaggcctccgaggaacctaaggaaacttcggctggggacgcccagagccgataaggccttgtcggatcctgtagagataaaagaccatactctacgccttctcgatcactcgagaacggtttggtggatctcgacaaggaatacggaatgaagaaatggtgtacccgccgagataaaatttcttgacgagaacggtcacgtgagcttgataacagttcctccgaagtctgcggttgagaatatgaactcgttcatttgcattgaagtcgggggctacttcagaggccggccgtagggatctagcactgtctctgattccgtcgggcgcgagctcgaggaggaaggctaccctgttgtcgactgatagctcaggggcccgaacctgtataaaaatcctcgtccccat

SEQ ID NO: 100156 - DNA, 412 bp, Oryza sativa
  Clone ID: PAT_MRT4530_978C.1
gtccacgctgagccagtctacgcgatccctttggaaatatcgagcgagattaaattgcaatgtgaccatggatgctattgagacaaccgctgctcacatcaagaacaaattaaacaagttctggaatccaattcaactgcctgcaacaatgttgatttcaaacgactgccagatgtgcatacgaccttcgttttgggtccattagtacttagtggaaagctttcggagtccgctttccaacggattcagcctcatctttgaattccgtctcgtttggccggaatcataggaacaaggtgacgcatcacctataataggcctatgggtttgtaactttgtctgggaccccggcccaagtagggcccatgtggggtgcaccccaaccaggtggagcacaaccctagggacacca

SEQ ID NO: 100157 - DNA, 546 bp, Oryza sativa
  Clone ID: PAT_MRT4530_97900C.1
acgacaaacgccaaaaaaaaatattattgatgattctgaaatgggcctcgttgcggcccgggtaacagaaaagagatgcataagctttctgtgggaaattcttgggcatatgtttttcagatccaaacactttaacctgattggatagaaaccaaggctgaacagatcatttgagtaggatgtgttatctgccttggaccaggctacatgcataaaatttgtacctaagttgtcttagcaattcttatgaatgttgctacatttttggaaatgccaacccatgttgtattatatcttgttcggcgctgtgtggggctaaagccattgggggaattccgcctaatccatgccctatctgaattatctttggaccatggtgctcttggtttacatgacggcggacttgattgaaaagacccataacacctaacaaattgtgaaggagccgtaaatggttgataacgtactttacatcttgggcaggtatgtctatgggactatgctggattgctgtgaattgatgccgcaatggaacgggaatgttaa

SEQ ID NO: 100158 - DNA, 849 bp, Oryza sativa
  Clone ID: PAT_MRT4530_97901C.1
atgagtactgttacagctcctttccgtggtaccgtggtggtattgaggcgcatggtgacatgttgtagggctgtgtcttgtgggtacagtgctcctggtttggaatggtacattcctggtttggagatagatctgtgcagccgggtgttagccgatctattctcttttgacatcaaggactacttcgatgagacaaaagaagataccacaagcaaagccttagcccccttatccgatgatgtgaagagaactcttgatgatatctctcatcggatggaagcatcatcactagacagtttggtggtagactgtgggcctatcaggactcggcttcatgaggttcaagctctgatcccagatgagctagccgatgtccttactccagctgtctatcttaagcaacaacaattcaagctggagaaggccaagctgagactagccgagcgtcgggagcgcaaagacatcgaggccacaatccaggctaatcggcagcttgttcatgaagaaaaggccaagcttgatcagttatctgagggcccgatcaaatccaatattgatcgacttgaagctcgcaagattgaactcttggcacaacttcaagaatgcaacaccgagctggacatggaacataaaaagctagccgatctcccacaagctgtcgaagaacagaaggcaagactaaaatcggctatcaagaatgtcgcggatatgaccaagtccctaaaagtcatccctggaaccgatgctcaagatgcccaagccatcgaagaaagcgcagccaccatcacccggagcgtggtaatttggcacaccgccacccgcgctcagcggcgcgccagcgccccgtag

SEQ ID NO: 100159 - DNA, 438 bp, Oryza sativa
  Clone ID: PAT_MRT4530_97902C.1
atgggtgttgacatcgccttcgagcttggcagtagcggccgtgtgtgcgagaatgcagccatggatgtgcgcaacaacactacttcaacacccaatggcatggtggttgtcggagacccacgctgcgagctcctcccaccgaccaccgacggggcgcctaggagaactgcaccacgaactcctcccgtactgaaggcaggcggtgcacacgtattggaggatgctgggcacgataacctctacatcagcatacaccatgcgggcactttgccgtcggcaacgaagcagccggctgggggaggagccaacagcgtggaggcacgggagggttgggagaaggtgcagatgcatattcgaaggggttgggcacaactacgtatttgccagcttacactatgctggcgctatgctcccaccgacaacggagccaccgactag

SEQ ID NO: 100160 - DNA, 1575 bp, Oryza sativa
  Clone ID: PAT_MRT4530_97903C.1
ttatatggtgccattcgacttgttgttgactgtttcatccaccttcgtccctgcagcttcgtcatccttctctttctctttcgccgctttggccttcgccgcctcttcttcctccttcgccttggccgccgccgcctcttcttcctctttcgccttggccgcctccgccgcctccaccttggccttgttcaacgcctcgatcagacctgccaggcacgcgtcggggtccctcttcttccccttggacgccttgggcatcaggttctccgccacgtccgccggcgacatgtcgatctcctccagcagccgccgtatctcgacgaacatctcgtgctgctccacgcccaggtagttcttggccagcaccttgaacgcctcgaaccggcagtaggacatctcgatgtgcacgtccatcctgcctcgccggatcagcgccgggtccagcttctccttgtggttggtcgtgaagatgatgatcctctcgccgccgcacgccgaccacagcccgtcgatgaagttgagcaggccggagagcgtgaccttggatgcttcatccttttcctgctcggtggggagcttgggcttgtcgtcgtcgtcttcgtcagaggatttcttcttcttcttgtcgttgctgcgcttggcggtgaggtcgacggagcagtcgatgtcctcgatgacgatgatggacttgccggtggtctcgatgtagagcttgcggaggtcggtgttggtcttgacggccgtgagctcgaggtcgtagacgtcgtagtcgaggaagttggccatggcggcgatcatggtggacttgccggtgccgggggggccgtgcaggaggtagccgcgcttccaggccttgccgactttggcgtagtagtccttgctgtcgcggaaggcggtgaggtcgtcgaggatggcgtccttgtcggcgggctccatggcgagggtgtcaaaggtggccgggtgctcgaaggggacgtggctccagacgctcttgcggctgtagtaggaggtggaggctccgggggcgttgttggtgaagaggcggcgctggcggttgcggatggtgacggcgcggccctcggcgaggacgtgggggaggtaggcgtcgaggacgaggtcgcggtggcggcggtggaagacgaggcggtagaagcgggcgtcgtcgtcgcgggggtagaagctgatgacgttggtccggggaggcttcttggaggggtaccaccagatggtggcgccgcggaaggagtcggtcacctcctggtggtcgtccaccgtgatctgcaccgtcctggcgtccttgcccaggtccgccctcagcttgcgcgctcgccgggcgcaggcgtggctcaggtaagcctccacggcgaggaagaagtcgctgcggcggaagcgctggtggccgtactcggagatggtgacgtggaggtaggggctgaggtaggaggtgagcttgtccaccatggtgctcagccactgccggagccccgcggggacgtggttgttgacgacgggccagaagaggaggacgctcaccaacgccgaccacaacgtcgacaccgatcccagattctccat

SEQ ID NO: 100161 - DNA, 291 bp, Oryza sativa
  Clone ID: PAT_MRT4530_97904C.1
atgtggaggctgcatcaggctctccttcgccgcatctcgccgcttaagcatccagcgggctggcctgctagggggatcagatgctactacgccaccgagccgaagggcaggaagccaaagacggctcctttgcaggtcattgccgaaatacgtgtctcttaccttgagagttttggcgacgagttgtatatttgtacgaaatatttccgtcaggatatagacagtgagaacaacggactgaacacattatttaccactgcagctcaacagcataataagaatttctcataa

SEQ ID NO: 100162 - DNA, 470 bp, Oryza sativa
  unsure (1)..(470): unsure at all n locations
  Clone ID: PAT_MRT4530_97905C.1
tgtaaaattccgctgctgcattaatggggcatttggggaaatggggggcgttgctttggctttgccttgtctcggtctacgtcgccgacgtgttgagatcgacggaaccgagccccccatggttacaactgctgctgctgctacagctggtgatggattttggaccaaaggggtcaaatggtggatcgcgtancggcggtggcaccaatcgacgtgttgctctgtggtttgtccggcgactccatggaccattttccttggtgatatcatcagtgagttgagtgggtgcttttattcgtttctgttggtgacagctactcgtattctatccttgtgtaaccgcctctctctgttctcttgtgctcttctgttgtgatggggaaattatctagtacatttaagttcatacagattcctcatgaaactattaaaaacttttgtgagctgtaaatgtattctgggcacacaac

SEQ ID NO: 100163 - DNA, 480 bp, Oryza sativa
  Clone ID: PAT_MRT4530_97906C.1
aacggtgtgaaaacatgagcatttagctttatttgtattcttcatcaatgctctgaagatatgcccacagcgcgaaacttccgcgaaagtgtggttctgttggcagcatgacattcacgcattaaaagtatcaaagtcgctgtacctttgctttcatcatcaatttggtgtgaggaccacatcaccgtttctccgtccggcacgcgagatgccacatgcatcacggcggtgacttgattgaagcaaaggcatcctatgccactggtttcttcttctacgggcgatgatgataatgagctttgtggacgaccatgaacatcgacggcgggggcccggtcctccactgactaaaaaggattatggagtagctgcacaaggtccacgagcgtgacaaactgtaaccatatacgacgcatacacgacgtttattatgtatcacagacgacgcaaaaaattaacagatacggtacaccatgactt

SEQ ID NO: 100164 - DNA, 534 bp, Oryza sativa
  Clone ID: PAT_MRT4530_97907C.1
cgctaaaactttacacctctagatctaaacaccccctcaatacgtactgaaacagctaccggaatccagaagtaaaactttttcacctgagtatcattacccacgttcatatatatatgttaatgaatctaaacatatatgcgtacctagattcattaatatatatatatacatatacatatatatatacatatatatatacatatacatatatatatatatatacatatatatatatatatgtatatatatacatatgtatatatatatatatatatatatgtatatgtatatatatatgtatatatatatgtatatgtatatgtgttctatatgttttctatagggactatctatatttatggcaccatatgaaaaaaatagttaaatgttttagcatgtactatttacaccgtaaattccatatcttggtccatatatttacactgtaaattacaacttacactgtaacttaaaacttacacagtaattttctctaatacttacatatatacaataactagaaagtactag

SEQ ID NO: 100165 - DNA, 132 bp, Oryza sativa
  Clone ID: PAT_MRT4530_97908C.1
atggccgacactatgcgaaggacatcaatcaaccgcaaccccttcggccccacggaggacaatcacctgcaacatctttgcttcaagcagacgatatcatgttcgaggtacctcaagtacacaggtagctaa

SEQ ID NO: 100166 - DNA, 615 bp, Oryza sativa
  Clone ID: PAT_MRT4530_97909C.1
atggcgggctcatctgcatatcgtcctcctactgatgccaagacggacgtccaagttgatttggaacaatggggactagaatctcgcccgctcggtggttttgttgattttatcaaaaacaccacgaaccttatgcaccatgtgactgaagggtgtcagttgcagccaattaatgttgagaatggcaacaatggaaatgccactaggaccgagaagcgcctaggctggtcaactgaagaagacttgaggctggaggctaattcattatatgctagtggggagtgtaatgttgatctcatggacaaggcgctgaaaatgtatgagaatgacttcaaggatgggcgattcttgtttattgagtgttggaatgaactaaaaacccaacctaaatggcatgcatatttggatcagcttgacaagtcgaataaaaggaagcgagattatgctgatgctaccccccttgatgacgaggagatcccacgtccaatgggagtcaaggcagctaaggcgaagcgtataggcaaaggaaaaggcaaggttcaagattgtactgctgagctagaagatgacacccacaagtttatggaagcacatgaagcagccaaggagcagtaa

SEQ ID NO: 100167 - DNA, 746 bp, Oryza sativa
  Clone ID: PAT_MRT4530_9790C.1
cctcctgtcaggatcgtcgtcctccttcgggcgtacacctagtttcgcgcccccgccgccgcttttccaatccgggcgttcctttccgtttccggccgaatcaattgaggggaaacaatctccggcatcttctctaccttttctcctttggaatctttggctaaatcgttttggaatgagttggattcgagttcgtctcggattcgttcttccaatctttccttcctcgtcgccgcccgccgtgggcctttgccgccgcctccgagcccctttaaatggacccccggtgtctcctctacccgccgccacccttgccttcgcctctcgtcgtcggaagagctctagcgccgtgtgccctagcttcgccgtcgccgccgccgctccagccgtgcgccgccgtcgtttcagccgtcgccgtcgctcgggaagaccgtcgtcgtggtcgccaagtcgtcgccgtcctcgtccgccccttcgccgtcgccggagatcgccggagcctcgtcgccgtcgtcaacccgaaggttttcgccgtttcctcctcgtcgccgtcgccatccgttgatcttccgccgccgttttggtcaccggtgagttcgccgcgtcgtcctctacgtcctggtgccctccgtttgcgtcctagcgccgccgttcgccggcgagcgtgcgccacccgagccgtccgctccgccgagccgccgccgctgtcggtgacgtcatcgctgacgtcatcggggtcgtccgcc

SEQ ID NO: 100168 - DNA, 1179 bp, Oryza sativa
  Clone ID: PAT_MRT4530_97910C.1
atggcgggctcatctgcatatcgtcctcctactgatgccaagacggacgtccaaattgatttggaacaatggggactagaatctcgcccgctcggtggtttggttgattttatcaaaaacaccacggaccctatgcaccatgtgactgaagggtgtcagttgcagccaattaatgttgagaatggcaacaatggtaattccactaggaccgagaagcgcctaggctggtcaactgaagaagacttgaggctggtcagtgcttggttaaacaactcaaatgatccgatagaatcgaatttcaaaaagaatgataaatattgggctgatgttgctgctgcttacaatagcactactccgtcaagccggtttaggcaagttaagcaagttaaggaccgttttagtaagatcaagaaaaaagttgggaatttttgttgctcttggaaggaagctaattcattatatgctagtggggagtgtaatgttgatctcatggccaaggcgcagaaaatatatgagaatgacttcaaggatgggccattcttgcttactcagtgttggaatgaactaaaaactcaacccaaatgtcatgcatatttggatcagcttgacaagttaacgagtctcgcgggtttccggtcccctcttttccttgacacagtaagaggtgaggctcctcaggtccattattatgtcaacgggaaagagtacaaccatgagtattacctagctgatggtatatatcctgaatgggctgtattccagaagactataccacttccacaaacagagaagcataagttatatgctgaacatcaagagggggcgagaaaagatgtggagcgggctttcggggtattgcaagctcgtttcaacaatgtacgtcgtccggcaaagaaatggaagagaaagagtgttggaaatattatgctagcttgcgtgattctccacaatatgattgttgaagacgagggcgaggatgcaatatgtgacctagacctcaatagaattcctaggacatcaatagtactgcctccagaagtaaccagtggtggtaacccatgttttcgtgatgtgctaagtaggaaagctgctattcgtgctcgttcgatgcatacccagcttaaaactaatttacttgagcatatttggaaccggttccggaatacgcagcgtgcataa

SEQ ID NO: 100169 - DNA, 849 bp, Oryza sativa
  Clone ID: PAT_MRT4530_97911C.1
ctatctcgacacctcaaacacaacaagagatgagaaggctgccaacaggcggtgagaaggccgtcggtgaggaggcgtgggcgcagtggcaaggaaggcggtggtggctgttgggggcatcatggcgatgaccacatggaggggaaaagccgcatggagattggaccagcgccgtcttctctgcttctgctttgccgtgagggtcatgcatggggcatggacgacaagcttggccatcccgctccacaccatcatcgttgcatggtgacggcaattgcccttctccctgccgtcctcctcctcaccatccgccgtgggccttctcctcattgtttgctcctcctgctggtctgccagcgtggttccggccatagctctatgatgtatctgaacgtggaagattactgggatgggattcagggctgtcaccacccggagtagagtgtatcgacagctctggtacccctccagaattcctcctagaaagctacaatcgtcgaggtagaagtcggagagagcgccaaacttctgggcactcctccagagcttcccttcaccctctcccattgtcgccgatggaggatcagcgccaccgtcgtcgtatgcacctgccgccggcatgcctgccaccaccgtgccgcccaccgcgtccacgtcacaaaatccccgccccttccctctcgctccaaaccgccacgggcggcacggcacccaccctcccgacgcccctccccgcgcgccccaccctcccactgcccacccgcagcagccgcaggaagaggagtcgccaatcagccgcagcagcaggagaccgccgccgtcggcaggtgcgacgccttcctcgtccat

SEQ ID NO: 100170 - DNA, 234 bp, Oryza sativa
  Clone ID: PAT_MRT4530_97912C.1
atgccgaggcacctgcgacagaaaggagggccagatatagcaagcaccgatggtggcggatacgacagagagtacgtacaggagaaaacggcaaggaagcaggcaatatcatatccggtcaagtgtgagcgagagaccgaggccgagggaccagaccagagggtgtacaactactacagcgttcgcatcagcggatcgctgtgcaaagtgcgttgcgagaggggaggagggtga

SEQ ID NO: 100171 - DNA, 1224 bp, Oryza sativa
  Clone ID: PAT_MRT4530_97913C.1
atgggccgctgctgctggtgctggcgcctggcaccggcaccgccactgactcgcgtcgcgcgtctcgaacactgtagcagcagcagctgtaccaaaggcggcaagcgcgacgcagatgccgcgccgcgccgtgtggctgcgtacgcacgccgcgtgtgcccggacgcccggatcgcgagcggatggcgcggcggggagggggacaagtggcgtggaggcgaggacgggtgcgttgaacggggtcagcgtctagcgaggtggggggtggcctcgccacgcctcggcggaaagggcggggttggggggtggcggtggcggtgcggccctggttttggaggggggaaaacggtgggtggggtggacgtggggcaagccggccggcggctggtgaggaggccaccggggcaagacgggagaggaggagggcagcttcgcgacggcagccgtagtttggaagcacggtggcaacccggcgaagaggaggaggcgccgctctccccgtcgcgcgcaaaggcgaccgtgccgtcgttggagtacgagatgtcgtcggtgacgtggggcgtgatccaggggaggaaggagcagctcgtctcccgcgtgctcgcgctcgacttcctccaatccgtcggcgtctccgaccccgccggcgagctcgaggccgtcgagctcccctcctccctcgaggtgctccaggagcggctcgacttcgacatccgcctcggcctctccatcgacaacctctcctcctacccactcctccccgcctgctccctccgcaagaatgccatccctgtcctctcctacctcgaggcaggggacgcggagcatcggagagctgccatggccgcgtgcccccttcttctccccctctcgcacagcgttgctcatgtagtcatagatgaggaagttggcgagggagccattgctcatgtactcgtagatgaggaggcggttggcgccctcgtggcagcagctgagcaggcgcaccaggttgcagtggctcttccgcacgatggcgcgcacctctctctggaactcccactcgccgtcctccaccagcttctccaaccacttcacggcaaccgccctctcgccgccgtgccgcagtgtccccttgaacaccgtgccaaacgcggcgcggaagctgtacgtcgcgtgatccagctcatcatagctgtacaagcggagcggcgcctcgtcgtccaaggcctcaacgtcggctag

SEQ ID NO: 100172 - DNA, 378 bp, Oryza sativa
  Clone ID: PAT_MRT4530_97914C.1
atggctactatggatacaatcattgttcacatcatggatgaacaagaagatatcaagatcaagtcttccaagtgctggaatccaattcggccacctgcaacattgctgacttcaaacggccgccaaatctccattcgagctccgttttcgtcccgtgagtacttgatggaaagctctcagagtcctctttccaacggatccagcctcattgtgatattccatctcagtgagccgcaattgaagaaacaaggggctgcattgtctgtaatgggcctatgggcctgtaacttcgtctgggaccccggcccaagtggggcccaaggggggctgtgccccaaacagagggaggacgcccttctgacctcctccatcccttaa

SEQ ID NO: 100173 - DNA, 202 bp, Oryza sativa
  unsure (1)..(202): unsure at all n locations
  Clone ID: PAT_MRT4530_97915C.1
acgnccacgcgtccgcaaaagtaaaagaagatgaaagaagatgaagaagatgcacacgggtgctagcggtgtctttggattgttggacgtgtcgcccgttgctgtgaaggggcgcagcctgcagatgcaggctccttgccgtgttgcgttgcgcgttcgtgctggtgtggtggcggtggcagtggaggctgtggaggcggac

SEQ ID NO: 100174 - DNA, 180 bp, Oryza sativa
  Clone ID: PAT_MRT4530_97916C.1
gcagctcatgaccccacctccaccatcaactcggaagagtttcttcctgcccccgtgtctcttaataaaatagaactgagaaacattgatggctgctttacatactttgacaaagatggaagtggttttatacagttgacaagcttaaaaggttgatggaacgtaacatggaagatattt

SEQ ID NO: 100175 - DNA, 121 bp, Oryza sativa
  Clone ID: PAT_MRT4530_97917C.1
gtaaagacgagcttgctcaggcggacgcacatttgttactttctatgtgcgctgcgagtgcaatatcgctaattggttataccatgagcacgtgacggtataatagggatcaattggcctg

SEQ ID NO: 100176 - DNA, 493 bp, Oryza sativa
  Clone ID: PAT_MRT4530_97918C.1
cccacgcgtccgagcagttgcagcagcacccgtgtcttattgcatagaaagaatgaaggaacactaaggaagggaggcggccaccttgagatggtggagctggtctgtcgtcacaacgtccgacgccgcgtcggccactccggccgccgtgttcctcgccatgcccggttggacccaacatccctccatccatgacggcgtggatagcttaccgaaccgttcggaggtgcctctgctgcggcacgcgcgccggatcgtggaggaagactacctggacctgccgtgggaggcacgccacggcggagcacgtctgcgatgtggtccttctaagacgacacaccgccgtctgcaaccgatccactctcaccgtacaccccatatgcgtcccgcacctcacagacggagtgtacctgccaccgcacggcgggcgccccgcttggtccgcactccccaacccgaggatcgggacctggctccgcctgatccatcggat

SEQ ID NO: 100177 - DNA, 475 bp, Oryza sativa
  Clone ID: PAT_MRT4530_97919C.1
acgtccccacacccgctctctctctcgccttctcgaagccctagccccgccaattcgcgctcgccgcctcgccgcgctccgaccccgtccccgccggttcgcgctcgcgccacctccccgcactccgaccccgtccccgcctcgccgctctccgacggcatggcgtgtacggcttcgttgccgccgtcgggaggattcctccgcggccgccggtggagcaacaggccgggccgggcctcgtccagcacgagctggatcgaggacaaggcccgggccaacgctgctcccactcatctctgcggcggcgagagtaggatcgcgccgtccagcaacgagtcctgggtccaggagcagaagccatccagctccgttgccggcgccggtgagaagaagtccaggttccaccgcggcgacggcaacggcaagaacctggcggagatgttcgccggttcatctattgtcccacctgatccca

SEQ ID NO: 100178 - DNA, 935 bp, Oryza sativa
  Clone ID: PAT_MRT4530_9791C.1
ataatagataccctgagtgaaggtccccttagagatggcaatctactaacttgggtacattgctcggcttgcccataaccgagggcgcggctattcgaataggttatactctgatcagaggtgtacatcgacccaaccccacctacgcccggaacccccgggacaggtaggcaggactgagcccctaacagcaggacaccggtcctgtgccatgacatctcgactactgggccgcagctcgtgtagcattcatttgccccactagacatgtggaagtacggtagtgttttgcaacagaggcccgaagaccggtccttatatggccgaggtgggtccacggtggaccgggcgcacccgggctcgcaccggccggcgccgtgggccccacgtgtcagccacacccgagggcgcgggcggctgacggctggaccccacgcggcagccactcggcgcgcccgacggcggccactcggcgcggccggcgggaggcggcgcccgcgcccctatggtcgccggcgacggccataggcacggcggagcggcggccgagagaggggaagggaagggggaaaagaggcggcggtccacggctcaccctaggtcgacggcaacgacgaaaaaggcagccagagcggaggaaggcggcggcgcggctcgggtcgacggggtcgacggcgttccggcggtcggcggacccggcgagggggtggacggggtcgatggcggtgcggcgaagccggaggaggcgacgccggggcgggagacggtcccggcgagcggagaaggccggccggtggtcgtcggcgacggaggagagagagggcgacggcgcgagctcgattccggcggagagacggtgcggcaaggggcggaaacgggcgggggaggcgcggggccagtttaaatagggccggggcgagagagggcggccggag

SEQ ID NO: 100179 - DNA, 357 bp, Oryza sativa
  Clone ID: PAT_MRT4530_97920C.1
cgggagtcccggcacgcgtcaggcctgccaataaactgccgaggcttaaggagcaagcagaagagtacgccgctttgatcatagaggagctagatcctgaagggctcggctacattgaggtaagctcgatgttcttaagcagataagctggtgtaaaccctcataatgcgctaatatctgtaatagttgtactcatgcactgtaaacccacactatttacttccaccaaacctttaggaatagttgactgaagctgtctgttttgggatgagagtgctgtagtggggtagtaccagtagagcctaatagatgacttcgtgcagatctattttgaagaaaactattctgcttgctcct

SEQ ID NO: 100180 - DNA, 479 bp, Oryza sativa
  Clone ID: PAT_MRT4530_97921C.1
gtccaacagtccaaacaatcatcgatctggtgctacaactccagttaacgctaatccccctggttctagatcaagtgataaacaaccaatctgccattgtagggctggaaaatgcaaagtggagacaataaaagggcaaaagtactatgtgtgttgtatacagaagggacaaggtgcatgcccttaccaagtgccggtcaatgcttttgttgaagaatcaccacaagctggaaacagcgttccattggaggataaccgtgggaactacagtccagttaaagtggaggcgaacaatgacaacggatcaatcaatcctgatcaacctgaatacgatgagtggccatttgacatcgtcaacaatgatgttgtatgcagtggcttcttgccaactgctgagcctacactaagagatggtatagttgctggggaatcaccaagtacgcagcacctgtcaaatgctacgactgaagcgaaaacac

SEQ ID NO: 100181 - DNA, 787 bp, Oryza sativa
  Clone ID: PAT_MRT4530_97922C.1
aaaagtcaaggggccagcattagagaaacaaattagaatcatacaaaaatatcatgtgaacataatgttgtagattctccggtattaataagaacatcatgaggcaagaacacaacatgaatggatctacaaagtcgctagctacacataactcaatagaaacagaatgagccttagttcttacaacctctgctgggaaggtaatagacacatcttagtggctgactaaccaaatgtgtgcattgacaacataaatcaatcccagtcctttggcatgatcattatatgccttcaatcaagacagagatccaaccaattgttgggatagagcaatcatttgcatccaagctctgtcgctagccctacatctcaccctgatcctgaccatgcggagtgcttggtgctatcaggtccatgtattgcttccatgatgttctgtagcctctctaattcaggcatgatatccaaatagtttaaacaatgattttcagaatgtaaagaatttagccgctccatcctccatctttctgtaacctggtcccctttccattagcatattatacagtctccagatattaatttcagagatacaagtcaaatctggacccacgcgtccgcaaacgcgtgggccgttgcgttccgttgccgggtgtcaatccactctggatctgcctgactcttcccctcgctctcgttgcgggcagcatgtaatcttctgcactcctcctccatccggattagggtgttcgcttccctcagtctgtactcgatcttaatttatggtcta

SEQ ID NO: 100182 - DNA, 462 bp, Oryza sativa
  Clone ID: PAT_MRT4530_97923C.1
atggtgaaaagtcttgttggcagtaggaggatgacacaaaagaatcaccatggcaataagtgtgcagaaaaggatgatcagagttttgggatgagggaggagaaggctgaggatggtagagagagtgctgactataagcagaagagggtgatggacatcaacagggtcacggacaagaattgcaagagtaggaagaaagatttagaatcagaatataggtttgattgtgaggatgaagaggtgacatttaacgtatataacattgacatggagatattggagctaatcataacacactcagatttggtcgagcttaaagcattgcctctgatcaaagtcaaaatggttcttttgtgggtagacgaagatatggcgctacagcggtgtttcctcgcgctggcacttggggatttgggcggggcaaagcagacggcacaggaacaagctacaatcacgatctga

SEQ ID NO: 100183 - DNA, 342 bp, Oryza sativa
  Clone ID: PAT_MRT4530_97924C.1
atgtgcctcgtaaatccacacctccgccctgccgccactccatcttccctgttccgatggtgctcccttacgttgatgcttgaatccctacgtctccacatcaccaccgtcatccaaggtttcaatccacttggatccgccgtcaccatcgcccacagcgacaaccttgctccccagatcccatcggcctcatcttggcttcaatatgggagggggatatctagtcggcaccagattgtgccacccaatcggtttcacatgttcgctctgttcacctatgttcttggatccaacgatctgttcaactttcgacttcttgcaggagacatctcatcgtggtga

SEQ ID NO: 100184 - DNA, 669 bp, Oryza sativa
  Clone ID: PAT_MRT4530_97925C.1
atgaccacgtctattcctggtcggacgccatgcctgcaggcggagagcgagatcgagcgtcctctgcactgcacgcggacaaaattaattttcacaggcgggagagaggtccgcctccaccacaacgactgcgaaaatcatccatcttcgcagtcggggcaacggcccgcctgcgaaaatagaagaatcgaacaaaaaaaatcgccggcctgcgccgggagccgctgccgccgccgttccacgccgtcggcgccgtcgctggcctcccccttccctcctccggccagatctgggagggaggggggaggggagccgccgccgccgcctagcccgcgccgtcgccgctccacgccgtcggcgccgccgccggcctcctccctcccacctccggtcagatctaggagagagcgagggaggggagccgccgccgccgcccggtccgcgccgctgccgcccggcccgtgccgttgtcgtcgccgcccggcccgcgccgtcgtcgccgccgccggcctcccccctccctcctccggccagatctgggaggaaggggggaggggagccgccgccgccctcctccgtcgccctcctcggacacgccgcctcgcctcctcgccgctgccgcccttcgccgccgccgccgggagctgccgccggggagagttgaagtga

SEQ ID NO: 100185 - DNA, 224 bp, Oryza sativa
  Clone ID: PAT_MRT4530_97926C.1
gaagaatacaaaaacatttattggggagatacatatacaaatactcccaaaagcggtaaaaaggaaaaacaaacaggtgttagggctcccaaaatacaataaaatgaagtcaaccctttcattagggttgtatataaaaaacattcctaaccatttttttgggagaggggtttacaggacagaaattttttatttacataaaaggtttgataaaaagattttta

SEQ ID NO: 100186 - DNA, 414 bp, Oryza sativa
  Clone ID: PAT_MRT4530_97927C.1
atggactttagacatgcgtggcccacgaagtccggcccaacaacgagccctaaacctccagtcggctcctatcctctcccactcgtgctctgtgaggttgtggccaggaacggcggcagcagcggctcctacggcggcagcggtggcggcggctcctcgcccaagcagcagcggtggctgcttcttctcccggtggcggcggctcctcccccaagcagcggcgcgcggctgctgcttttcccgacgacgacggcagttgcttctcccagcgacagcagctgcttatcccggcgacaacggttgcctcttcccaacaacaaacggccaccattcctcacccgtccctttcatcaatcgtcctctatgtgcaatcaaatcatcagattgtcaccaaagcttgtcttcgtgcattag

SEQ ID NO: 100187 - DNA, 522 bp, Oryza sativa
  Clone ID: PAT_MRT4530_97928C.1
atggcgagttcctcggaggaatcgaaggagaaggcggttgcagaagaggaagagaagggcgtaatctcgccggcagcgacggagacggctggagaaaagaaggcgtcggcagcggcggccggagaagagacgaagaagaagcaaaaggagaagaagatgaagaaggtgaggatgccacagcacgaggtggacagaatcatgtcgtacaagcacaggcccctcaccatgccacctggatacaagaacttctccaaggagctactggcttgtttccccgtgcccgtcgatcagctggacgactactgggctagaaagaacaagatacatgacgagggcgcgaaacccatcctggaggagcaggagaggattcgcaaggagtacaatgagaaaggctatgccgagtactggatcaccgacgacgaggaccaagcagccactcgatcccgagctccggcgccgggaaggaggaggggtcgaccaggggtcaccaagaagcataccggaggaactaagaaactttaa

SEQ ID NO: 100188 - DNA, 253 bp, Oryza sativa
  Clone ID: PAT_MRT4530_97929C.1
tttcaccttagtgaattatcaccgtattgattctcctcatctttgctccaaagagaaaccgcggggctgcagaggatgcaacagctaggatcatgcggcgaagcagagcgcagagcggagggtagagtgcgtcattgcgaacctttggggattaacctcgccgacgatgaagccttcgaccgtgctgcccgagaccgagagcatatgccctcacggccgcctgaggtagagacgaggccatggaaggcggccg

SEQ ID NO: 100189 - DNA, 4170 bp, Oryza sativa
  Clone ID: PAT_MRT4530_9792C.1
atgccgcgctacaagcctgagtacctgtttggtgttgagggttttgtccaggagttgcgtacgatgtcctttgtcattggatttgggactgcccctttttatgcccagattcctcatgatcgtcatgaagagaagtgtcgagtcaaagtcactttgaacagtaatagtgaagaggaggtggcaaggatcgccataggagagctccgcgatcgctacagtgatcagttggccgacactgagtatcgctaccatcctcgtcaaccacagggaagtgaccgtggcagttaccttgagactgaaggaattgaaaatgatgctaccacaaggcatttggttgagatgttgtgggctatggatgaaagtcgtgcggagactgtgttagcagctcaagatcgtgaagatcggaatcgtggtaagatttgtaagctcgaagacaaggtggatcgtttggagaaggaactagccgcattgaagggagaagcaccgccgcagaaggccaggattcgtcttaccgcaaggaagagagctctatttgtccctcgttatcaattggcgccaaagatggtgaatactcgcagcaacgggaatggtcccaacaaccccaataacaacaatggagagaatcccactcttgctcaagttcttgctcaacagacacagctaatgaacatgatgatgcaacaacttcagaatcagcagaaccaaggaaataaccatgtacctcctcagaataagttagcagaatttcttcgtgagaaggtctcatttgcatcacaccagttgcatggccctgcctctgaatggtgggatcacttccgccttaacaggactactgctgaacctatcacttggcttgagttcaccgctgctttccggaagacgcatataccatcgggagtggtgtctctcaaaaagaaggaattcaggtcgcttacccagggatctcgctctgttacggagtatctgcacgagttcaatcgtctggctcgttatgctccggaagatgtgcgcaatgatgaagagcgtcaggagaagtttttggaaggacttaatgatgagctttcttacccactcatgactggagattatcatgatttccagaagctagtggataaggctattcgtcaggaggacaaatacaatcgcatggagcagaagaaacgtcggattgctcaattcaagacacaacaggggaataatcagaagccgcgtcttactttaagaccccagtccatgccacatggaggttcttcgtttgttgttcgtccgcagcgtcagttcttcaacaacaatgctggcaacaacatccgcaatcaagctccacgtcctgttgcagctccaacacagcaacaacctgccaagagggagcaaggcagcaagcccgtggtgtgtttcaactgtggagacccacgacattatgctgacaagtgtccgaagccccgacgcgtgaaggctgtccctacccagagcaactctaccgcaccagcatcaaaggcccgtgtcaatcatgtcgctgctgcagaagctcaagatgctccagatgtgattttgggtacgttccttgttaacttagttcctgccacagtgcttttcgattctggtgctacacattcattcttatctatgagttttgcgggaaatcatgggatggaagtagaagatcttagacatcctttgatggttagtaccccaagtaatcaagcactctctttgcaacgtagcccctctgtcagaatagaaattaaaggagtaccatttctggccaatcttatcttgttagaatccaaagaccttgatgtcatcctagggatggactggttagccagacataaaggtgtgatagactgtgctaacagaaaagtaactctcatcagcaatgatggtcgagttgtaactgttcatgcattgtcatctgagtctttaaggtcaagactgaaccagataactttggaagagattcctatagtccgggagtatcccgatgtgttcccagatgatttacctggtatgccgcccaaaagggatatagagttcagaatagatttggtaccaggaacaactccgatccataagagaccttatagaatggcagccaatgagttggcagaagtcaaaaggcaagtagacgatttgcttcagaaagggtacatcagaccgagttcatctccatggggtgctccggttatttttgtggaaaagaaagaccatactcagcggatgtgtgtggactatcgtgcattaaacgatgtgactatcaagaataagtatccgctgcccagaattgatgatttgtttgatcagcttaaaggtgctactgtattctccaagatagatcttcgatcaggatatcaccagttgagaatcaaagaggaagatatacctaagacagcttttaccactaggtatgggttgttcgaatgtactgttatgtcttttggacttaccaatgcccctgctttcttcatgaacttgatgaataaggtgtttatggaatacctagacaagtttgtggtggtctttattgatgacattcttatctactcccgaaccaaagaagagcatgaagaacatcttcgccttgcattggagaagctacgagaacatcaactgtatgctaagtttagcaagtgtgaattttggttgtctgaagtgaagttccttggtcacgtcatctcagcaggaggagttgccgtcgatcccagtaatgtggaatccgtaaccaactggaaacaaccaaagacagtttcagagattcgcagttttctaggcctcgcaggatattaccggaggtttatagagaatttttccaagattgctaagcccatgacacgactgctacagaaagatgtgaagtacaagtggtcagaagaatgtgagcagagttttcaagagttgaagaatcgcttgatatcagctcctattttgattttacccgatccaaagaagggtttccaagtctattgcgatgcatccaaacttgggttaggttgtgttctgatgcaagatgggaaggtggttgcctatgcatctcgtcagttacgtccgcatgagaagaactaccctactcatgatcttgagttagctgcagtagttcatgcgttgaaaatttggcgtcattatcttttcggtactcgtacagaggattatgacatgggaattcattatcacccaggaaaggcaaatgttgtagccgacgctcttagcaggaaaggctattgcaatgctaccgaaggacgacagttgccattggagttatgccaggaatttgaaagattaaatttgggaattgtcagtagagagatcaagaagaatatgagaagaggaaaagctatcggtttcttggaggatgagcaaggaactgtttggttgggcgagagaatctgtgtccctgacaacaaagatttaaaagatgtaattctgaaagaagctcatgatactttatactctattcaccctggtagtactaagatgtaccaggatctcaaggaaagattttggtgggcaagtatgaaacgtgaaatagcagaatatgtagcagtatgtgatgtttgtcagcgagtcaaggcagaacatcagaaacctgccagtttgctgcagcctttaaagattcctgaatggaagtgggaagaaatcggtatggattttatcactggtttacccagaacgtcatcgggtcatgactctatttgggtgatagtcgacagacttaccaaagtagctcatttcattccggtaaagacaacctattctggaagtcggttggcggaattgtacatggcaaggatcgtgtgtttgcatggcgtccctaagaaaatagtgtctgatcgaggcagtcagtttacttcaaatttttggaagaaacttcaggaagagatgggttctaagctgaactttagtactgcttatcatccgcagacagacggacaaaccgaaagggtgaatcaaattttggaagacatgttgagagcttgtgctttagacttcggtggaagttgggataagagtctaccttatgcagaattttcgtacaacaacagttatcaagctagtcttcagatggctccttacgaagcactgtatggtcggaagtgccgcactccacttttgtgggatcaaacgggagaacgtcaggttttcgggacggatatcctaagagaagcagaagaaaag

SEQ ID NO: 100190 - DNA, 1164 bp, Oryza sativa
  Clone ID: PAT_MRT4530_97930C.1
atggtgaaagatcaagctgtagatcggggaacaccattttggatgtgttcagctctcatgagtgaaggtctggcaacagcaattgtgaaaattgaaaattggcattacttcttcttgttggcaacttcggtggcggcctcggctagggcggcggaggtggcggcatcgggttggagcagcggaggcagcggcggaggcgagtgcggcatcagccatggtgggggcggcggagcggatccgtcgccggcgaccgcggggaggctagatccgtcgctggccaccgcagggaggccggatccgtcactggcaaccaccgggacgacgacggcgggcctcgggcaaggcggcgatgacgacggtggtgatggcaacgatagtggtgacggcgacgatggcggcaggtcttctaacccaaccgtctggaaaaagagatgtgcattggtgggggtggtgaaggggaggggaggggttgtggttgaggaggcggatctagtccaaggtggcggtgttggaaactgggtaaggggagaatggggcagccatgacgaggaccctgacgaccgcgctggcccgatcaaggccactagattcggtggagagggctcaacaactgcggcgagtgcaaaggggaggagcggcggtcgagtcaaaggggagaggcaatctcatccagctggagctcgggaaggagatggcaaccgcttcggggcgtctaagagggtggcgagggctatagcttggtggcgggcaccagatctgccgaaggcgggtgaagcctgccatgtgaagatcatcgattttcacatgcttttggtcatagcccacattgcaaagccgcggcaagatccacgatttgtcttggatccgcctaggctccaccaccgccggatccgccgctctccaccgttggaagtctcctatcgccgcaccatccctcccaaggcatctatcggcggatccatcactcttgaggccataggtgacagatctgccgctcccgtcactgctcatgggtagatctgcctggctcatggttgtcgctgtcatggccaccgtcactccagaagactcctgcgcggccacgccgctgggctttcctctgttggcatggctgctgccactctcgaagcgcgctgtgctaccgcctgagcctcccgtcgccat

SEQ ID NO: 100191 - DNA, 343 bp, Oryza sativa
  unsure (1)..(343): unsure at all n locations
  Clone ID: PAT_MRT4530_97931C.1
ggcgtggtaaggctctactcgtgaggtcatcggaccttctagaagcnggaccaaggacncatccacagtatagttatatggttcgcccttaaggagatgaagaactcggaagccccaggactccccattcagcccagatncggatggcgtgaaaactatgtgaaaaaaaaaggctaaattaaactatgctggattagttccagttncacaagncagtataccctttggatattgtattttttctttttcttgtatgtagtaggaataacctccctgtgatgctgccccaagaacttaccgaagccagttccggagatgcctttcctccccaaaaaaaaaaaaa

SEQ ID NO: 100192 - DNA, 603 bp, Oryza sativa
  Clone ID: PAT_MRT4530_97932C.1
aatcccaatacaacttggactcggtattctttcagcacttcaaatgcatatactgaatgaaacctgttagcatcagaaccatatgcttgcaatatataattcaaaatggcaattatgagcaacttcttttcccgcaatttgctcatactattgaaagcttatggaatgccaaataaatagttcagcatccagtatgtgcaagtaatgccaaatattttggccgtctggacaaaactgtatgttgtgatatatgttacttcgtacatatatattcatttttaattctttaggtagccttgataaatgcacatagacacttttggattgaagtggcctgttagaactttgttactaactttatctagtatatatctgtttgcatgagggtgtacatgaggagggagtccaactagctatttatgtatcattatatgattgtcagaaacctttagttaactgcatatagacaggttcatttgcaatagtatattctatgacgttgatttcaggctagataagcattaggtacactgtactggtttaagatttctgtacggatttatacatttatgagttctaaaactgactaattttcaaataata

SEQ ID NO: 100193 - DNA, 312 bp, Oryza sativa
  Clone ID: PAT_MRT4530_97933C.1
atggcgcctcgttcggtagccatttctgggcgcggtacaagtggtgctaggcgccatcggattgtctttcgcggctacatccaaggcatcgccaagccggtgatccgacgccttgcaaggaagggtggcgtgaagcgcatctcagggttgatctacaaagagactcgtggcgtgctcgagatcttcctcaagaatgtcatctgcgatgccattacctacaccgagcatgctcaccgcaagactgtcatggccatggatgtcgtatatgcgctcaagcttcagggccgcaccatctatgacttcggcggttga

SEQ ID NO: 100194 - DNA, 402 bp, Oryza sativa
  Clone ID: PAT_MRT4530_97934C.1
atggtaccaacagaggttggcaacgatgacacactaggggcggcgacgactagacgacttccactcgccaagtctgaccgtcttatgagatcggctgcactaggtggcgcgaggctaaaccgcgggaccgacggtggcgcatggccggccacgtcaaacaaccatgatgccttggcgaagattgcaagaaactcttttggtggcccaccgatcggccacgacaggggaaatgaacaggccggaccacgtcgtctgcaaacattgacacttattgggtatagatggccaaataggccacccggcccggcatggcctaggcacatccaggcctgggccgaggtgagtcgggtcgagccatgcctgtccacgggctacacacgcggatcaggcatggcccaataa

SEQ ID NO: 100195 - DNA, 912 bp, Oryza sativa
  Clone ID: PAT_MRT4530_97935C.1
atgacaactcctctgccgtgccgcgctgtctactggttacgggggcttgcgtccatggtctacaagcgaattctgatgcagcccaatccgatgatccaggcccattttccgcagggttggaaaaaggtatacgaggggatgtccctcgagggattagaatccactccccaaataaaggggaaagccaatggagcgttttcctgctcgagcgttcgctgcattctgccgccggccaacccatccgatcaacatgctccaagagagatgccgatgaaacggaaggccgccaaatcaaatgacagcaccaaacactgtcctaaatcctatctacacgccgcgggtgccattaatgcgggcgctgcttgtttctgcccggttgtcctcactcaccgcgtcggcctcagcgccggcgccggcgccggcgtcgtcatcggggttggcggcggcaggccgtgggactccacgaggatcgaccacagcacgtgcacgtcctcgcacgggcacgacttgacatcgtcgagcggaggagccgtgacgagccccgacgacgaccatgtgaacaaccgctgctactgccgctgctgctgcacatcgagaagacgagagagaggcagactcccttgcggcgggctcaatcatacgcgttacgcgacgcatgagcctcgagcgaccgcggcagcgcgcgctgcggccgatctctttctggtgaccagttgcagagagaggcgtggaaaacgcaggcagatgaacgaacgcaaacgcagggtaattcgcacggcatcgatcgatcaacaaccagacaagcgagcgtgcaaccgaaaacgaagaggcgaggcgatgaaagccgatgatgagccgccgacgcttctcaccgtccccggccccgtgaaaaaggaggtctcgcgcgacgca

SEQ ID NO: 100196 - DNA, 1134 bp, Oryza sativa
  unsure (1)..(1134): unsure at all n locations
  Clone ID: PAT_MRT4530_97936C.1
aacaaaaaacattgatctgctacttttgtttcctgttcagagagtgcatccaaatatcgagcaagtttcaagtattacaagtttacaacattctgtggaaagtgcaacaaaagagtgttcactatctgagtccgatgatcaaattgacaaattttccaacatgctgatgatgcaacattctatggactatcgtgtacatacaaaaagtacagtaagctgattttctatagacaggcacaagcagctgcctctgaatggaggggataaatgctagaattacatattgatgattatggtattgcatcagcgttttgtttcattcgtatctccagagggtgagttcacatatcttggtcgaaattcaacaaatgatggttctctcggtaaaacgactgctgcagcacgagtcagaatgtgtgccgttaagccccaaatcacaaacgttttgtcctctgactggtactcaaaagactggactggaatattcatgcccatccaattcgattcttgtgttttccggttatcatccttcaggaacatctctagaggtgcatcaaagatgtctgccacttcagattcattcaagacaggcttgaataaagctttatccgaaagaatgccgattacaggagttacatggagtccgttcttggacaagaagggctcaagaactgtgacaatagaaacaagcgcagggtccaacccaatctcctccttcgcctcccgcagagccgtcgccgtcgcatccgcatccccctcctccaccttccctcccggcagcgacacctccccggagtgggaggagagggaggcggcgcgcttggtgaggatgacgcgggggtcgccgccgtgggggtcctcgaagaggcagaccagcacggcggcgtagcccttgggggcggcgaggtaggccggccgggcgncggcggcgggggcgcccaccgaggaggagagctcgccggagctgaggaggaggtggcgtgtgaggtgggcaagccgccgggacggcggcgacgcggaggaggagaaacccatggcaatgtaagtcggggcgaagaggcgggcgaggagaggcctcatggataacgtggcggctggcggcggcggcggcggcgtcgcttctgggctttggag

SEQ ID NO: 100197 - DNA, 277 bp, Oryza sativa
  Clone ID: PAT_MRT4530_97937C.1
gggaaaggacctgatccctggcccttgaaaaagtcattaaaactggcaaatttttgggggccaaaaaacacccccaatgggactttgggcccaaaaaaaaaaaacctttttttttttttttttccccccttttatacaaaaaaccggaaaaaccccagaaaaccatcaaaaaaacatggggcccctccaaaaggggaatgaccaaaaaaggttgggggtgtaccccccttttcaggggggggggtttttttaggcgacattttggcccgggggcccc

SEQ ID NO: 100198 - DNA, 391 bp, Oryza sativa
  Clone ID: PAT_MRT4530_97938C.1
tcccactgtcgaccactccaccctcgtgcacctcatactgtccgctaactacctcaacatctaggggctgctggaccttacttgccactactgttgctgacctgatcacggggaagactcctgaagagatccgcctgaccttcctcatcaataaccacttctcccctgatgacgaagaggatcatccgccacggtagtaaccactgggactcctgagtagaacgcatcaatgcctattatgtcttggcgcttagatacttaccccggatctacgtgtgctctgcttctatctgtctcgctggctgtctgtattctggagtccgattggggttaatgtgctcatctaactggttagatggtttactgctatccacaaaataaagagctgacg

SEQ ID NO: 100199 - DNA, 237 bp, Oryza sativa
  Clone ID: PAT_MRT4530_97939C.1
atggcggcgacggccgtccctccccctctacctctccacgtcggcctcgacggccgtccctccatctcgacaacggtagatccatcggtggtggcgatccagcagcggcggctctctccgcggcctctattctccctccagtggcgccccgtggtcggatccaatggtgacaacagcattggcggcttcccagcggagaaggactgggagagaccgaccggtgacaacgagatgtag

SEQ ID NO: 100200 - DNA, 339 bp, Oryza sativa
  unsure (1)..(339): unsure at all n locations
  Clone ID: PAT_MRT4530_9793C.1
tcgggatgcagggaattcggcacgaagaggaatanncatcttgtannaataaataaagattggcactgggggtggtaaaaaaaaagtgtaatgtaactgtggtgggtaaaattctttaangttcnctntntcgtagtaaaccaatacacgccctntccgtgtgtaactgatcagtgtccatgcaacaatncatatgtaatatattcctcannaacnaaaaaaaaatcaaaaaatnaaacatgtnancaagcacaanccgttaatacaaatgtataagcattctgcattctgatcanaatcaanacatccngaccncaggggggggccnnnaccccgccc

SEQ ID NO: 100201 - DNA, 356 bp, Oryza sativa
  Clone ID: PAT_MRT4530_97940C.1
tcggtcagtgcatgcatcatctgatcagagggccggttcgcgtgcggcttctcgcagcgatccgccatggctggaccttcgatgaatcagctcgtgcacggacacagatcactagaaaagatcatcaatttgagttgaaaataccactcctaaattagtactagattgttaattatacatttttctctccattgcttctttggatagagaagtggcgtggaaacgttcaaagatccaatttttcttcccctccgttgaaaaactggagcggggctgtacttgtaccggcactgtattcaaatattcatgtgattattcgtatccttcaaacgagctcctctgataactaaaacaca

SEQ ID NO: 100202 - DNA, 361 bp, Oryza sativa
  Clone ID: PAT_MRT4530_97941C.1
gccgtaccggaccgcaggtccgcccacgcgtccgaatggcggaccaccaccaagaacaggtggtctacactcgcgggcagctatgtcagccaggaatcgcctacccgacgtgggcggtggcgacatacgggccgatggtgaagcgccagagcgtcgaccccggaacgctggaggagcagggacgctaaagcggggagttcctaaggcagcagagtagcacagtggtgaccccgtgctatgctctcaaccacatgctagtgaacatctacagggagagcggcacctgcgactgctgagcaccccatgggcgaggtgtaccgtggctgtggcagaggggacatagagctcacggtgttgagcc

SEQ ID NO: 100203 - DNA, 1107 bp, Oryza sativa
  Clone ID: PAT_MRT4530_97942C.1
atggcggcggcggcgccggagttggtggacgacatgacctacgagatcctcctccacatcccgccggacgatcccgcgtccctcgtccgcgcctccctcgtctgcaagcgctggcgtcaactcctcaccgatcccgccttcctccgccgctaccgcgcattccaccgaacacctcccatgctcggcttcatccacaacgttgaccacagcagcaacagctcctacatcccccgcttcgtcgccaccacctccccctctccattctaccccgatttccctccaccgagcatcgagttccccacctactggtgggcgctcgattgccgccatggccgcctcctcctccaactcttcaatcccatcgacctcatggtctgggacccgaccaccggcgaccaccgcatcttccctcagcccccgtacctggacttctactgcactggggccgtgctgtgcgctacacgcggctgccgccatgttgactgccatggaggcccctacctcgtcgtcttcgtgggcacaggagaggatgaccactcatgggcgtgcgtgtactcgtcggagactggagagtggagctcgcaggcctccattgcgttcgattcctatgttgagatgttgcctggcctcctcgtccaagacacgctctacttcagatgtgagcgtggcaagagaattctggggtatgacattggcaggcatgagctctcggagatcgacccgcccccattggggcatgaggttggcatcctcatggaatcaggatatggtgggctgggatttgctactgtggaagattgcagcatcctactgtggtcgcggtatgtgggtgatgatggcattgaggaatggaaaaaatcctgggtaattgggttggactttctgaatccggtgggtaacccgtcgttgtcgtgggaactggccggtttcgccgaaggcgtgcataccattttcatctcatcagagattggtgtgttcacaattgagctcaaatcaggccaagtgaagaagctgtgtgaggagggctactataccgtcgtcccctacatgagcttttacacttcagatattgctatatggaggccggaggaaccagctgaagactga

SEQ ID NO: 100204 - DNA, 680 bp, Oryza sativa
  unsure (1)..(680): unsure at all n locations
  Clone ID: PAT_MRT4530_97943C.1
catacacttatcgctattgatttgtaatacttggttactgctaagcaagggaataatattaagatgctcttagaacagctctgttcaactagatcgagaccacaaaaagccaaaagcacaatagtaacaagctcagctcagaacttccatcgatccaataaaaaaaaaaaggaactaaccagcgccgctgagggtgcagcagcaccaaatcccaccgttctccagtcaggcctggcaggactagtcgctggcgcctacagcaaatgcgatcgacgagcactgtctgtccacgggcagtggcggacctgcaagcagcaacctactccctccgtcccaaaaaaaggcaaatccgtgggtttgcgtatccaactttgactgtccgtcttatataaaatttttttataattcgtatttttaattgttgttagatgataaaacatgattaatactttgtgcgtgacttgtctttttaatttttttcataattttttcaaataagacggacggtaaaacattgggcacgganaaccagggtttgtctttttttggtacggagggagtacatctctgcctggnggctctgctatgcttcgacagcccaatggtcggtcgatccaccccagatcaggcgagtcccgagcctacattgactgcatccagcaggggacgccggcgacggc

SEQ ID NO: 100205 - DNA, 570 bp, Oryza sativa
  Clone ID: PAT_MRT4530_97944C.1
atgtcactaccgaaacaggaatggcttgcaaacgtgtcagttgagacaatcaaattactgtttctgaagcaatcaaactgcacacgaactaatgagaacatcgaacatggtggcctcacaaaagcagcagatatttttccatccgctactattcggatcttcaagaattccagatggagtacatgtctagctgaaagcaagcaacacacatcagcaaaagagattgataaactgaaaaggggaaggatcagattccagatcgtagtacttcctgctactatcctacagtactatcttctacaagcaaggatcatggagaaaagcttgatgaaagcattcaggcaaagcaaccttcggatgctgatgacagatgccaaaatgccatcaattatactgaccggggaccccagatccagcttgccgattcggcggctatcgcaagctatcatcgtgtgcaccgtgcagtgcagacaaattgttccaggtcgcattgatcaacagagggaggtcatcaaaccgagtggaaagggttatcagtggaagggagatcgctcgccgcgcagtcgctga

SEQ ID NO: 100206 - DNA, 2216 bp, Oryza sativa
  Clone ID: PAT_MRT4530_97945C.1
ctcctcattattccacgtacccaaagaaaaacatcccccacccaaaaaaaaaaaaatccgcgcagctgcaaaggcgagcggagctctcaatcgagcagcggttccacttctagaagcttcttaatcacgcgggaggaaggagaggggaagccggcggcggcggcggcggtggggttcgcctgcgcgcggcgatgtcgtccgccaagtcgacgaggtcgcgcccagccgggcactccggcgtgctgccggtgaacgctacggccggaggcggcgacggcggggtgcctctcgccgacaagatgaagatcttcaagaccgacaacttcgaccccgacgcgtacgtgcagtccaagtgccacgccatgaacgagaaggaaataagacacctctgttcttatctgcaagacctaaagaaggcttcttctgaagagatgcgtagaagtgtttatgcgaattatgctgcattcataagaacatcaaaggagatatcagaccttgaaagggagctgctatctgtcagaaatctgctaagtacacagtcagctctaattcgtggtctatctgaaggggttcatattgattccttgactacagggtctgaaggctctgcagaagaggggacagatgaagaccaggagccctcagaaatacaaaactggtgcacagatttccctgagatgcttgatgttttgctagctgagagaagagtggatgaagcattggatgctttggatgaagcagaacgtgtcgttgctgatgaaaaacagaaacagacactcaccacagctgacattctggccgtgaagagggctatctctgataatcgtctgaaattggcaaatcagctagcagaagctgcttgccagtcttctactcgtggcgttgaacttcgtgcttcagcttctgctctcaagagactcggtgatggaccccgtgctcatagtttgttgcttagtgcacacaaccagaggcttcaatgcagcatgcaaactatacatccgtctagcacatcacacagtggggcatacactgcatctcttgcacggcaagttttttctgttatagcccaggctctcagtgactctttagaactgtttggtgatgaaccgtcttatttgtctgaactgattacatgggctacagaacaagcaatgttatttgcactacttgtaaagaggcatgctttagccgcttgtgtggctgctgggggcttgagagctgctgccgaatgtattcagatctcacttggtcattcttccttgctggaaactcgtggtttgtcactttcgtctgttctgatgaagcaattcaaaccctctgttgagcaagcactggagtccagtttgaggagaattgaagagagtactgctgctttagctgcagctgatgactgggtactcacctatcctccatctggtatacggacgtttgctagatcatctgctagtagtttgttgctccaacctaagctctcaaacagtggccatcgcttcagttcaatggttcaggatttctttgaggatgttggcccactgcatagcttgcagttaggtggttctgcaatggacgggcttctgaaaatattcaattcatatgtcaatctgctcataagtgctctgccacactcactggatgatgaagcgaatttggaaggtttaggaaataagattgttcgagtggcagagactgaggagcagcagctagcattgttcgctaatgcatccttactagctgaagagttgctacctagagcagctatgaagttgtcgtctgtaaaccatactggtgtgaatgatattcgtaaaaaaagtgtagacaggcaaaaccgtgtagcagagcagcgagaatggaaaaagaagctgcaacgtattgtggataaacttaaagatagtttctgcagacagcacgcccttgatcttatattcacggaagatgatgacacccgtctgagtgcagaaatgtacatcaatatggataatactgttgaagagccagaatgggttccatctctaatttttcaggaattatatgcaaagttaaacaggatggcgagcattgctgcagatttgtttgttggtagggaaaggtttgctacattcctactgatgcggcttacagaaacagtcatactgtggctatcagaggaccagagcttttgggaagagattgaagaggggccaagggctctgggtccccttggacttcagcagggatga

SEQ ID NO: 100207 - DNA, 286 bp, Oryza sativa
  unsure (1)..(286): unsure at all n locations
  Clone ID: PAT_MRT4530_97946C.1
ctcttccccttcttcctctcgcttccgccaccaaccccttcgcgaaccttctagaaccccccaaaaccctatccatggcggccaccctcctctcccgggccgctgccgtcgccgccgtctccctccgcggcgcccgctcgcaccacatactgtcctcctccctccccaaggaaaccctgcttcctgctgccctcctcatcctcctcgccaccaccatcgcctcgctcctcgcggggggaagagtcggatggggcgcgcgccgncgaggagngcgccgggttcgggt

SEQ ID NO: 100208 - DNA, 636 bp, Oryza sativa
  Clone ID: PAT_MRT4530_97947C.1
atggatcttccggctctggctccgccaaccatagcgcagatcgaggagcttgagcgagttgttgggattaggtttatctatagaggtgaagcacttcttgccttcaagaaggcaattacaacttctgaagggatatttctcaactggtgtgaacaagatgtggatccttgcaattggaagggtgttagatgtgacagtcacaccaagagaagggggaaagaggatacatgtaggagtgcaggaattaactatttcactgaagatattgctgcacggtctcaagctgttgctcgccagttcaagtcactgaaggttaaagcagtagttgctttgctatcactgagcagaaatgacacagccgaggatgttgacagcaataatgagaaagagaagtcatatggttacatgatgatggaaaggctgacaggttcaccagatggtcggattgaccatgtacttcaggtttattcttgtagcaattattggcgagatcatgatactgctctcttcattctcaaacatctgtaccatgatatacctgaagaaactccaactgatgatcctgaaaggatgcctattcgactgttttatgctactggaatagtggaagctgtggaggatctactcagatgttga

SEQ ID NO: 100209 - DNA, 1685 bp, Oryza sativa
  Clone ID: PAT_MRT4530_97948C.1
aaatagtgctcttattaaccagttggcatcattgtatcgtatgtgatctagtgtctctgtctattcctctctttttttttattgagacgacggccatattgctcagtgcgtacaaactatcgacaaaaccatccacttttacattagactagagcttggcgcgtcgcctgcccgtaatgatgttgaaaaaacacatgataattagggttactgaaaaaaaagaagaaagcagatggttatagataaccaaactacagtactaattacaggccaacaaatcatgcacacttcataaaagcgattattcaaccgatgctacagccaagaaaaattttcatatctgtaagatctatgtttacatattttgatcaaccatagcgattcaaatactaatcaactggtagacaatccctgttacatgaaccgcaattaccgcatacctcacggtgtttccttggatcagcatttgcaccttgagaaaagcatgtcaaaatcaaattccctggcaagcacccaatgcggaaacctaaccaggcgggggaacaaaaaccaaggtctcgatcaattacttgagcagtcatctatggtcaccatgatggaaccagtatggttatgtccatgaacaacaccggtgttctaaaaacttacagttccataccatatccatgacctaccattgaaagaatattataaagctgatctgacagatataatcacatcgatctcaaatcaacaattcccaccttagggtcagcatttccctgaacttgtacataatcacagcgtaggaaagatgaggaataaaaaacctcaaacctaatcgcatatctttcggaatacaaaaatatctattccattatactcttgcatatctttttgcagggcaagtaatggcataacaaaaaaaaaaaaacacggtggtagcacgaacattgccatggctaaggaaccgcaatagccctctctgcaactgatatcttcattaatctgaaagtagtaaagcatagtagtggactattggcatcatggttcttgattatctagcattaaagatgatcggtggaagcaataggttgagaagatgtcctcagtgaacacaagtgtgtgaattcttccctcaactgacaagcagaatcacacctccagtgatcagccccagcgctaggaagatgttgactgcaacaacagacccatggtctgacactgataggtcacggcaattgagaacaacagctcccaaatccagcaccatttcgatcaacatctgagtagaccctccacagcttccactattccagcagccatcaggaagattcacagcttgaatcgttctctgatttcttgaataagtcatcacttttcttgagaattccttaactaatgaattatctgaaaacatcaagggagtctctcagcaattggatccctcacataaaacagtcgaataggcatctttcaggatcatcagttggaggctctttaggtatatcacggtacagatgtctgagaatgaagagagcagtatcatgatctcgccaataattggtatgagatccaagggcagataagtataggtgttgaaatgttttctcctgaagtacatggtcaatccgaccatctggtgaacctgtcagcctttccatcagcatgtaaccatatgacttctctttctcattattgctgtc

SEQ ID NO: 100210 - DNA, 432 bp, Oryza sativa
  unsure (1)..(432): unsure at all n locations
  Clone ID: PAT_MRT4530_97949C.1
aattcgcaagacgaatttattgagcctaattaattcatgattagnctatgtgatgctacagtaaacattctctaattatggattaattaagcttaaaaaattgtcttgcaaattagcttttatttatataattagttttataagtagtctatatttaatactctaaattagtgtctaaatacagagactgaagttatgtccatatatccaaacaccacctaaacaagcagcaccaataccaatctggccaaacagagcaagataacgaggagatcgagagtggcctgcaggggattgacagcctcaagcagggtctggangtgcctcaagcaggagcacggcgcttgggagccttgggatggccaaccagtagccacccaccaagggatctagagacatgggctggctatcctctcgaganagtcctccggn

SEQ ID NO: 100211 - DNA, 1791 bp, Oryza sativa
  Clone ID: PAT_MRT4530_9794C.1
atggatttattgcgtcagccgaggggaggggcgcgcggaccgggtccacgggggtggggcccacgcggcagccccacggtccacggtggaccgggcgcacccgggcttacaccggccggcgccgtgggtcccacgcgtcagccgcacccgaggacgcgggcggctgacagccgggccccacgcggcagccgcacggtgcgcccgaaggcggccacgccggcgcagcggcggcacggcggagcggcggccgagagaggggaagggaagggggaaaagaagcggcggtccacggctcaccccgggtcgacggcgacgacggaaacggcgaccggagcggaggaaggcggcggcgcggctcgggtggacggggtcgacggtgctccggcggtcggcgagcgaaacggaggggtggacgaggtcgtcggggatgcggtgaagccgaaggtggcgacgccgaggcgggaggtggtccggggcgacgacagcggcggaccggagctcggcggtgacggcggagagagagagcgacggcgcgagctcgattccgacggggagagagggcggcgagtggcggaaacggtggagggtggcacggggaaggtttatataggattgggagggggagggagctgccggacgagggggaaacgggcgcggaagatccggtcgccattgatggcgccggcgagtctttctttcctccatttgaaccccaattccatcaccttcctcaatatcttttcgcatctttgtgaggcctacattggggtagagccatttctcgacctttttcgcttctactacaagctgcgttggatggaatccaccagggtatctggatgcgtcggtttccgactccgggatggcctaaagtcgcgctatatccccttccaatgcccttcttctcgcagcaagtggcaggcgaggtggttctatcttcaggtagaggattcagatccaatctttgttgttcctgaggaacaaccagacaagattccgtcttggactgccaaacccgccttgaccccttctcttcagttcttcatcaatcccatcgatgacctccgagtacgaggtttgtcgaggtatgaagtcgctgccgacttcattggtttgaacagcgagaccatggagcgttgcgtcggacaattgatgatcagtggcccgacaacggtgagtaacgtccccatccccctttgcgagaaggggaaggctgagcatgaagccgcaattaacgctctccctctgaccgacgtcattggaccgctcttggaccaccaggcggcggcctcgttgaaggagggcgtcgcccaagaggcgtccgacgcggccattgctgctgctgccacgactagtggcagccgtgtcccgaggaaggggaggaaattcacctccgtgctcggcagccgccggaaagcgtcctcccatcggtcggcgcgggcgaaggcggtgcaagacgggtccggagggaactccagcacgtctcctgcgatggcctcgaccgatgtcgtggtcgtgcccaggagccgtgaggtgacgcccaacggcccagccagtgatctcgtgcctgctcgaggcctgcctgctgacgtcctcacctggggggagctccaagtcgagatggggcacatccttgaggttggtgctcatggcataagtcgcgagattgcggaggcgaggacggcagcagcgtcgtcggcaaatgagcgtgccgataagctggcgcgtgacctggcggaggttcgtgaggacctccagaaaatgagggaactagtggccggcaacgagtga

SEQ ID NO: 100212 - DNA, 1509 bp, Oryza sativa
  Clone ID: PAT_MRT4530_97950C.1
ggagagaaagcagggagttatagataaacaaactgcagcactaattacatatatgtatttcgatacataggagtctttaataataaacatatatagatggtagtatgtaagatatgtaaggcagctcagtacttctgataagaagtgaagacgcagagctaattagcatagtaatagtggtagggttggtgagtggttcatcttcatagcgatgaatgtgcttactgctagcaaaaggatgatcctaatatagttatgatcgttcagatgctgttcacagaacatcgatagttacttcaatgtgagttgccttgtagaagtggaagatgcatactaatccagcatatatgtgattgtgccttgcaaacttcatccaccctttcttcaagttgcagcgaccatcagatgaaacgtggaggatcacgttggttgaaatacactgataggtcacggcaattgagaacaacagctcccaaattcagcaccatttcgatcaacatctgagtagatcctccacagcttccactattccagtagcctgaaaagacttgagaagaatacaattggtcgtccataccatcaggaagattcacagcttgaatcgttctccgatttcttgaataagtcatcacttttcttgagaattccttaactaatgaattatctgaaaacgtcaagggaatctctcagcaattggatccctcacataaaacagtcgaataggcatcctttcaggatcatcagttggagtttcttcaggtatatcatggtacagatgtttgagaatgaagagagcagtatcatgatctcgccaataattgctacaagaataaacatatgagatccaagggcagataagtataggtgttgaaatgttttctcctgaagtacatggtcaatccgaccatctggtgaacctgtcagcctttccatcatcatgtaaccatatgacttctctttctcattattgctgtcaacatcctctgaacaaccaaaaaacgtaatcagaacattgctttttgtgacttgcaatgcgtagaagacagaaaaaaaatctactatatgcataccggctgtgtcatttctgctcagtgatagcaaagcaactactgctttaacctaaacacaaaagggagattaaaggtcccaactcattaagaaagagctacgtgaacagctatgtttctagatcattcacaggtaacaaagcatttatgtaccaaggcccatgtctcatattaccatcgccaaagagcaaaccttaccttcagtgacttgaactggcgagcaacagcttgagaccgtgcagcaatatcttcagtgaaatagttaattcctgcactcctacatgtatcctctttcccccttatggtagggtacaattacagggcacttgcttatgtaatattcacatacaagtggttcgatcctgtataaaagccaacttagattcatgagacagctcctcgctttgcaacagataaggacatctctcctcagcccggggat

SEQ ID NO: 100213 - DNA, 2820 bp, Oryza sativa
  Clone ID: PAT_MRT4530_97951C.1
atggagtcccccgcggcgcgtggcgccctcggggacgacgcgtcgggggcgtccacgagccaggcggcccccggggccgtggatggcggcgcgtcgccggactcgctgcggaacacgccctccaacatcgcgaggctggaggacgccatcgagcactgcgccgctcgccgcaagtacctcgcccgcaccaagagcccctccgacggcgaggatgtccgctggtacttctgcaagctgcccctcgccgacaaagcgctctctgcttcagttccacggacagagatagtgggaaaaggggactacttccggttcagcatgagagactctcttgcattggaggcgtccttcttggagagggaggaagctctgcttgcatactggtggagagagtacgccgagtgcagcgaagggccaaaaggttccttagttgcagctgatgcttcggattctaaaagtctgtataaggtggaggaagaacgggttggggttcctgtgaaaggcggactttatgaggttgatttaatgagacgtcattgcttccctgtgtactggaatgggaagaacaggcgtgtcttgaggggccactggtttgctcgcaaaggagggcttgattggatccccttgcgtgaagatgtttctgaacaacttgagctagcatataattgtcaggtatggcatcgccgtaaatttcaaccttcaggcttatttgcagcacgtgttgatctccaaggaagcaccccggacttgcatgctctttttactggagaggatgatacctgggaagcttggctggtctttgatactggtcctaagctaggtggcaacacaatcaaattaaggcgtgggttttcatcttctggatcagcgaagcctacacaggatgagttgcgtcagcaaaaagaagaggaaatggatgattactgttctcaggttccagttggtcatctagtatttatggttcatggcattggccagaggttggagaaagctaatcttgttgatgatgttgttgatttccgccgtgtaactgctaatttagctgaaagatacttaactccttatcaaagaagtacccagagggttctgtttattccttgtcagtggagaaagagcctaaagctcagtggtgaacaatcggttgagaaaatcactttggatggagttaaaggtcttcgtgtagcattaggtgccacagttcatgatgttctgtattacatgagtcctatatactgtcagcacataattgactcggatttaagtctgcaacaggtctcaaaccagttgaaccagttgtacacaaagtttatcaagagaaatcctggttatagtggaaaggtttcaatatatgggcactcgttaggaagtgttctatcttatgacatactttgccaccaagaatcttcttctgcaccatttccagtagattatatgaatatggaagtttcttctgatgaaggtcacatagcaaaatcgcctgacacagttactgcacatgaatcagtcatgaaggagcaagatacatcttccatttctgggcattcttgtgctgataatgtaaatgatgtagttgatgaagggagcaccagaactggcacttcatgtacagaggacaccaccctcccaacatgtgcacttgaaaattcaccgaaacttaccacagatgcactacctacagcagtagatggagaacaaattgaagtcgaaaaacaggtcgacaatcataaaattgcatgcagtgaagaaggggacaattcatctgtaagagcaaaagacattgacagttgtatcatttcaagatctgctgagggagtccatgcggatgtccctgacaaagatacattgatatcatcattgaaagaagaggtggaacgccttaaagctagattagcacaacttgaacaacataatgatttggtgactgaaagcagtgctgagtctcatcaaggtaaaagtgccactcatgcagtgaacctatcatcaggcaaaaaccgcatagggcaaggaagcacgagtgagtcctacacaccacacatcagatacactaaactaaattttaaggttgacacattctatgctgttggatcccccttaggagttttcttgtccctgcggaatgttcgcattggtattggcagggggcaagattattggcaaaatgagaacatagttgaagagatgccatgctgccgtcagatgttcaacatttttcatccctttgatcctgtagcatacaggattgaaccacttgtatgtgaagattacataagcaagcgccctgtaattgtaccctaccatagagggggaaagaggatacatgtaggagtgcaggaattcactgaagatattgctgcaaggtctcaagctgttgctcgccagttcaagtcactgaaggttaaagcagtagctgctttgctatcactgagcagaaatgacacggacgaggacgttgacagcaataatgagaaagagaagtcatatggttacatgatgatggaaaggctgacaggttcaccagatggtcggattgaccatgtacttcaggagaaaacatttcaacacccatacttatctgccctgggatctcataccaattattggcgagatcatgatactgctcttttcattctcaaacatctgtaccgtgatatacctgaagaacctccaactgatgatcctgaaaggatgcctattcgactgttttatgtgagggatccaattgctgaagagactcccttgacgttttcagataattcattagttaaggaattctcaagaaaagttggctggaacctgcttaattttgcatctcttgatgaatga

SEQ ID NO: 100214 - DNA, 133 bp, Oryza sativa
  Clone ID: PAT_MRT4530_97952C.1
tcaattaccctgaatttcctctttccaactacactggtgttctgggaatgcatgggctatactgcctatgttggattctttgagatgtccaagcctaagaaaggtgagtatgtcttcgtctcttcagcatgtg

SEQ ID NO: 100215 - DNA, 362 bp, Oryza sativa
  unsure (1)..(362): unsure at all n locations
  Clone ID: PAT_MRT4530_97953C.1
aaaaagcaaacccctgtttttccttgcaaaggggaaaaggaagctggcttgtcaaagggaagccggcttgtaggggccctggccaagcattaaaacgacgggtggccccccctgccactagcaaacccccacatgacaaacaaaagggaagctcgttgttgcccacaaaaaatactttagcccaaccggaactaataaaaacaagttttctcggaaagggaatctttctcatcaatcgattagaaaaaaaagggccacaaaaaacaagctccccgggaatttaaacaccaacacttcggccaagggggcccgnccagccccttcaaggggacatggccaagggggggataattcctaccttt

SEQ ID NO: 100216 - DNA, 330 bp, Oryza sativa
  Clone ID: PAT_MRT4530_97954C.1
atggcgatcaagcgaatctggattgcccgttggttggatgcgaggcgggtggcaccggtatttattccgacggttcctgacttcctgtggctgcgcaagtgcgcagtgtcagtcagtatcgagcttcgtcggagaccgctccacgccgcagcgcaagcggagcatgtgggaagtgtgtgcgcgggcgacgccgccacgccgcgcacaccagtgcgggtcgtggagatgggacttgctcctatctcttgtcgtgtcgtggtgccggagcaagggctcgtggagcgactggtcatcgtcagatcgacacttggacgcgtcgcgatgaactag

SEQ ID NO: 100217 - DNA, 2667 bp, Oryza sativa
  Clone ID: PAT_MRT4530_97955C.1
atgaactaccgcttccacaacctcctgggcgcgccgtaccgcggcggcgacgccgtcttcgccggtgactcctccgtcctcctctccgccgtcggcaaccgcgtcgcgtccaccgacctctccgcctcctcctccctcacgctccccttcgagtcctcctccaacgtcacccgcctcgccgtctccccctcgggcgacttcctcctctccgtcgacgacgccggccgcgcgctctacgccaacctcggccgccgcgccgtcctccaccggatcgccttcaagtccgccccctccgccgtccgcttcagccccgacggcaacctcatcgccgtcgccgtcggtaagctcgtccagatctggcgctcgcccgcgttccgcaaggagttcttccctttccacctgctccgcaccatccctggcttcgccgccggtgtcaccgccttcgactggtctcccgactcctcgttcctcctcgcctcctgcaaggacctcaccgcccgcctcttgcctgtcaagaaaggccttggaggcaaaccattcctcttcgttggccaccgcgccgccgtggttggcgccttcttcgccacagataagaagacagggagagtcactggggcttacacaattaccaaggacggagctatctttacatggaatttggtggaaggaagtgatgattcgcctccaccttcaccagggacgccagagcaggaggcggtacaggatggtgaggctgaattggacggtgacgagcccgaattggatggcgggagcaggaaaaggaagagtttcggagaatcggaagaaccagacactaccccgctgcatttcacaaggtgggagctgcagaaaaaggacttcttcatgcagtcaccggctaagttaacagcctgtgattaccatagggagcttgacatggtggtggttggtttctctaatggtgtatttgggctgtaccagatgccagactttgtgtgcctccacttactgtcaatatcaagggagaagatcactactgctattttcaacagtttggggaattggttagtttttggatgtgccaaacttgggcaattactggtgtgggagtggcgatcagagagctacattttgaagcagcaggggcactactttgatgtgaactgcattgcatactcaccagactcccaattactggccactggagctgatgataacaaagtcaaggtctggacagtctcctctgggttctgtttcataacattttcggagcatacaaacgctgttactgcagttcattttatggccaataatcattctcttctcagtgcctcccttgatgggactattcgagcatgggatctgttccgctatcgaaatttcaagacatttactactgcattgcccagacaatttgtttctttaacggcagatcagagtggagaagtaatatgtgctggaacacttgattcatttgagatatttgtttggtcaatgaagactggtcgtttgttggatatactcagtggtcaccaaggaccagttcatggcctaatgttttcgccaatcaatgctattttggcttcatcatcatgggacaaaacagttcgcctttgggacgtatttgagagcaagggtgcagtggaaacttttcaacattcacatgatgttcttactttggcttatcgccctgatggaagacagatagcatgcagcacactagatggcttaatccatttctgggatccatttgacggcctgttgatgtatacaattgaaggccgcagggatattgccgggggtcgtctcatgactgacagaagatctgctgctaatacaagtataggaaagtacttcacaacgttgtgctattctgctgacgggacttatattttagctggaggaaacagcaaatatatatgcatgtatgatgttggagaacaggtgctcttgcgtagattccagatcacccgcaatctctcgttggacggagtacttgattttctgaactcaaagaagatgacggatgctggtgcactagatctgattgatgatgaggatagtgatgttgaggaggggatcgatcaacaaacaagaggcaacttggggcttggtttgcctggttccatggcaaatcgtggaaggcccatagctcggacaaaatgcgtgaaatttgctccaacaggaagatctttcgctgcagcaaccactgatggtgttctattgtactctgttgatgattcttttatttttgatccaacagatcttgacattgatgttacccctgagaaagtggaagaagctcttgaggaaaaccaacagcaaagagcccttctactcagcctccggttaaatgaagactccttgatcaagaagtgcattttttcagtggatccatccaatgtacgagcaatttgttcatcaacacccttgaagtatcttcagagattaatcgaagcattttctgaccttttggaaagttgtccccatcttgaatttattctcctctggtctcaggagctatgcaagattcacggaaactatattcaacaaaactccagagccttgcttcctgctctgaagtcgtttcagaagtctataacaagaattcatcaggatttggccgacacttgttcttctaatgagtacatgttgaagtatctgtgctcttctgggacgaggaattag

SEQ ID NO: 100218 - DNA, 1008 bp, Oryza sativa
  Clone ID: PAT_MRT4530_97956C.1
atggcgaggacgcccagcggaaggggtgaaggagtgaaggagcgacacggcgaggagcggaaccgacagagggagctcgacgaggccgccggcgatcttggagaggagctccagcagcagatcggactagtccgcggcggccgtggcgacgacgaacctggttcagaatggcgtccgcagacctcctctatcaccggctcgctggggattggagggcccatcgactcccggtggcctgtctcctgcgctgcctcaccggcgcaggcctccccgcccctcagctcccccgctcaccggccccgccgctgtagggggactcacattcaccgccggcgtgtgtgccaccagccgcccctacctcatggcgccgccggcctcttcccaccacgctgttggggacacggacccccgtcctcaccttcgtcggcacggcgccctccccggggacgagctacctccgcctcccctactggcacgaggcggcaggtggggccgcatgccgagggggaggacgacgccggaggggacgacgatgaggaggacattgcgaagacgacccacgcgacgatggcgatagtgtggctcgcagtgaaggccgaccccgcgactaagacactcttcttccactccctcggctggagcgccggagccgacgacctcctctccacattttcccgctttggcttcgtcctattccgctcccgccgctccgtgcttcgcgcccttcgctgctcacatgctgaaaagctccgaccgccgcttcgcttcggcgggaggggtagccgccgctccgatcaccgcccgcctcgctttgcaccactaggctcctccaccgtcgccgctgcttcacccgccgcatgccccgctccgccggtcggcccctccaccccatcgctccgcgtcctccgccgcccgctccgcccttactcaggccgccgcttgcccctgcaccgcgctttaccctgcagggggatagaaagaagagggagttttgaggatgacatgtag

SEQ ID NO: 100219 - DNA, 381 bp, Oryza sativa
  Clone ID: PAT_MRT4530_97957C.1
gcgttattggttcttgagtccttgcagggactgggggagggtaactatagggtaagcagagtaggaaccaacccgatcattgagcgcgctactttgaggcagacgtatagtgttgccagggtacttccagagatggtgaagcaacttcacgtgccgtgtggtatgactagatctgccgccacaagcgctcatgcactggatcttctctctgagctaactggaacatttgatcaaaattgcccatcaagattcgaaaattaccatggattgtgatgagcgattggggatataactgctggctgattaaaagagacttatatgtctgctgaattagtgcagtgatctattgaggctatcggaaaagtcgtctcatgctttttc

SEQ ID NO: 100220 - DNA, 156 bp, Oryza sativa
  Clone ID: PAT_MRT4530_97958C.1
aatactacccacgattattagatgattccgctagcgagaccttagagtaatggtactaaaaaactagtttcgggggtatagttaagtaaaccaccacaagtctgccccctgcgttgatcatattcgatctcagaactagatatagtgaacaaactc

SEQ ID NO: 100221 - DNA, 885 bp, Oryza sativa
  Clone ID: PAT_MRT4530_97959C.1
atggcggcagcgcaggacgcgtcgtcccaggcgttggggctccggtggcgctacggcgacgtcgacgacggcaacttcgcggtgcgcggccgcgcggtgccgctcctcgtggcgctcctcttcgtcctcgtctgcttcgtcgccgtctccctctacctccgctgggcgtgccactgccaccgctacggccgcgacacgacgccgatgcccgccaccaccagctccggcttctcctcgtcgcacgctgcggcgaccgcgccaggttcagcctcatcggtgaccggcctcgacgacgcgacgatagcgagcatgcccgtggcgctgtaccgggccgtggcgtcggctgcaggtgatggcgacgacggcggcgccgcgcagtgctcgatatgcctcggggagttcgaagagggcgagaaggtgaaggcgctgccgctgtgcgggcacgggttccacccggagtgcgtggacgcgtggctccgctcgcggccgagctgccctctgtgcaggagctcgcttctcccggccgcggccaccaccaaaccggacgtcgccgggagcgatgctgcggccggcggcggcgagcagcttcagggggcgttctctagattttgggacactggattagcttcaatattcatgctcctggccttctcctccaactccggcgacctcctcttcttctctgacgctggcgacactttagactccggtagaggaccctacagcgacgctggagctgtggtgttggaagagggcggtgggctgatgttggtggcggggcatctcgtcgttgacggcttggggaggcagtcggcggcacgatggggcggtggcggcaggggatcaggcatagcggagaaatgcgtgatggtggcggcgaaatga

SEQ ID NO: 100222 - DNA, 1818 bp, Oryza sativa
  Clone ID: PAT_MRT4530_9795C.1
atggctgacaatgagaaaggcaataaggtcagaagtcaggacattggtacctcaagctcccgagtgaatgaagcaccagacaccagttgtgtgacactggtccaacacctgattaaccagaaccgattgcttatagagatactacagcagcatcagacgccaattctgaacctgagtcaaatacaacctcaagtgcagttggaggcagtccaagcactcacaccacaagtcagcatgccgccagcatcccgaaggacccatggtgacgtgccacatgttgacccaaaagaagcaagtaacatttgctttatgtgtgatgagcaagggcactatgcaagggagcgtcctcagcagaaaagaaaaacaccaatgcgaaccgaagatgaagtccgtaagatgatcattaccagcacagaatggcctccaccaggaatgacaagacgtcagagaagaaataccttccgaggtgcaccacagttgacagagcatcttttagctaatggaggtagagtgtctgatagtgaagattcagatcaagtctcctcagatgatgaagatgaaatggaacgtaaggcatgctctcgttgtggagaaatcggtcatgtcgccagctcgtgtgccactatatgcgttcattgtgaggaagaccatccacccgacaggtgtccaacgagcaggatcacttgtttcttttgtgaaggaactgatcatgtaccaaaagattgtcaattcagttttctgctgacgaagaagatggctaaccaacccgccagttccaacggagagaagcctcaaggcaacaccaatcctcgccaagattacagtctcagcttaaaaccagtgccaggacagaggaatcaaaatgagaaaagaaaatgccgagtccgggaagatatctgttgcttcaattgtcaaggaatgggtcatttcgccgacaagtgcccaaaaccgagaaacatagctgccagcacgtcagtccacgcaactccctgcaatcggaagcttgctcctcagcgaattgacatccatgcatcccgaagcagtcctatagcccgcgttgcaacagctccaactccagcgagtgcattaccacaaggtgtcaatgctcaatttcagccccagccatcagttgacaagacagaggccagtatcggcattgtacctttggatgttccagcacagcagccaagaaatcaagtacaggatgaagaacccaagccactaaccattctctgcaccgacagcctcagcaaagaattgtcgtcgatgaaagaagttgtgtctctccccgacctactccaggccaagcaaagggcaatcaatctcaggagggcgataccaagcagaagaccgtcatccgcttcaaacagcaatcaaaaggaagcttctcctgtgaatgatagcattatgcagtcctatcacatcatcacagaaccaatcaaggatgcagtcactagaacaatgcccgctatatctctccagaatcaaaatgagcagccacgcttgtggttttcagttcgctacctatcattgtgcagtcgaaagtttgcagcaatcactggtaacttgtctgaggttgactccgaagatatgaatcatgagaagttctggaacggaagcatcactgaactaccgcaacctagtctgagtcagccaaaaggtgcaccctggtccaagtcaggtgaagagaagattccatccgcaacaggaggtcaagccaagcagttccgagtggtaaagttttgctggaagtttgtcaagacgcaacggaagaagtcagacaagaagagaagaccgcccaacctatcttcttgctag

SEQ ID NO: 100223 - DNA, 334 bp, Oryza sativa
  Clone ID: PAT_MRT4530_97960C.1
gttgtgaaaagccagaaactggacaccattctattacagatgtggctcatccagctctagattggtgaggcacataatttaagaggactgcatctaaaagacacctggaggaactggatactctaccaccaagagcgaacaaagcctacttgatgtgttgaaccatgacgagcgaggagcagctaaacgcacgaaccagtcaagctacgacccacagctgctgtatcaggttcagactcaatcgtggctgactgacgctctggagaagcacactttctccttgctagagacgcgatggctgaggaccctgatgctgcgatttacctagcatatg

SEQ ID NO: 100224 - DNA, 216 bp, Oryza sativa
  Clone ID: PAT_MRT4530_97961C.1
atgccattggctgtgtgggtcaatcggattctttcgtcttttctaaatgttttatgttgttgtaacctgatacttgttggagcttctgccatttgctgggctctatggttgagtagaaatggtaattttcagggcaacacactggctccggttttgtgcacagctacaaagttttatggtatggcagccagggttttcctaccacatggtaattaa

SEQ ID NO: 100225 - DNA, 111 bp, Oryza sativa
  Clone ID: PAT_MRT4530_97962C.1
atgtcgaggtacgaccatctgaagtcgtggtgcgaggaccgctacgctattgccgtagtcgtacctcgaccatctgaagtcgtggcgcgagagatcgctacttactactga

SEQ ID NO: 100226 - DNA, 299 bp, Oryza sativa
  unsure (1)..(299): unsure at all n locations
  Clone ID: PAT_MRT4530_97963C.1
ggtgaggattcngcatagntgagaccagattggctnnantgagctcnaacgtcataagnctcgancccgccgnggtggactccncaaactcagggcccngccgatccgcnntgttntcccnggganaantcaatttgnnntangaaaaacgggcngaaggacccccnttnngttggttcccgcgnaaatttcaanaaccccnntncaaggnctggggcnggcaangntcgngnnttnctngaattcnacnntggtcaactgngcctatgangaatntaaaacatacctacacatangcg

SEQ ID NO: 100227 - DNA, 1901 bp, Oryza sativa
  Clone ID: PAT_MRT4530_97964C.1
actcttaacaaaattaaacactggggggtagtcttttacctcgctatacaaacatttgaattcagttattgacatcgacccattaaagcattattactttttggatctaagcttcgccttcattttctttacatacagggaggggggcggaaaaaaattggggggattcaaagcaaagcccctatgttgacaaaaggaatgccagttgctacgggtgggaaacaaatgggttggggctcaaagcaaagcctttatgtcgacggggcgctcaggctttttggcatggaaggctctgaactccggggacttccttctcaattgtgccttctaattgaagaagaacacaacactgccaaggctcttgagggaataccaaagagggatttggcgcttggtctcttagccttctccttcttcttcaactcagccattccaagtacttcaggatcattcacaagttcgaagttcttgtacgtgtagcccacaaaattcaaatcctttgaagacagcatctttctccaaggtcccgcctttgctgaacattgaatattgtctgaagactcttcaaacttctcaaaattctgagtatctaactcatcagtgacttgaggttgatatgctgcttctatttcatataatttgtcccattctactccactaaaccaggagtgctcctttatttcctcggccccttttgtgccaagacgttggtcaacattgcataagagtttgcttataagatcttttgcatctgtcattagccttgcttcttcaggaaatttcaaatgtgttcgccaattcactatctttctgcaagttgtcataggctcatcagaatagaatgggggatagcccactagcatttcatacatgattgctccaagtgaccaccaatcacactccattccataacccttttttagaagaacttctggagcaatgtagtccggtgtaccgacagtggagtatgccaaagttcttctgttcttttgccagtgctccagctgttcttgctgcgtgcgtttgggcatagattgctgtctcccatcaccatttgttgactgtggttttgtagacgtaacatccttctcattcaggtctgggaagttggaataatctagtggtttgcataatccaaaatctgacagtcttaagtgaccatgtctatctaataaaagattatcaggcttgatatctctgtggatgtagttgtgcctgtggattgcttctattgcaagaactgtttcaccaacatagaacctggcctcatcctcagtcaatgtatctttcctcattagcaatgtcatcatgtcgcctccagggaggtattccattatgaggtacagatattcactgtcttggaatgaacagtatagcttaacaatgcaatggtgatccacttcagcaagaagatttctttcagctttgacatgctcaacctgaccacgacgaagcatttctgacttcctaagtttcttcatcgcataaacatttcctgtgttcttctctctgcagactctaacctcaccaaatgctcctttccctatcattgtcaaaagatcaaaatcatcaacactcattttgtgcctctgcatacgcatatactctgtctctttcttctcaaattgcttaactatgttgtgctgctcctcctcggagacgttagcatctgctagtttcttttctagactacaccttctttctttcctgtcctgcaaatttttcatctgttccttgtaatgcttctcaatgtactgcttcgccgcagcaaccctctgcttggtagcgctcgatggcgcctcgtcggtcccttccttgccattgggaggcaattctttcttcttcccaatggatttctctctggtttggagcttggtgaaccaactcctcgctgaatccat

SEQ ID NO: 100228 - DNA, 1501 bp, Oryza sativa
  Clone ID: PAT_MRT4530_97965C.1
ccgcgtccccgttttttcttttttttttttttactgcatgtagatggtagatggactatatattaaaagcaaagttcttaaatgggtgacagatacgggcatatggcatgccggacaccgacattacagttacagttacatggccgcgaaacagtggtaagtaagtaaattatctactgagtcttggtgaaattgaagttactgcacgacgtgtagaacggcagcctcgcgaacccgagccgcttcttctccgagtcgaactgcagcaacatgttctccatctggaaccctccgaggatcaccgccggcgaactggcggcgtcgccggacttcatctccacgaaggccaggcacgccttgccccccttcacgtccaccatcgagttggtccccgtcatcgtgtagttcttcccgccggcgagcatcagcctcaccgccggcacaaagtagccgatccgcgtgttccccagcatcgacgccctgtagcagagcgggaacggcgccacggcggcgaccttcgcgtcgctccggttcaggcccttctcgaactcccggacgaacgggcggaacacgtccggccggagttggccgaacggcacggcggtgcgcagcgccacgccgccggcggcgagcgcgccgctcgggaggggtagccgcgcgtcatcgagggcgatggcgttggcggtgacgtagtagccggggttgtctctcttggcgacgagcggggtgtagtccagcgtcgtcgtgaagtccggcagcccttcgccgaggtatatcgggccgccgccgaagatggccacgccctggccgtacccgagcctcgggaggcagaggaggaacctgccggcgacgccctgcgacgacgcgacctgcgccgggagcgcgaggccggaggcggcgaggccggcgacgcccgtggcgccgcgcggcagccgcgccaggagcctcttgggcgcgcacgccgccacggccttgacggagacctggatcagagggttcttgccgtcggtggtgttggcgatgaacctcgtgtgggcaaggttcccggcggcgcactgcccggtcaccgggttgtacgggtacgccgtgcacacgttcttgctgcagtcgccgccgccgccggtgaccttgcaggtcggagcacggtacgcgttggcgaccacgcacgtcgggtcctggcaggacagcgacgccggcaggtggtcggcggcgcacgtcgaccagacgagcgggccggcgaggtcgacgacgaggttgtcgtagtacctgacggggatggtgtagagcgaggtggccgggtccctggtgacgggaaccaccacggggtcccgacgacgaggcgccgcggcggagcacgacggcggcgacgccagcagcacgagcagcgcggcggcggcggcggcgaggacgaggttgccgtttcgtggcggcatcttgaacgatatgggtgatggatgatgaatgttgtacgtagctaagcttgtgtgtgtcttccggccgg

SEQ ID NO: 100229 - DNA, 400 bp, Oryza sativa
  Clone ID: PAT_MRT4530_97966C.1
gttaaaaaaaaaaaaaaaaaaaaaaaaaaaaaaaaaaaaaaaaaaaaaaaaggggcggacgctcgcgatctacaactagtccacccacatgtcattttcccatttaaaaaaaaaaaaaaaaaccaaaaaaaaaaaaaaaagaccaaaaaaaaacaacaaaaaaaacaggaaaaaccaaaaaaaaaaccaaactaaaaaaaaaagggggcgccccctttaaagggccaaagtttataaccccgggattggcccgcaataatttttttttggggcacctaaaataaaatgaatggcccgtggtttaccaccctggggccgggaaaaaccccggcggccccaattaaaacgctcagcagaacatctccttttgccagggtggtaaaataccaaaaaggccctt

SEQ ID NO: 100230 - DNA, 276 bp, Oryza sativa
  Clone ID: PAT_MRT4530_97967C.1
atgaagattagccacttgatgatcttcaatcttgtccttctggttctgtcatcagatatgacgatggctgcgaggatgacgaattatggacggttagacgctccggtttgtaaaaagataacctttaaagtacattgcgatgatatcaaaccatgcgtccagctatgcgcaactcaagatcctctatatcccattccttctatggttgcatctattgtttgccacaatagttcagaatgcgagtgcatgtactgcccaagagctattagaaattaa

SEQ ID NO: 100231 - DNA, 137 bp, Oryza sativa
  Clone ID: PAT_MRT4530_97969C.1
cccacttcgtctgcccacgcgttcgcgtggttgtagaggggggatttattaggatacccgaatcgcttgtttccacctggccaaggtcgcgcactgaatccccagtacgagatgtagattatgggaatagagtgccg

SEQ ID NO: 100232 - DNA, 9126 bp, Oryza sativa
  Clone ID: PAT_MRT4530_9796C.1
atggtgaatactcgcagcaacgggaatggtcccaacaaccccaataacaataacaatggagagaacccaactctggcccaagttcttcctcaacagacacagcttatgaacatgatgatgcagcaattccagaatcagcagaaccaaggaaataaccatgtacctccccagaataagttagcagaatttcttcgtgtgaggccacctgttttctttagtaccactaatcctattgaagctggtgattggctgcatgccatagagaagaagttggatttacttcagtgcactgatccggagaaggtatcttttgcatcacatcagttgcatggctctgcctctgaatggtgggatcacttccgcctgaataggactactgctgaacctatcacttggcttgaattcaccgctgctttccggaagacgcatataccatcaggagtagtgtctctcaagaagaaggagttcaggtcgcttactcagggatctcgctctgttacggagtatctgcacgagttcaatcgtcttgctcgttatgctccggaagatgtgcgcaatgatgaagagcgccaggagaagtttttgggaggacttaatgatgagctttcttacccactcatggttggagattattctgatttccagaaattagtggataaggctatacgtcaggaggacaaggcacaacaggggagtaatcaaaagccgcgtcttactttaggaccccagtctatgccacagggaggttcttcgtctgttgttcgtccgccgcgtcagttcttcaacaacaatgctggcaataacatccgcaatcaaactccacgtcctgttgcagctccaacacagcaacagcctgccaagagggagcaaggcagcaagcccgtggttgtccctgcccagagtaactctgctgtaccagcatcaaaggcccgtgtcaatcatgttgctgctgcagaagctcaagattctccagatgtgattttgggtacgttccctgttaactcagttcctgcaacagtacttttcgattcaggtgctacacattcattcttatctatgagttttgcgggaaatcatgggatggaagtagaagatcttagacatcctttgatggttagtaccccaagtaatcaagcactctctttgcaacgtagcccctcggtcagaatagaaattaaaggagtaccatttctggccaatcttatcttgttagaatccaaagaccttgatgtcatcctagggatggactggttagccagacatagaggtgtgatagactgtgccaacagaaaagtaactctcaccagcaatgatggtcgagttgtgactgttcatgcattgtcttctgagtctttaaggtcaagactgaaccagataactttggaagagattcctatagtccgggagtatcccgatgtgttcccagatgatttacctggtatgccgcccaaaagggatatagagttcagaatagatctggtaccaggaacaactccaatccataagagaccttatcgaatggcagccaatgagttggcagaagtcaagaggcaagtggacgatttgcttcagaaaggatacatcagaccgagttcatcaccatggggagctccggttatttttgtggaaaagaaagaccatacccagagaatgtgtgtggactatcgtgcgttaaacgatgtgactatcaagaataagtatccgctgcccagaattgatgatttgtttgatcagcttaaaggtgctaccgttttctccaagatagatcttcgatcagggtatcaccagttgagaatcaaagaggaagatatacctaagacagcttttaccactaggtatggattgttcgaatgtacggttatgtcttttggacttaccaatgcccctgctttcttcatgaacttgatgaataaggtgtttatggaatacctagacaagttcgtagtggtctttatagatgacattcttatctactctcgaaccaaagaagagcatgaagaacatcttcgccttgcattggagaagctacgagagcatcaactgtatgctaagtttagcaagtgtgaattttggttgtctgaagtgaagttccttggtcacgtcatctcagcaggaggagttgccgttgatcctagtaatgtggaacccgtaaccaactggaaacaaccgaagacagtttcagagattcgcagttttctaggcctcgcaggatattaccagaggtttatagagaatttttccaagattgctaagcccatgacacgattgcttcagaaagatgtgaagtacaagtggtcggaagaatgtgagcagagttttcaagagttgaaaaatcgcttaatatcagctcctattttgattttacctgatccaaagaaaggtttccaagtgtattgcgatgcatccaaacttgggttaggttgtgttttgatgcaagatgggaaggtggttgcctatgcatctcgtcagttacgtccgcatgagaagaactaccctactcatgatcttgagttagctgcagtagttcatgcgttgaagatttggcgtcattatcttttcggtactcgtacggagatgtacaccgatcacaagagtttaaagtatatttttactcagccggatctgaacatgagacaacggagatggttggaattaattaaggattatgacatgggaattcattatcacccgggaaaggctaatgttgtagcagacgctcttagcaggaaaggctattgcaatgctaccgaaggacgacagttgccattggaattatgcaaggaatttgaaagattaaatttgggaattgtcagtagaggtttcgttgcagctttagaagcgaagcccactctaattgatcaagtcagagaagcccaaattaatgatccggatattcaagaaatcaagaagaatatgagaagaggaaaagctatcggtttcttggaggatgagcaaggaactgtatggttgggtgaaagaatttgtgttcccgacaacaaagacttaaaagatgcaattctgaaagaagctcatgatactttatactccattcaccctggtagtactaaaatgtaccaggatctcaaggaaagattttggtgggcaagtatgaagcgtgaaatcgcagaatatgtagcagtatgtgatgtttgtcagcgagtcaaggcagaacatcagaaacctgccggtttgctacagcctttgaagattcctgaatggaagtgggaagaaatcggtatggattttatcactggtttacccagaacgtcatcaggccattactctatttgggtaatagtcgacagacttaccaaagtggctcatttcattccggtaaagacaacttattctggaagtcgattggcggaattgtatatggcaaggattgtgtgtttgcatggcgtccctaagaagatagtgtctgatcgaggcagtcagtttacttcaaatttttggaagaaacttcaggaagagatgggttctaagctgaattttagtactgcttatcatccgcagacagacggacaaaccgaaagggtgaatcagattttggaagacatgttgagagcttgtgctttagacttcggtggaagttgggataagaatctaccctatgtagaattttcgtacaacaacagttatcaagctagtcttcagatggctccttacgaagcactgtatggtcggaagtgtcgcactccgcttctgtgggagcaaacgggagaacgtcaggttttcgagacggatatcctaagggaagcagaagaaaaggtgaaaatcattcaggaaagattgcgagtggctcagtctcgtcataagagttatgccgacaatcgccgtagagatttgagttttgaagaaggagattatgtgtatcttcgtgtcacgccttttcgaggagttcatcgttttcacaccaaaggaaaattggcaccgcgttttgtgggaccctataagattgtcagtagaagaggagaggttgcttatcagttggagttacctcaatctttggcaggagtccataatgtgttccatgtttcgcaattgaaaaagtgtttaaggattccatcgttttcggagagtccgttttcgccggagaagagcttgaagagttccaaggccagcaaggcaactcctggtttggaatggtacattcctggtttggagatagaactgtgcagccgggatggttgttcagaatggttgggcctatacaacaggatgccgcgctacaagcttgagtacctgtttggtgttgagggttttgtccaggagttgcgtacgatgtcctttgccattggatttgggactgcccctttttatgcccagattcctcatgatcgtcatgaagagaagtgccgagtcaaagtcaccttgaacagcaatagtgaagagatcccctcagtgatgttcgaagctggaggaagaaactacatccatgcatgtcaggaagtggcaaggattgccataggagagctccgtgatcgctatagtgatcagttggccgacactgagtatcgctaccatcctcgtcaaccccagggaagtgaccgtggcagctaccttgagactgaaggaattgagaatgatgctaccacaaggcatttggttgagatgctgtgggctatggatgaaggtcgtgcggagactgtgttagcggctcaagatcgtgaagaccggaatcgtggtaagatttgcaagttagaagacaaggtggatcgtttggaaaaggaattagccgcgttaaagggagaagcaccgccgcagaaggccaggattcgtcttaccgcaaggaagagagctttatttgtccctcgctatcaattggcgccaaagatggtgaacactcgcagcaatgggaatggccccaacaaccccaataacaataacaatggagagaacccaactctggcccaagttcttgctcaacagacacaactcatgaacatgatgatgcagcaatttcagaatcagcagaaccaaggaaataactatgcacctcctcagaataagttagcagaatttcttcgtgtgaggccgcctattttctctagtaccactaatcctgttgaagctggtgattggctgcatgccatagagaagaagttggatttacttcagtgcactgatcaggagaaggtatcttttgcatcacatcagttgcatggctctgcctctgaatggtgggatcacttccgcctgaataggactactgctgaacctatcacttggcttgaattcactgctgctttccggaagacgcatataccatcaggagtagtgtctctcaagaagaaggagttcaggtcgcttactcagggatctcgctctgttacggagtatctgcacgagttcaatcgtcttgctcgttatgctccggaagatgtgcgtaatgatgaagagcgtcaggagaagtttttgggaggacttaatgatgagctttcttacccactcatggaggacaagtacaattgcatggagcagaggaaacgtcggattgctcacttcaaggcacaacaggggagtaatcagaagccgcgccttactttaggaccccagtctatgccacagggaggttcttcatctgttgttcgtccgcagcgtcagttcttcaacaacaatgctggcaacaacatccgcaatcaagctccacgtcctgttgcagctccaacacagcaacaacctgccaagagggagcaaggcagcaagcccgtggtatgtttcaactgtggagacccaggacattatgctgacaagtgtccgaagccccgtcgcgtgaaggttgtccctgctcagaataactctgctgtaccagcatcaaaggcccgtgtcaatcatgtcgctgctgcagaagctcaagatgctcccgatgtgattttgggtacgttccctgttaactcagttcctgcaacagtacttttcgattctggcgctacacattcattcttatctatgagttttgcgggaaataatgggatggaagtagaagatcttagacgtcctttgatggttagtaccccaagtgatcaagcactctctttgcaacgtagcccctcggtcagaatagaaattaagggagtaccatttctggccaatcttatcttgttagaatccaaagaccttgatgtcatcctagggatggactggttagccagacataaaggtgtgatagactgtgctaacagaaaagtaactctcaccagcaatgatggtcgagttgtaactgttcatgcattgtcatctgagtctttaaggtcaagactgaaccaaataactttggaagagattcctatagttcgggagtattccgatgtgttcccagatgatttacctggaatgccgcccaaaagggatatagagttcagaatagatctggtaccaggaacaactccaatccataagagaccttatcgaatggcagccaatgagttggcagaagtcaagaggcaagtggacgatttgcaacagaaaggatacatcagaccgagttcatcaccatggggagctccggttatttttgtggaaaagaaagaccatacccagagaatgtgtgtggattatcgtgcactaaatgatgtgactatcaagaataagtatccgctgcccagaattgatgatttgtttgatcagcttaaaggtgccactgttttctccaagatagatcttcgatcaggatatcaccagttgagaatcaaagaggaagatatacctaagacagcttttaccactaggtatgggttgttcgaatgtactgttatgtcttttggacttaccaatgcccctgctttcttcatgaacttgatgaataaggtgtttatggaatacctagacaagttcgtagtggtctttatagatgacattcttatctactctcgaaccaaagaagagcatgaagaacatctttgccttgcattggagaagctacgagagcatcaactgtatgctaagtttagcaagtgtgaattttggttgtctgaagtgaagttccttggtcacgtcatctcagccggaggagttgccgttgatcctagtaatgtggaatccgtaaccaactggaaacaaccaaagacagtttcagagattcgcagtttcctaggcctcgcaggatattaccggaggtttatagagaatttttccaagattgctaagcccatgacacgactgcttcagaaagatgtgaagtacaagtggtcggaagaatgtgagcagagttttcaagagttgaaaagtcgcttaatatcagctcctattttgattttacctgatccaaagaagggtttccaagtgtattgcgatgcatccaaacttgggttaggttgtgttttgatgcaagatggcaaggtggttgcctatgcatctcgtcagttacgtccgcatgagaagaactaccctactcatgatattgagttagccgcagtagttcatgcgttgaagatttggcgtcattatcttttcggtactcgtacggagatgtacaccgatcacaagagtttaaagtatatttttactcagccggatctgaacatgagacaacggagatggttggaattaattaaggattatgacatgggaattcattatcacccaggaaaggctaatgttgtagcagatgctcttagcaggaaaggttattgcaatgctacagaaggacgacagttgccattggagttatgcaaggaatttgaaagattaaatttgggaattgtcaatagaggtttcgttgcagccttagaagcgaagcccactctaattgatcaagttagagaagcccaaattaatgatcctgatattcaagaaatcaagaagaatatgagaagaggaaaagctatcggtttcttggaggatgagcaaggaactgtatggttgggtgaaagaatctgtgtccccgataacaaagatttgaaagatgcaattctgaaagaagctcatgatactttatactccatgcaccctggtagtactaagatgtaccaggatctcaaggaaagattttggtgggcaagtatgaagcgtgaaatcgcagagtacgtaccagtatgtgatgtttgtcagcgagtcaaggcggaacatcagaaacccgccggtttgttgcagcctttgaagattcctgaatggaaatgggaagaaattggtatggattttattactggtttacctagaacgtcatcaggccatgactctatttgggtaatagtcgacagacttaccaaagtggctcatttcattccggtaaagacaacctattctggaagtcgattggcggaattgtatatggcaaggattgtgtgtttgcatggcgtccctaagaagatagtgtctgatcgaggcagtcagtttacttcaaatttttggaagaaacttcaggaagagatgggttctaagctgaattttagtactgcttatcatccgcagacagacggacaaaccgaaagggtaaatcagattttggaagacatgttgagagcttgtgctttagacttcggtggaagttgggataagaatctaccctatgcagaattttcgtacaacaacagttatcaagctagtctacagatggctccttacgaagcactgtatggtcggaagtgtcgcactccgcttttgtgggatcaaacgggagaacgtcaggttttcgggacggatatcctaagggaagcagaagaaaaggtgaaaatcattcaggaaagattgcgagtggctcaatctcgtcataagagttatgccgacaatcgccgtagggatttgagttttgaagaaggagattatgtgtatcttcgtgtcacgccttttcgaggagttcatcgttttcgtaccaaaggaaaattggcaccgcgttttgtgggaccctataagattgtcagtagaagaggagaagtcgcttatcagttggagttacctcaatctttggcaggagtccataatgtgttccatgtttcgcaattgaagaagtgtttaagggtacctaccgaagaagctaatcttgaacagataggagtccaagaggatctgacctatgttgagaaaccaatccgtatcttggaaacaagtgagagaagaaccaggaatcgagttatccgtttttataaagtccaatggagtaatcactcggaagaagaatcaacttga

SEQ ID NO: 100233 - DNA, 1362 bp, Oryza sativa
  Clone ID: PAT_MRT4530_97970C.1
tcagtccaccacctcgagcgagtcgtactccgggccggagatggcatcagccatgacggcggccggcgtgagttggccgtcccactccaggaagagcctcaccaggttcttggagtagccgctcaccaccgccgcgttcgcctcggtagccaccaccggcgccgacgccggcgcgcccacgttccagaacaccacctccggcgccgtgaacccctccgccgtgaacttggacctgatggttttcagctcgtcctgcacccgccacgcgctggcgttcagctccatgtcgctcagcacgaacaccctcctcaccatcatgtccttggccagcccgccgtaggtcgcgacggtcaggatgcggtcgaacacgccctgcaggttcaggctgctgcccttgggggcggcgcgcacgggcgccgccagcgaccggagcttctccaccagcgtcgcgccgcacaccttgtgcagctgctgcgtcgcgtcgaaggtgatcacccgccccttccatggatcctggctcagctccgagatcagcagccccagcgcgacggccgccgcgcccggtggcttcgccacgtcgcctcccgacgacagcccgcacaccgcgatgcagttgctcagccgcccgcccgccgccagcgcggacaccatgcggcgccactggagctcggcggcctcgtcgtgctcgcccttgagtgcagcggccaccagctcgtgcggcattgcggcgccgacatgcagccgcgcgtgcccggtgcgcacctcgtccaggaagcctgcgacgcccgacttgtcgtgcttctcgaacgcccccttgtactgccgcatcgccacggacggcacgcgcgcgtagggcatctgttcccacttgcccgcggtcatgtacacctccgggagctcgaggaccttgcgcaggggcacgagcacctcgcgccggagccggttgcggacgcggtaggcgtagtgctcgtcggagaggaagaggtactcctggctcgactcgcgcgggaacatgcggcgggcgatggcctcgcagagcagggtcgcccggtcgtacgacgagcggagagacgggcaccacttggccgcgagcccgatcttggcgttctcgccggcgcgcatgtgctcgacgtcggacttgagcagctcggcgaacgtgtcggcgacgccgtcgtagaggaagcggaagctgacgtccgagccgtaccgcgagagcacggactgcgcgagctgcgcctccttctgcagcctggccttcgccgcctcggcatggtcgatgcagcggcgcttgaagcggaggcgggggcggcggcggcggccatcctcggactcggtctggtcatcgccctcctcctcctcctc

SEQ ID NO: 100234 - DNA, 548 bp, Oryza sativa
  Clone ID: PAT_MRT4530_97971C.1
acggcacgaggagagagagaactagttcgagtatttttttttttttttgagtgcaacattgtttcaactatatcatatagtaatgttaatctcggtgtcacacaggatcccttgcttcctgtgtaaggagctacagttgtagatcgagtaaacacaggtttacatgattctgtgaaagagcacaagcacacactttgtagcaggaaattactacaaatactcccagggacaaaaagatctcaacttgcacaacatgtactacagatcgactactagtctcctacatggtacccacatagtccataggtattctacggatcatccagcagtcacatcagtgattcacataggaagaaaaatatatgtaccgcaatagtgcaatgaagaacatcaatacaaaaggccattctccagtctgcctcaagagtcacagtcactggtctcagtccaaagggccaatctttttctcttccttttaacgaaaaagtttcacacagctgcttattataggtggtattcctttcttcacattcactgcccaccttacg

SEQ ID NO: 100235 - DNA, 942 bp, Oryza sativa
  Clone ID: PAT_MRT4530_97972C.1
atggagcagttccacgacgggcaccacgtgtggctgcggagccgcgcccagggcacgtacctccgcgccgacgacgacgggagaggcgtctccatgggccagggccgcgcgtccgtgcacgcggcgtggacggtgcacacgcaccacctcaacgccggcgacgtcgacatcctcatgctccacagcgccgcgaacgggcggtacctggcgacggggctcgggtggacgcggcggcgcctcctcagcggcaaccgcgccagcatcatcctccgcgatctcgaccaggaggtgttcccccccgcctgctggttcgctatcaggtcggggtggggggacgacgtcctgctgcgtcactgcagctggcgcttcctccgagctgacgacaggaaatggaattggaatcggaatggcaccggcgtcatcgccgacatgatcgacggccgccgcctggcgaggtggcagtgggtggtggaggccatccccccgaggaactccatacctaggcctccgaatccttcgccctcattcggtttctttgcgcgtcgcatcattttccggcgattaacacataatgatttacaatgggtttggatctggttcactgggaggtctgcgctccatctatggaaccagctgtcgagacgaatgggcttcgaaccagaccccaactccactatgtgtgttagagcaggaacctacggacggctgactcctctggtgaccgatctgcctcgcaacaatgcgacaatggtgatattcgttctcccacctgagtcattaggtgagatatgtacctgtgcaagacttgctgtcgccttcttgttttatggctattggctaatgttctatagattacatgctcatggtattcatttagtcttgaatctctcgtgcgcattgcagtgctctagatcagtcgtactgttgctgcatgtttcatga

SEQ ID NO: 100236 - DNA, 466 bp, Oryza sativa
  Clone ID: PAT_MRT4530_97973C.1
gcacgcgtgcgtgaactctgaacctctaccgccctctccctttttttttttaccaaaaaattattgactattaaaaccattgcatgcggtattgttcacggcacgtactatcccacactcacaaacatcgatgaaatggactgcgccagcgacttaccatgcagttcaacactactgtgtacgagtgaatggacgtctacttggccgcagcgttcaaggtgaggaacgtccgctcgccgttgaatttgccccgcgggtcctagttgcaggtgatgaacacaccgcggttcgccgtgcacacgacgcagccgcagccgatgctcaccgacttgcgccacaccacatgggtgtattggcctaacacattgcccgtgtcacacgtgttggaatcgcaatgacatttatttttctaccccacccacgacgccactcgcgtaagcggcgctccatgctcgccccaccaagc

SEQ ID NO: 100237 - DNA, 2282 bp, Oryza sativa
  Clone ID: PAT_MRT4530_97974C.1
ttaactgaaattatcttcccttgggttttcaggtaggtcttttttttcttgtcatattaataaaatcgtagagttataggaagataagagggaattactacagcactgcacagaaagcaggacttttctgcctttactgttcacaactacagtaaagttttttttcgccttcaacctaaccttttttcttcataaatctaacctttccactgtcattaagactatacacaaaagggaaacacttttactcccctaatcatctgggagctttctgcatccatgcatcaccgtcaatgcaaaccaacaaaatgcggcatcaagttctctcgtgttttgtacatttcacaatccaacagtcagcgtctactgcagataaattagcctccttcagaaaaacctcccggtaggccgattacttgaatcttttaactgaaattatcttcccttgggttttcagggaggtcatgcctttcttgtgtggcatcttgctgggccatggagataaatgttccgttcaacaggttctgaccggtgttttcagtttgcttagtttggactagcataagccgacagcgattgtcatcttacctcatttgtatcgaatcaacatgaatgcggggataggcaccaaagttcgtcataaggcttccactgacacgtgtggggtctgtgccgcaaaactttccctgtctcatgtaagatgtgtctggggaatcagagaaatagccgaaattactctcaaaagggaaaacagatggggcagacccaacattaaactgggagaagtgctcggatgccccaaaggaaccacgcagattctgatacagattactctggcgttgtggctggttattgggaaaaagtgagttgctaagagcttgagattggatagatgaaggctggccatgatcccttaagttattgttattaccccagagaaatgatgttccagtcagtgcagtaaaaccagatgcagtagaggctgacgaagctgcggatgacacaagcgggctggcacttataattccaccatgatgttctggaaacgaatgtgaattgtgcaaagttggtgacccatggaatatgttgtcagcacggttattccaataggagctcttcccaacgggtgatttcatgggaggatatcctgaagagaacccagaaagatggttactgcccaaagggctcattcccccattaaatgcagtttcattgagtgcatttaatttattttcatctgttgggctgccaagttgggaccacaaacttggtggagagttggcagaaggtgaaccaatctgaaatgaattatgctttgtttcgtcttgctcaaattcgtgattaaaatgctgtataaaacttcggcgagctccaccaggacggctaggttccaactttacccgttttccagcaatgtcactcttgtttaatgaacggagggcagattctgcagccctaacatcatagaactcaataaatctatggtgtcgcttatgtggtgtctctcttatctgcaccaggcgtaaagcaccaaaaatttgaaggagttcctcatttgaaacagctggttccagattaaagatcaccagggttccttggttcatatctttatctgacggattctccttgggaattgaatagtgaatgtcaagtttcctcctccttaatggtttactttgcaatgcagtctttgcatttcttgcatgacggatatcgtagtaagatatcataacgaatcctctgtgtttcgttgcagtgtacatggaccgaatatccccaaatggctcaaacaatgagcgcagttctgagtcttcaacattactattaatgttccgaacgaacaatgtcctggacgggtgctcaccataaggatgctcaccagtaactgttccagcaccattttggatgctgtactgattagtgctacttccagtaccattgacaaggctagcctttgctgtaccaaaggtgatgctttccagagggtcaatatccagctccatacccccactattgcggaaaacatcatattcttctgattcctcaacttgggttctcagtttaacatgatcaaaatcttcaattaccccagccaatagctcttcatcatctggtaacagatttccaatcaaatgctgtgctacatcatccatggggtcagccactctagcattagtgcctggctgcttcatcatgggaaacatatcatcctttggttgagcattgtactccctttctttacctggcactgatgatttggtatgatcctcacgctgctccat

SEQ ID NO: 100238 - DNA, 666 bp, Oryza sativa
  unsure (1)..(666): unsure at all n locations
  Clone ID: PAT_MRT4530_97975C.1
cggagtctcccgttggagctcgaaacccttgctacaccactgtgctgcccggagtagaagaggcggacgccgccgcgtaactcgccgccggcgaaggtaagtaggctttgttttgcacgatggaggtggacccaggtgatcccttacctgatactaacagagattggtccaagcttccagtggatgcactttctgcagtcttcatgaaacttgggactgttgagattctgatgggtgctagctttgtgtgccactcatggttggcggcttcaaagtcacctgaactgtggcgattcgtggacatgacacgccacaaggtgattttctcaaagggaacagacatactgtgtgcgatggcaaaagcggcaatagaccgctccgatggacggatggagtcgttctgggctcagaagtttgttacttgtgaactcttggattacatcgtgagcagggccagtagtacactgaagagcattcggctaattgcatgcacatttgtttgggggcagtcattggctacgcttgccgctaggtgtncacttctagaggagatagagtgttcgcatcataaaatgtcagcagattttttcaaatatgttggcacttgttcgcccacagctganacgtctacgagtccatatgccgtatttttgattatgatgcgat

SEQ ID NO: 100239 - DNA, 278 bp, Oryza sativa
  Clone ID: PAT_MRT4530_97976C.1
aacccggttgcgcgagccctgccggaggggtcgtttgagcagatctaggagagtagatacaatattacaatgagaactttcaatgccgaagaggagaacagtaccatgtgaactgactggtccatggattagccgatcctaaggtacgtagaaactctcggcagagagcgcgacacgcgcgagccctcagggaatgaatcaagattcacaagctcgcataccaaagcatgacctggacttttagaagtccagagacgccggaggaggcctagctaaga

SEQ ID NO: 100240 - DNA, 2153 bp, Oryza sativa
  Clone ID: PAT_MRT4530_97977C.1
atggcggcagcggcgaattcctcggcctccgcggcgggggccggcggcggctccgcggccgcggccctcctcgcggccgcgtggatcaatctcatcccctcgcacgcggaaaccctagacccgcgcttccatggtggtatgaccggttggcctcgcgattggggggtgggaagcggtgcggtggtggtggtggttagggtagcagaggcattcggcgggcgatcgccgtgaagcgggtgtgtgtgggggccagcggtggcgccgggcatggcggcagcggcgaattcctcggcctccgcggcgggggccggcggcggctccgcggcggcggccgggctcaagacctacttcaagacccccgaggggaggtacaagctgcagtacgagaagacgcactccgccgtcgtgcttcagtacaaacacggcgggaagaccgtctcgcagttgacggtagcgtatctcaaggagaagcctgccggacagggctccacgccttccacgccaagctccagcagcgggatgcgttctgcagcagcgaggcttcttggctctgggaatggtaaccggacgcttagcatgacctgatcattggtatggggtcaggggatgtctattcaatgtcactgaggcaacaattgcaagattctggaaggaagcctgttgcggcccaacattacaacaagggtgtcagatatgattgcttgactttgtttgcacttactccctccatcccaaaatataagaacctaggaccagatgggacatttcctagtactacgaatctggacagtactaggaaatgtcccatccgccgatgcacttctgttgcatgggtaccggagcgtgaaggaatctttgttgttagccattctgatggaaatctgtatgtgtacgataaatgcaaagatggaaacactgagtgtacattcccagctataaaggatccggctcagttaatgatttcacatgcaaagtccagcaagagcaacccaattgctagatggcatgtttgccaaggttcaatcaacgccatctccttttcaccagatggagcatatttagcaactgttgggcgagatggttatttgagagtgtttgacggatccggctcagttaatgatttcacatgcaaagtccagcaagagcaacccaattgctagatggcatgtttgccaaggttcaatcaacgccatctccttttcaccagatggagcatatttagcaactgttgggcgagatggttatttgagagtgtttgacttttcgaaggagcaactaatatttggtgggaaaagttattatggtgcactattgtgttgcacatggagctcggatggcaaatatctgttgactggtggtgaagatgatcttgtgcaggtatggagcatggatgacagaaagatagtcgcgtggggcgaagggcataattcctggtcgccagtggagtttctctaccttctccaagaatgcgagatgtgccaaagctctcaccccttgttgcccaccgagtacatgtggatccactctcaggtctggtgttcactaacgaatcaattctcactatttgtcgtgagggactgatcaaaatctgggtaagacctgatcagaacgaaaacaatcatcagtcaaactcttcggagttagttttaggtaaccctgtttcaaaggatagggtgatcacaacttcaaataaagcaaccggttccagcttcaagcaatcttcagctgttgtcttcacatgacaaaagtgttctggtgggcacattgctctggtaatctggttaattgatcatcggtggtcatgtttcttactaacaccgtgattttgggaagggggtgggaggaactcttgctggtgatggagccgctcattttgcgtggccagatatgccagtgttgccatttgtgtggctcaatggaataatggggtattctcctgtacagagatacatatagtccaagataaaatgtacaatttcaccgtatgtgtttcgtacttttcagcgagccgactagtgatgggaggataatggatgccacttacctggtggtgttttcttgtgttttgttattagtatctaaaaagtctgtaaattatttattcatattattgttacagagcccttctaattaaaaaaaaaaaaaaaaaaaaa

SEQ ID NO: 100241 - DNA, 438 bp, Oryza sativa
  Clone ID: PAT_MRT4530_97978C.1
atggttgttcaagctccaattgttcaccgccagagaccttgccccttccagtccgtagagttggagaaggacagggcggcactggcgactgcggaggacggcgcgccggcgcggtggctcactggcaggggggttaacgacgagtggcttcttgtccgtggagtcatcctcacgacggaggctacgaggttggccttcatggccctcaccggcgctcgtgccgcagtgcacgggaacacaactttggcgatcaagcacctttgcggtggttcttcctggcaccggcgtggcgggatcttgttgcccattgactccatggaaaggttgcagttccgttactggttcaaagatgtcagagccgatgaagtagaggtgttggtgatgaagtcagtgacaataatccatcaaactgttgagaagatatcaaagctcaagtaa

SEQ ID NO: 100242 - DNA, 1278 bp, Oryza sativa
  unsure (1)..(1278): unsure at all n locations
  Clone ID: PAT_MRT4530_97979C.1
ggatccggctcagttaatgatttcacatgcaaagtccagcaagagcaacccaattgctagatggcatgtttgccaaggttcaatcaacgccatctccttttcaccagatggagcatatttagcaactgttgggcgagatggttatttgagagtgtttgacttttcgaaggagcaactaatatttggtgggaaaagttattatggtgcactattgtgttgcacatggagctcggatggcaaatatctgttgactggtggtgaagatgatcttgtgcaggtatggagcatggatgacagaaagatagtcgcgtggngcgaagggcataattcctgggtcagtggagtttcttttgattcgtattggtctcctccgaattctgatggaacaggagaaaataccgtgtatcgttntggttctgttggtcaagacacacaactgcttctgtgggaacctgcattggatgagattgctgtcccactacgacatccttccagtggctcaccccggccgggtagcggcagcccttctgcacattgggacaatgcatgtctcccaacaggtgttcttcaaccttctccaagaatgcgagatgtgccaaagctctcaccccttgttgcccaccgagtacatgtggatccactctcaggtctggtgttcactaacgaatcaattctcactatttgtcgtgagggactgatcaaaatctgggtaagacctgatcagaacgaaaacaatcatcagtcaaactcttcggagttagttttaggtaaccctgtttcaaaggatagggtgatcacaacttcaaataaagcaaccggttccagcttcaagcaatcttcagctgttgtcttcacatgacaaaagtgttctggtgggcacattgctctggtaatctggttaattgatcatcggtggtcatgtttcttactaacaccgtgattttgggaagggggtgggaggaactcttgctggtgatggagccgctcattttgcgtggccagatatgccagtgttgccatttgtgtggctcaatggaataatggggtattctcctgtacagagatacatatagtccaagataaaatgtacaatttcaccgtatgtgtttcgtacttttcagcgagccgactagtgatgggaggataatggatgcactttaccctggggngntttcntgtngtntgttattagnatctaanaagtctgtaaattatttattcanntatatgttacagagcccttcntattatcgaaaaaaaaaaaaaaaatttgcggcc

SEQ ID NO: 100243 - DNA, 1367 bp, Oryza sativa
  Clone ID: PAT_MRT4530_9797C.1
ctatcgttttagccccctcccgcgatctcccgtggtccctagccacctccccgccgtcgtcccctctctcccgtgccgccggccatcttcagccgcccctgccgccgcgttagcacgccggccggccgtgccgtcgcctcctccagcatcgcagccgcctcctcttcgccggcctgccctctgttttccgcggagacctccggaagtgcctccccgccggcgacagtggcgttgccgccactgttccgcctccggccgcctctgccgcgtcccctgtgcgccggccgacgtcgccatcacctctcccggcaccggagcgccgtcctctttcccggccaggccacgacgtcgcccgaatttcgccggaacgccgtcgctcgcgctggcctctccttcctcctcgtcggcatctcctctggcagaccctttcgccatgcccgtgcgtcagccggcgctgccgtcccctccctcggcacggtgacgtagccctccacctcgtccacccctcggtttcgcccggaagccgttcttgtccgtcgccgcgaacctctccatccgcctcaccggagttgttcggccgcccgtccctcctcgcccgtgcaccggtcggccgcacctccaccaccttcggcatcgcagccgcgacgtcgtcctcggcatcgcttccccttcggccgaacaccgccggtgtccgtcgtcgtcttcaccgttcatccttgccggctcgtcgtctcgcggcgccgcctccgtcgtcggcatcgcagcggcgtgttccacgccatcctcgcctccgtgcagccgctgccggctgccctcgtcgcctcctcgccggccccggtcgtcgtcgtcgtcgtcctctcgtcgctcccggtcgtcgtggcgttcgtccctccgtcgagccgttctcgtccgtcctcggtgtttcgtcaaggtcgctgtagccgtcgtcgtcttcgtcctcggctccgcgtcgtcaagcctcgtgccggccgcgtctcgccttcgtccaaggatcgccgccgaagtcgtcccctcgccgttcgtcttcgtagttcccggccgtctccgccgcgcccgttcgtcgttgtcgttcccacgcctcgtcgcgtggtggtaaggatctctcctctcgctgccccgtcctcgtcctttcggtgtcgccccgtacccgttgtgcggttgtcgaccccggtatccgtgtaccggtgtcggtagtcgttcacgtgtgcgggagtccgtttgtcggccactcgcctcggttgacacacgggatctgcttccgtcgacccgtggaccgtctctgtgtactcggtctaccgcggtcctttaggttgacatgtgggtgtgctttctttttatgtgttgtt

SEQ ID NO: 100244 - DNA, 610 bp, Oryza sativa
  Clone ID: PAT_MRT4530_97980C.1
atcagctttaagtttcgggtttcctgtgacgatctatccatcatactcatatgatgataagcatcatcgtgatctggaaccattcatctataaacgtgaatcgagggacaaaggatcatctccagctccaaaccataacactggccttttggcaagcttgcggcaacccacaaccaattatcaattgacaaggcaatttggtactgctgcattaataaccaatcatcaaacaaagaggctatttggcacggctgcattgacgctcttgaaagtcttgaagaaagcatgaatgaaaagagcatcttcttctggtcttctggacagacgactggaccggatgccaattctatgcttccggatgggggttccatcctgaaccggatgccaattatatgctcttacgtcaaaaacatggaaaggacagttcactccaagtttattttatttttaaattaagatagaaaatatgtaaatttatagctgttaagccaaatatttttattgagaaaaatattatatattttactttaagcagtcaaatttgtttctaagccatccggatgtattggatctgatattattaaatacaaactctagatgtttctgtatc

SEQ ID NO: 100245 - DNA, 1278 bp, Oryza sativa
  Clone ID: PAT_MRT4530_97981C.1
atggaaccaggagctgcgttgcgcgcttacctcccggacgatctcgtcgccgacatcctcacccgtctccccgcccgctccgtctgccggttccgcgccgtgtgcaggtcatggcgcgccctcgccacggagcggcagttcgtcctcgcccacgccgcccgcgaccgcgccgccgcggtccccatgaatcaccaccaccgcaaggtccacccgcccttctctccctccccccgccgcggcggcggcgagcccaccgtcatgctcgccttcgtgatgatctgccgccgcaacgagcctgaccgctccttctacttggaatcgcgcgaggacggcgcctgcaagctcctgggttgctgggatgggatgatgtgcatcgatgtcaggagagactcgccggcttgccgcgacggcatcgtggtggtcaacccaatctccatggcttacgccgttgtccgcagcccgatgcccgatggcggcgagttcatcgccgggtacgcccatccggacaccttcgccttccacctcatgtattgctgccacaatcagggtaaggtgatcttccaggtcatcaaggctggagactcgcaatggcgtgagattgctgcagatcgcctcgcgatatctgggatcgattttgataagcaaggtatcagctctgtcgcgctgcacgggggattgcattggcagctgcgaacaaattcaggacaatgggtgatgctggtgtatgatatggtcacagagaagttcagatcaatagccgcgccgcaatgcgcgattacttgggtaagaggactctctgtgttgtccggcagactgtgcagcattgtcatccccgagtccatgaccgcggagatctgggttcttgaggactatcatgagcaccggagttggcattgcattagggaaattgacatggctgcttctgccgagcgaataaatttagagaatttttgggattcagacttgaggatgttcctcaaggtggacgtggagcagggtattgagcatgaggttcaagagatcataattcaccatgggaacaagatcatctcgcagccctgctctgtttatgaattgcggcgcaatgaggctgtctacaatgttaggcacaacgtctggcacaagagtacgatgtgctttaatgaagagtccatcatgtacaaggagagcattgtgccataccagatgagctttggcatgaagtcacagttttgtgaaaggaaacgtggtgccttgcagttttctgaagggcaacatgtttaccatcttcctctttga

SEQ ID NO: 100246 - DNA, 124 bp, Oryza sativa
  Clone ID: PAT_MRT4530_97982C.1
cagcgtggcaacggcagccaatgtcactgccaactccggtggtttcctcatctggctggcactctaccttaacaatttccaagacaagctcatccctgaatcaaaacttacaatgacactcatg

SEQ ID NO: 100247 - DNA, 429 bp, Oryza sativa
  Clone ID: PAT_MRT4530_97983C.1
atgtggctccatagtctggcccttcccccgcgcctcgcgagtcgcaggagcagccagagggcctcggggtgccacgtcatgcccctcgggccctcgcggtgcctcgccccaaggccctcgcccaaccgccatgtggcggggaaagcgagcggggaggagatccaagccaagccgctatcaatgcgcgcggcgccccaactacccctcaccgcatttaatgcgtcacattcaactggacaggcggccgtgtccccacgtcgcctctgcatctggcggagtggagatagcattgagggcggatacgcgatctcgagaagtgagctttttcccccggccgaactcacagaaagggggatctcacgatctcccgctaaagaggatcactcctcgacatcggtggtttacatagacatgattagagtgtcatga

SEQ ID NO: 100248 - DNA, 588 bp, Oryza sativa
  Clone ID: PAT_MRT4530_97984C.1
atggcggatccatgcgctaagtatggggagaagcgatggaagggagaggtcaccggtggatccgcttctcctgttgctaccgacggatccacatacctcgagtctaccgtcattgtcgtggtcccacttagccgatgtttcgcccctccccaccgtcgtcgtgggataatgcttaccaggctgtgcaaaggcagacgatggtgcaggtccaatggaaggcatgagcgtgggtcagtcggcggcaggagcgcggttgccagcctaggaaaaggcaaggggtcagtcggcggcagcgttcaggcagggcaatggcgaggagaggcgacgccggcgggagcgcgcgcggttgccggtggagagaaggcgaggggtcagtcgatggcagcggtgttcaggcgaagtgatcgcgatggcgagataggctgggtgcaggcggagtgcggttaccggtcgaggtcaagggaaggcggaggcacggagggcaggcgtgttatcgatcgagaggtgaggcggaggcggagcacgtgggctaggggtcgtgggactgaaggaggattgcgtgtttccttcggaaaatccaagacttaa

SEQ ID NO: 100249 - DNA, 661 bp, Oryza sativa
  Clone ID: PAT_MRT4530_97985C.1
aagtcaaataaaaagatggctaacatgtaggtgaattcgactagtacccaatagttcatacagaaatttcataattaaggaacaaggggatcagatgtcccaatactccgacaattataagatgagaggatttgaaaaccctaaactcaaaaggtaggtctctcacatgctaaacatcatccaacataaaccaccatcaaaaatactcttcactgtgtacaaaacagcattgtgcaacccttacaaaggagctctactttgcggtcttgtccttggttttctgtattttcaggaccttcttgacaatcttctgctcctcgaccaagaaagcacggatgatcctttccctaactgcagttccagagagcactccaccatatggacggttcacagtcctgcggttcctagacaacctggacctcttgtactcagcaggcctcaagtggggaatcccctggatcttcttcccggtgacggggcacttcggcccgctcgccctcttcttcgtgtactggtacacaagcctcccacctggggtcttgacgaccctggtctggttcgacttagtcgcgtagctgtgacgcttccggtaggtgagccgctgcaccatctcgccaccgccgccgccgcgataaaccctagaaacgaggctgggtgggtg

SEQ ID NO: 100250 - DNA, 394 bp, Oryza sativa
  unsure (1)..(394): unsure at all n locations
  Clone ID: PAT_MRT4530_97986C.1
acttattaatntttttacttattcagacacccacatttcattaataggagctagtaacaaatttcccccctctcccactgaccctacatcacacaaaaagagacctcaattctccttaaaactaccaaaccaaacacccgaccacaacaaatccttatttgtaaaaaaacttaccggaaaaacattaatcatcaaggcccgtcctcctccatttaaatacatctcctgactaaccaacataaaacgcacaacattttcacctccaaattttaaaaatttcactcctcataaacccgacctcctagcaacaaatttaatcttaaccacaccacccaccataccttcaacctttaccatttacaacccaggaagatcaatcaacttcccttacaat

SEQ ID NO: 100251 - DNA, 458 bp, Oryza sativa
  Clone ID: PAT_MRT4530_97987C.1
gccagcaactgcatcgccatcgccgtcgccgccggcctccgctccagcagctagacgcacgccgccggccggcgaccgatcgatatgatcctatatatagtatactactacgtacatatatatatatagcgatagaaagaaaacctagactttggcaccttaattattatttcctacgtttcaggttataagaatttttagtattgctcacatttatatagatgttaataaatctaaacacacacatacatatatatatatatattatatatatatatataatatatatatatatatgtatatatatatatatgtatatatatatatgtgtgtgtctatatttattaacatatattatctaaaaaaagattcattaatatatatatgaatatggataatgttacaaagttttataatatgaaatggaggaagtaattattataaaaaaaaaaaaaaaa

SEQ ID NO: 100252 - DNA, 552 bp, Oryza sativa
  Clone ID: PAT_MRT4530_97988C.1
ctagcctcctccacatatgttgtcgtggatgcttgacttgccaattgggacaaggactggtgcggtgaacgtggttgtggctggcggggaaggaacacggcggtggctctcggccgctccgtcgctcttccccaacgcttgagactggcgcggatcttcttccaccctctctatctcttccctcaaattctccccactgctaccaccgacagcattccttggaaccacccgtgctccaaccccagcgccgctacagccaatgccacttcccagcgccccaaagggcctcggggatctcggagcccagtcaaggcccccggagccccagagccggttcaagggcctcggaggtccaggagccagctcaagtgttccggggctcttgccatggctccgggcccggagccgctccccttgatgggcaccgccaactctcggcctggtgaatggaccctcggaccattcgtcggcccacctctcagccacctcggggtagttgtgagttctgttccaacagccccctcctcttccgcccatagccagtggagccat

SEQ ID NO: 100253 - DNA, 312 bp, Oryza sativa
  unsure (1)..(312): unsure at all n locations
  Clone ID: PAT_MRT4530_97989C.1
acagaagttcnaggaatgaatatattctccnactgtatagtacatcttggttgcttagntatatatatatatatatatatatatatatatgtataattcgccgantcgcctctaaatttnaanaagntatgannccccccctgtaggtatatatagatgctagaaagatgctccttgtaaaattgtgcaggagtaaatgtaatnatgtagtcatccctccttctccaatcctttacaatacatttctgtttttttattcagcttaaaaactacgttttgttttttctcccgataaaaaaaaaaaaanaaaaa

SEQ ID NO: 100254 - DNA, 470 bp, Oryza sativa
  unsure (1)..(470): unsure at all n locations
  Clone ID: PAT_MRT4530_9798C.1
cgttgacggcccatgcatcgccgcgccgtcgnactgccgtgcgcctcgcgccgccgcatcatggccggcgcgccatggccggtgacctcgcgctgtggcgcgcccacttttctgttctcctcccaccgtctctaatcctccacctgtgaagtgaaggagagagagagagcggcgatgcgccgccacgggccacctcgccggcgcgcgcgtgcacctgcgggtgcgcacacggccatcgagaggctccttggcggtgccctgtgccctccccctttcacccctttgccggcgtcaacgttcggccggcgacaaggtcatgggacaatgtcacttggttcacagaacgactaaaagttagacacgattgcatattttttctaacaattcatactatgtatactttaattgtgtaattcaaaatcctttttatggacctttgatanataaaaannnaaaaaanaaaaanaana

SEQ ID NO: 100255 - DNA, 570 bp, Oryza sativa
  Clone ID: PAT_MRT4530_97990C.1
atgccgccgaccgtcgctcttccccaacgcttgagactggcgcggatcttcttccaccctctctatctcttccctcaaattctccccactgctaccaccgacagcattccttggaaccacccgtgctccaaccccagcgccgctacagccaatgccacttcccagcgcccctattggggaaggattgcgaccttgcaccattcaacccctattggctccggaggaggtagggcctctaggggcctgccgccaacgccctgcggagcccatctccacagggagggccctgatcgaacgcctaggaagctgaccgagcctgaagagggcagtcggctccgagaagttcggagccaaccaaagggcctcggggatctcggagcccagtcaaggcccccggagccccagagccggttcaagggcctcggaggtccaggagccagctcaagtgttccggggctcttgccatggctccgggcccggagcctagggaggacaccgggaatgagtatggggtgccataaaagcgcactactcatctcccatccaccaccgatgttacggcacgactag

SEQ ID NO: 100256 - DNA, 441 bp, Oryza sativa
  Clone ID: PAT_MRT4530_97991C.1
atggcgacggcgacgacggcgaggagggcggcggcggcagctttaggggaagaggttgtggaggtggcgaaggtgtcggtggccggatccgcggtggcgtcggcggccgggaggcgagggaaggcgccggaggccagatccggcttctcggaggccaaacttggcggcgtcggcggccgggaggcgagggaaggcgccggtggccagatccggcttcccggtggccagatctggcgaccggcggttaggaggcggcgacggcgtcggcggttaaagccggtggtcgggaggcggcgacgtcagtggccgggaggcgagagaaggcaccggcggccagatctggtgaccggcggtcaggaggtggcggcggcatcgatgttgaaggccgccgggcccgacctcctggaggccgacggcaggcgacgcagccggcaaccctga

SEQ ID NO: 100257 - DNA, 246 bp, Oryza sativa
  Clone ID: PAT_MRT4530_97992C.1
cacatactcatcaatgacagatcaaagtgctcctagatcctcataaatgactgggcaatggagtagggaggcagatgcttttctatgttcacgtgccatgtctattgtattgccattcccccggcagtactggaaagctggggaatacagaagttagctgctcaacccaccactcacagtgatcagaaccacttaaggatccaccccaagattctacattcaaatgctacttcacacaagtgggca

SEQ ID NO: 100258 - DNA, 346 bp, Oryza sativa
  Clone ID: PAT_MRT4530_97993C.1
gggtatttgcgctggcgatcgagggggtgctgggtgcgtgcgggctggcggcgtcggacgcgctgcaccacggattttcccatgatctacgaaagccgcggcttggaggactctatcgatggccgtgccgaggaggtgcttggggggaacatgaaaggttcgtaatgtgtaggacgattggataagaagagacatccggttgctgatactatatcagaggcggtgctgggcaggatgggagcgcaaggcactagggaccagcgcgagatggtgcactatgagctagaggaggccgaatgcatgctgtacgtgttcccgacaaggatcggtatgatggacgaaccaa

SEQ ID NO: 100259 - DNA, 342 bp, Oryza sativa
  Clone ID: PAT_MRT4530_97994C.1
aaacaaccaagtcatgcagcaacagtgtgccaacagctcagctggtagcgcaacaatctcactacagccattagtagcgttcaggcgattgtgcagcaactacactgcacaggtcggtgttgtctactttgatcagactcaagctcaagctcaagctttgctgccttaaacttccatccatattggtatctatcctaatatacatctccgaggacatcccaccttgtgttctgtactgaatgtaatataaatgttcaaattaaaataaatcagcatcatcagctgacagtgaaactgatcataaaatctcaccatcacctattaaataaaaaaaaaaaaaaa

SEQ ID NO: 100260 - DNA, 188 bp, Oryza sativa
  Clone ID: PAT_MRT4530_97995C.1
acttaggtcttctcgaaatgaacccaaaggggctagggttaaatacaacttattcttttcactgttcaccaatggacaaaaaagggtaaaaaaatcaaacacattcttatttaagtccaactctgatacctctaaagaccccaacttattgatcaactgctgccttcttatttggtggcggatacccc

SEQ ID NO: 100261 - DNA, 507 bp, Oryza sativa
  Clone ID: PAT_MRT4530_97996C.1
ggatccccgggctgcaggatcggcacgagggagagagagagaggaaactagtctcgagttttttttttttttttttcatatcttgggctcagcttcgcctttgatcaatcaaataacccaacccccaccatcccttatcaccagacctatcagttctagcggtagtggagctaccctggttatcattcgaaacgaatgaccatccaaggacaaagccactggcattagcacatgactagaaaggctcaaagggggtagagggagggtccaatttaatacccacagcagcctcaattgcttgaaggcatgcttatttcagccaaggtcgatcgtcatcgccctctgtgttcattgcggaccatacgtagtaccctgccacaaatacagcatatgctgatgcgatcaccaacactaagagcaagtataatagtatagccagatctacagcctgattttcttcttcttcttcttctctctctctctctcctccaattgtacctgctctaa

SEQ ID NO: 100262 - DNA, 1428 bp, Oryza sativa
  unsure (1)..(1428): unsure at all n locations
  Clone ID: PAT_MRT4530_97997C.1
ggacggncggagnacgntgtgggcggatgcgtgggcggacgcgtgggccggacgcgtgcgcaacagcactccacacacaattacacaacaatggcgtccgaacaacaacgccggcgatcaccacctaccatcctcgccgccatccttcttctctccttcttggcgacggccaacctcgccggcgccatcgatccagccggaaggagacggaacgtggtcgtcttctggggaggcaacaagaacgaaggcagcctccgttcagtctgcgacagtggactctacaacatcgtcatcatctccttctacagcctcttcggccatggccgctactgggacgacctctccggccacgacctccgccacatcggcgccgacatcacccactgccatttcaaggccgtctacgtcctcctctccatcggcggcggcgatggaaaagactactccctaccttcctccaaatccgccgccgacgtcgccgacaacctctacaactccttcctcggcggcagccgcccgggagtctaccacccattcggcgatgacgtcacagtcgtcggcattgacttcttcattgaccgcggtcaacccgaccactactacgagatcgccgagcggatcaactacgacacccgccactggcgtgaccccatcgggttcaagctgacggcgacggtgagttgtgcgtacgacgactctgaccccaggatgaagaaggcgctggaaacctaccttttccggcgaatccacgtcaggttctacgatgatccgaggtgttcatacaaccatgccgggctcgccggcgtcatggcgcagtggaacaggtggtcggcgagttacccttataatgggaagatttacttggggctcgcggcggcgaatttgacggggaagaatgacatggtcgccgtcggtgagctctaccggaagctgctgccggcggtgcagaagacggatacctacggaggagtgatgctttggaacagctactatgactccatcactcactacggacggtatgtcagtgcctgggcttaattataagattcagagatcaaccaacgataatctctctatatatacgtgtgcctccatcatcagtccaatccgtgcgtgcatatagctcaatcactatcacagtaatcattacttagtacatgttgttttgtaatctttgctagcgaaagctagtgttttttttttatgtgcacaactcggtgtgccgccatacatgcatgtgtgatcgacgtatcagtctgtactctcccttttttatcttgctagcgaaagctagtattttgagtattattatctgcgcaatttggataccctaaaaaaaaaaaaaaaaatgtaagctactaaccttgacggggttgaacctgtataaaaatatatctccctctatgtttatcaaaaaaaaaaaaaaaa

SEQ ID NO: 100263 - DNA, 154 bp, Oryza sativa
  Clone ID: PAT_MRT4530_97998C.1
ccacgccttcagcccgctgtgcgtcgccctgaagagcgccgttcctgacttgaaggagatgggaaaaagcgggttcgggagcggaagttggaacccgcccggtggcaagcgcgccagttgcggaaggcaagttcccaaggatccaagggattaa

SEQ ID NO: 100264 - DNA, 796 bp, Oryza sativa
  Clone ID: PAT_MRT4530_97999C.1
gaaaaactcactgaaattggtctgctcaggcatgggggaggacctgccgggaccgggagtgagattgtcaagaacttccggttgtcgactgtgttgcgcttgccgtctcgctcctctgctacctctacctgaccagccaccgcctgggctcccgacggcgccggtggccgcctggcccccggccgctcccactcctcggcaacctcctggacctgcgtggcggcgccggtatttcggttccatgcaaaaatcaaagctcggagtacttgccccatatatatatatatgtatatatacatatatatatatatatgtatatatatatatatatataatagtctatatatatatatatatatatatatatatatatatatatatatatatatatatatttcctagatcggtggtatatactgctctctctttttttcaagtagtatataagtagtatgtacttatattttcagtattatgtaccgttttaaggagtatgtactgtgttttcaagaatccagtgtatactcgatctgttaattaggtgtatgtactgttttttatcaagtattcagtatatatactaactcatatatatatgtatatatatatgtatacatatatatacatatatatacatatatatacatatatatatatatacatatatatatatacatatatacatatatacatatatacatatatatatacatatatatatatacatatatatatatacatatatatatatatatatatacatatatatatatatagcttttaactcttcttccct

SEQ ID NO: 100265 - DNA, 2646 bp, Oryza sativa
  Clone ID: PAT_MRT4530_9799C.1
ggaagtgaccgtggcagttaccttgagactgaaggaattgagaatgatgctaccacaaggcatttggttgagatgctgtgggctatggatgaaagtcgtgcggagactgtgttagcagctcaagatcgtgaagaccggaatcggggtaagatttgcaagctagaagacaaggtggatcgtttggaaaaggaactagctgcattaaagggagaagcaccgccacagaaggccaggattcgtctcaccgcaaggaagagagctctatttgtccctcgctaccaattggcgccaaagtttcccccggtttctcttcttgtgccctgtccatgccagatggtgatcactcgcagcaatgggaatggccctaacaaccccaataacaacaatgaagggaacccaacacttgctcaagttcttgctcaacagactcagttaatgaacatgatgatgcagcaacttcagaaccagcagaaccagggaaataaccatgcacctccccagaacaagttagcagaatttcttcgtgtgaggctgcctattttctctagtaccactaatcctgttgaagctggtgattggctgcatgccatagagaagaagttggatttgcttcaatgcactgatcaggaaaaggtctcatttgcatcacatcagttgcatggccctgcctctgaatggtgggatcacttccgccttaataggactactgctgaacctatcacttggcttgaattcaccgctgctttccggaatacgcatataccatcgggagtggtgtctctcaagaagaaggaattcaggtcgctcacccagggatctcgctctgtcacggagtatctgcatgagttcaattgtctggctcgttatgctccagaagatgaggacaaatacaatcgcatggaacagaagaaacgccggattgctcaattcaagacacaaccgggaaataatcaaaggccgcgtcttactttaggaccccagtccatgccacatggaggttcttcgtctgttgttcgtccgcggcgtcagttcttcaacaacaatgctggcaacaacatccgcaatctagctccacgccctgttgcagtttcgacacagcaacagcctgccaagagggagcaaggcagcaagcccgtagtgtgcttcaactgtggagacccaggacattatgctgacaagtgtccgaagccccgacgcgtgaaggttgtccctgcccagagcaactctaccgcaccagcatcaaaggcccgtatcaatcatgttgctgctgcagaagctcaagacgctccagatgtgattttgggtacgttccttgttaactcagttcctgcaacagtgcttttcgattctggtgctacacattcatttttatctatgagttttgcgggaaatcatgggatggaagtagaagatcttagacgtcctttgatggttagtaccccaagtaatcaagcactctctttgcaacgtagcccctctgtcagaatagaaattaaaggagtaccatttctggccaatcttatcttgttagaacccaaagaccttgatgtcatcctagggatggactggttagccagacataaaggtgtgatagactgtgctaacagaaaagtaactctcaccagcaatgatggtcgagttgtaactgttcatgcattgtcttctgagtctttaaggtcaagactgaaccagataactttggaagagattcctatagtccgggagtatcccgatgtgttcccagatgatttacctggtatgccgcctaaaagggatatagagttcagaatagatttggtacctggaacaactccgatccataagagaccttatagaatggcagccaacgagttggcagaagtcaaaaggcaagtagatgatttgcttcagaaaggatacatcagaccgagttcatcaccatggggagctccggttatttttgtgggaaagaaagatcatacccagaggatgtgtgtggactatcgtgcactaaacgatgtgactatcaagaataggtatccactacccagaattgatgatttgtttgatcagcttaaaggtgccactgttttctccaagatagatcttcgatcagggtatcaccagttaagaatcaaagaggaagatatacctaagacagcttttaccgctaggtatggattgttcgaatgtactgttatgtcttttggacttaccaatgcccctgcttttttcatgaactttatgaataaggtgtttatggaatacctagataagtttgtggtggtctttattgatgacattcttatctactctcgaaccaaagaagagcatgaagaacatcttcgccttgcattggagaagctacgagaacatcaactgcatgctaagtttagcaagtatgaattttggttgtctgaagtgaaattccttggtcacgtcatctcagcaggaggagttgccgttgatcccagtaatgtggaatccgtaaccaactggaaacaaccaaagacaatttcagagattcgcagtttcttaggcctcgctggatattatcggaggtttatagagaatttttccaagattgctaagcccatgacacgactgctttagaaagatgtgaagtacaagtggtcagtagaatgtgagcagagttttcaagagttg

SEQ ID NO: 100266 - DNA, 600 bp, Oryza sativa
  Clone ID: PAT_MRT4530_979C.1
atggcgtcggctggggcacccgacgcccatggtggaggcggctggatccggcgaggcgcaccggcgggcgaacggtgggcaatgtcaagcaggccgcaggcgacggtggccggcgacggcatgaacgacgacgggccttcggcggcggcggtggaggacacggatctgttcaccggatggcagggaggcagctggcggatccgtcctgtggccggatccgaagctcctgcgttgaatcttgccgatggcgcgaatccgaggcggcggcgccgtgctcgcgctcatcctcctcctcgtcctcctcgtcgtcgtggcgccgcgcggcgcggcgcgggtgagggccatcggccgtcgcctcgggcacagcaagagtatgacgtcacctccgccgccgccgcggggccctgcgacgcctacctcgtgttccgctcctccccaccgctcaacgcctccgtcgtctccatctccaacctcctcaacatcaccaccaccaccgtcaccgaatctaacgccgtcgacccggtcgtccctattgccgtggaccccctcgtcttcgcgcctgttgtcggcgacctcatccccacctgccggctagcctag

SEQ ID NO: 100267 - DNA, 147 bp, Oryza sativa
  Clone ID: PAT_MRT4530_97C.1
atggctagacgtctcttcggcattgatctgaagcggatgctgcggcagcgaggcctgaagcagtgccttcacctcaagcaccgccggccaccgccacgatgtcgtcgtcctcctccatggtgcgtcgccgatctgtgggctgggatg

SEQ ID NO: 100268 - DNA, 135 bp, Oryza sativa
  Clone ID: PAT_MRT4530_98000C.1
atgaagcctgaaggttatgtctgtcagggttacggaaggaaagaatcctactcggacagaactgggtcgttgacgtatcgtatagggtctgatacctccaagttctacttggagacctccagatccgcgatataa

SEQ ID NO: 100269 - DNA, 346 bp, Oryza sativa
  Clone ID: PAT_MRT4530_98001C.1
ggtccgaggcctcggtctgttcagggcatccaggaataccgctttgagtacacctgaactggcaaagcggtgtaccgcacatattatcccagtaaataaccaacctccctgcaatacacctggtcgtccacttcacctgagggaacaaccttacacagtacaccgtccctgaggatgaacggctccttgagaggaggtatcggctcaaaaacgtccacattttccgctgagttgctaggtactgctactaagacctccacacgaaagaagaggaccttgagaagatgctcttcaactgccgatcggccatcctgcaactcaagagcatgaaggagggcaagtcccg

SEQ ID NO: 100270 - DNA, 402 bp, Oryza sativa
  Clone ID: PAT_MRT4530_98002C.1
atggcggccggaggacggggaggcaatgacactgttggttggtcgccgttgccgtccttggtcgccgccgccttggacgactgggatacgccgcctcctgcctctgtagatccaaaaaaaatcgggaaaattgatcagtgggtcggtatgatggttgtagccatgcgaattgtccattttgcccttgcaaccgccatcagcaagccatcccgatcgtccacgtgcagagccaacctgagcagacgcagccagggtttggccgaacctgggctggcccagaaggcctccacacttctctgggtcactgactggtgggtccttatgacggttgtggtagttaaagcggtttccaggacagttacacctagcttgtgggtccatcttatccataagcttgcttag

SEQ ID NO: 100271 - DNA, 4436 bp, Oryza sativa
  Clone ID: PAT_MRT4530_98003C.1
tttgccttcctctccttttttttttttttttgacacaagctgtaacactttcatttcgttgtattcagggcatggatccattgtacatcgagctcgacaaaataaaaaatcagtcttccggtgaaaggcaatatgtatcatactcggcccctatcccaataaaattgtaaaagcttattgaacaaaccaatgataagaaggaaaccagccagtgaagttaccccatagcaacataggtgacagcttaaacaactaacttacatgaccagaaacacatgctacacatctacggggaagcatatcctatcggaattgcctcagggaaaaacaattgctggatgtgtctaaaatgtaaggtccttgggatcctcaattatcttggaaagagtttgcagaaaagcggcaagatcagctccgtaaataacccgatgatcagcagtaacattgacctgcatttggttcttgatcccaatactaccatcttttgtaccaacaagtgttggttgtgatgatccaacggccatgattgcaccagttccaggtggcaagattgcatcaaatctgtcaactccaaacataccaaggtttgaaatagtaaaggtgccagaattgtattcatggggctgtagctgcttcgctcgagccttatcgactaactccttccatttcctcgacaaagaataaatgtcgagcttatcagcatcaggaagcactggcgtaatcaacccaccatcgatggccactgccacagcgatgtttatgctgctgttgtaagtgaagctcttcccatctctgcagctggagtttataaccgggtgttgcacgagcgccattgcagtcgccttcgccaacagggccgacattgtcacacccttcggcttaatcttcttgtagagtgcatccagagcatcggttgtgaaggtgtaaccgactctgaacgtcggcacggcgaggctctccaccatgttcttgctgacggcaccctgcattgtcgtgaatggcaccgtcgaacccagcggcacatcgggccgagcagccgccacgggcgccgccttctttggcgcagccgccgccgcctcgacgtccttggccactatccgcccgccagggccagagccggtaatggagttgagatcgacgttgaggtccttggctagcttcctggcgtacggcgacgcgaccacgcgcaagccgccttgcgaggctggggatggaggcgcgggagcggagactgctgctgctactggcgctggaggaggtggcgggggagggggaggggttgattcttggggaggcggaggtggtggagaggaggaggaggaggaggagagggaggcggccttggactgggcggcggggatctcgtcctcggactcggcgaggagcgcgatggcggagccgacgggggcggactcgccggcggggacgaggacggcggcgaggaagccgtcgtggaaggtctcgacgtccatgtcggccttgtcggactcgacgacgacgacggggtcgcccttggcgaggcggtccccctcggaggccgtccacgacacgatcttcccctccgtcatggtcgagctcagcgccggcatgaagatctcccggatcttcgcctccacgcggaagcacgcccgccgccgccggctgctccctgccggcgccgtgacgccgccgccgcggcgcggatggaggaggaaggagggcgccgcggcggcgtggcggaggacttgaactatggtgtttgcgttgaatagcatcctcaagacggtgcgcatctttggtcgagcatctggagagagcgcaacacaagcgagggcgatgttcaggaccgacaacatctggctgtgaacagcagctgaagttcttgagaccctggtgtcaaggatctgctccctctgatcagggctgcctgaaagactcagagcccacttggctaactcgatgccatcactgaccgatggtttcccagtcaaaagctccagtaagattactccaaagctgtaaacgttgccagccatcgtcaacctcatcgtgtatgcatactctggtggaatataaccaactgtaccagcaatggtcgaaaggctcccactgctcttcaaagtatcaacaattttgtaaagttcaacatctccaatctgaggctcattcattgacttcaagtggacagtccttgttgacagatcaagaagcagaactggctgagtgcacccatgaagaaatgtcagcccttgggctagcccaaaagctatgctataccgtgaaggccagtccagaacatctgatcttccagcatgaaggaaatcgaacaccgtgcccttgtgcacatgctcatagatgatgtatgcattgtcttctgtcaacacataagccaatggcaccattacattggaattgctcaacttcccaagtacctcaagttcatgagcaaccttcccttggctcccaatttggaatatcttgtcactacaattaatctgttttaaagaataggttgagccattaggcatcacagccttatagtaagtgcagaaccttgttttcagaaaaatgttgctgtgattggagactgcttccattgctttcacgaaatcaattgcagaggtatggatactattcatagttatgaggtgaccattgatgattcgagcaacatcctcagttgatggtccttcatcttcaacacgataaattctcttagaatatgaaattgtaacaatagcagcaagcaagcacaatccaacaagagcaccagtaatggcaacgacgatgatgactgtattgtgtgtccttctcttaccacttgtaggggcgttgtcataatttcttgtaccatttgtaagatcgggatttccattggtagcaatatcaacatgttgacgaaatataggaatggacccagaaaggtgattataagaaagcactagttgcgtcaagctttctagctttgcaagtgaggccggcacctcaccatacaagttgttgtatgaaagatcaagaatctctagatcactcaataagtcaatatttgaaggaatagatccgctgagattgttgtggcttagattaagaacagtactcaatttggtcggcattgttgggatggtaccagtcaagatattattccccagattgagctcaattagagaagttaataaatggagtgaatctggaatggtgccgctgatcttgttgcattgcaaattcaaaatggaaagctttggcagcttgccgatttctcttggtatccctccagtgaatgaattaccactaagattcaatgtgatcaggcttgtcaaattagaaaatacacttgggataggtccatccagattgttcatttggagtttaagaactaccagtttgtcaaggctgctgattgcatcaggcactggaccctgaaacttatttgatgccagattcagcaaagacaaactcttgcatctgccaagttccaatggtatgcttcccgtcaactgattgctatccagctcaagataagccaaggtcgatgcatcaccaatggtggccgggatggttccattgagagagttgcctccaccaagcctcaaccgatagagggtcggagacaagctgctagggatgggcccttcgagcttattgtgagtgagatcaacagtccacagtcccacaggactaagaatatcagagggaatcactccactaagttcgttgtaactcagatccagcatcttcacattcttggtgataccactagggatgaaaccggtaaaattgttctgattagcactgaaattgttgatggacaacaccaattcctccaaagacggggtcatgcttgtaggaacatcaccagccaagttattccttcgaagactcaagcttctcagcttgagcaaagaactcaactgggttctgacatcaccactgaaagaattgaaggacaagtcaagaacctcaagaaggggaaaaccagagaaattactaagaggcatggatagctggctgctgctgagattaagtgaccgcaatccagccttcatggagcaagaagaggtgaagaattgctctatcgaattggtgaaggaattcttagagagatcaaggatttgcaaggtgtcaagagagcatatggttgcaaatatggtggagttggacaaaccatacccagacaaagtaaggttggtcacaactgatatggaattggagctagaagagcaactcactccatcccatcggcatggattcgaatcgctcgtgttccacttggcactggcagtaaccaagccagaaagctccttcatgatcgatacctgagtcgtatttagcggtgccggcgccgacgcggcagtggcgaccatggacgaatcaagaaacaagaacaagaagaggagaacttgtaccagcagcagcaagaagccattgttgcgacagtaacaaggcctcctctccgccat

SEQ ID NO: 100272 - DNA, 221 bp, Oryza sativa
  Clone ID: PAT_MRT4530_98004C.1
atgtggtagatggatgacttgcgtggtcagaaacggatgtgatccgagatgtatgcgggcatcatagactaggcttcccgagtggaaacagattgttgtgctgcggggcagcgggactcctggagccgcttaatcaagtgaaatggctccgtgagccgagaagtaatgatccgacctaagaagtcggtgcattgccatttgagttgctgaaagcatctctc

SEQ ID NO: 100273 - DNA, 1664 bp, Oryza sativa
  Clone ID: PAT_MRT4530_98005C.1
atggggatggtcgtcttcgccgcaggtgacgagcggccgctgatgcttgtgtgggcggcggtcgcgggcgcggtgctcgcgtggtgcgccgtgcgggcgatggagtgggcgtggtggaggccgcggcgcctggagcgggcgctccgtgcccagggcctccgcggcacgccgtaccgctccccggcgggcgacgcgccgctcaacgtgcagctcagcgccgaggcgagggcgcggaccatgccgctcggctgccacgacgtcgtgccgcgcgcgatgccgctgttccaccaggccatgaaggagcacggtaaagtgtcgatcacctggttcgggccagtgcccagggtgaccatcaccaagcctgagctggtgcgagaagtgctgtccaacaagttcggccacttcgagaagctcaagtttggacgtttccagaggttgctgcacaacggattgggcagccacgagggcgagaaatgggccaagcacaggaggatcatcaacccggccttcatctcgagaagctcaagacacctgccgaccaaatccaaccggaggatgaagcagatcgctgcggagatcgaagggatgctgaaacgcatcatcgcgaagagagagagcgccttgaaggccggcgaggcaagcagcgacgacgatctcctcggcctcctgctggagtccaacctggaccacagcaagggcaacggcggcgccgcgagctccggcatctcgatcgacgacgtgatcggggagtgcaagctgttctacttcgccggcatggagaccacgtcggtgctgctcacctggacgatggtcgtgctctccatgcacccggagtggcaggaccgcgcccgggaggaggtcctccacgtcttcggcagccgcgccccggattacgacggcttaagccgcctaagaatcgtgaccatggtgttgtacgaggtgctgcggctgtacacgccgctgacggcgctgcagaggaagacgtacaagccgatggagctcggcggggtgaggtacccggcgggcgtggtgctgacgctgccgctgctgtgcgtgcaccacgacaaggacgtgtggggcgcggacgccgacgagttcaggccggagaggtttgcggaggggatctccaaggcgtccagggaggcgccggccttcttcccgttcgggtgggggccgaggatctgcatcggccagaacttcgcgctgctcgaggccaagatgggcctctccatgatcctgcagcgcttctccttcgacctctcaccgtcctacacccacgcgccgttccccgtcggcctgcttcagccggagcacggcgcgcaggtcaggctcacgaggctaaactgatgacaaacacctcctgggtcctgtcctagacgagaactgcgtgctcggtcggtctatcttttttctagtctgaatgtacagcataattggtgcatggacaatgtgttcagaacaagtcaaattacctgaactaggagcggttgtgaactttttttttattttagttttttgtgatgtttgttaagtgcttttgattcgctcggatggttgtacaaaatgtgtcagtcacgtgtgctctcatgaagagtggacctatgtacatttaagaagatgacaactaatgttgtgtacttgtgtctaaaaaaaaaaaaaaaaaa

SEQ ID NO: 100274 - DNA, 243 bp, Oryza sativa
  Clone ID: PAT_MRT4530_98006C.1
cggactgtgggtcgcaaggtcagggagccagcaaattcacccgctattcctcgcgccgccgccgtcttcgccgtcgacgtcggcttctatgtggaggaggatatctttaacattgtttataattatattactactacctactttttgtctactttcatcaaggttattaattatatattttccatcgatgagtgttacatcattattttacatgacattattattacccaaaatactgttcat

SEQ ID NO: 100275 - DNA, 981 bp, Oryza sativa
  Clone ID: PAT_MRT4530_98007C.1
gctccttctatttactctctctctctcgcttctcttctccgatcccctcaagcttacgcgctaagcaaagccgaggagggagggagggagcacccaaaccctactccctcttccatcagccggccggcggcggcgcagccgcgtggggggaggcggcggcgggcaggaggccggcggcggtgggcaggcgggcggccgagcgctgctggagcccgaaccggccgggaaagcgaccgatccaaccacccgcatccacacaccgcaccaccaaccatcgaccgcctcgccggagaggagagagaaaggaagagcgcgagatggaggcggcggcggcggccggcgtgcagctgggcacctcgaagccgcagatcgcgacccaggcggagatgtcggaggcgcgcctcccactgccctaccgcgaccagtgcgcccacctcctcatccccctcaacaagtgccgcgtcgccgagtactacctcccctggaagtgcgagcccgagcgccacgcctacgagaagtgccagtacgagctcgtcatggagcggatgatccagatgcagaagatccgcgaggcgcaggaggccaagtccaagggcgccgccaccattggcgtccccctcatcccttccaccgccaagctctcctgatccccgctccgcttcgatctgctctattcagggctggttatgacagcacgaaggacattgtgcaaggatcgtggatgctagttctatgaaccaaacatctgtttgaatttagcataaagttaactgttgtcttcttctctccgcctttactccgttggtgagcatcttcgagtttcaatatgaaataaggaactacctgtttatactcaatgactgaaatgacgccttaaagttttgaatgcaatgcgtggactctgcatatgaagagctactttaattcagtagaacaacccagttactcccagtctcccgaaaaaaaaaaaaaaaagcggcc

SEQ ID NO: 100276 - DNA, 487 bp, Oryza sativa
  Clone ID: PAT_MRT4530_98008C.1
ttttatttaggaatcagagagttcatgttttgttttcaattagctagactactattccccaaagatagatgtttaacttttcttaaatgaacatacaaacaggtacaatatattttattggccagcgagtctgaagtttccttggaatctgtgtgggtataagaacactctaacagtgcttccgatggctctaggtggtagattgtgtctgaatctggcaataactacaccattgtttccgtgagctctgctgatcttaccgaagatagctctgtatttagtgttgttgttcaaggtgtgagccttgtagatgtatgcgactctcttaccaaaatagaagggagcatatttgctatcattaacaccttggatcttcaacaaagcttggttttcgttttgtctgaccttgcttcttctaaagccgaggaagacagacttgacccacaatctgacggggggcacagactttctgggrgwcttwctgatt

SEQ ID NO: 100277 - DNA, 2478 bp, Oryza sativa
  Clone ID: PAT_MRT4530_98009C.1
atgtcgctggcgccgccggccgccagggtgcacctgcaggaggtggcggtcaatgtcaacaagagcctcttctgcttcgaccacgactccggcgccacctcctccggcgtcttcgccggcgacgaccccctcaagttctacttccccctcttcctctaccacgtctgcaccgtcttcgccctctcccgcgccatcaacgccctcctccgccgcgccaacgtccccctcgtcatctcccagatcctcgccggcacgcttcttggcccgtcgttcctcggccacatcgcgccgcgcgtcggcgagctgttcgcgacgccggaggggtgggtgctcatcaacacgatcggcggctacgccttcacgctccacatcttcgtcatcggcgtcaagacggacctgggcatgatccgcaagtccggcaataaggcgatcgccatcgccgtgctcggcaccgcctcgccgcacctcgccatgtacatcaccggcctcgcgctcaaggcgcgggtgccggcggcgtgggcggcgtcgttcctcctcacaaacctcaactcgtggtggtcgctctcggcgttcatcgtcgtgtgctgcacgctgcacgacctcaacctgctgtcgtccaagctcggccgcctcgccatgtccgcggcgctcatcggcgacttcgccaacaccttcgccatcgccggcgtcacctcctacctcctcgcggcgagcccttcggagaagctgcagcggatcggcatcgcctccgtgatcgccttcacgacgttcatcgcgttcatggcgctcgtggcgcggccggcgatcctgcggctgatccgcgacgtgccggagggcgccctcctcaccgaggcgcgcctcatcgccgtgctgctcatctgcctcacctgcagcttcaccggcgagctcctcggcctgcacgccacgtacggcccgttcatgctcggcctgatgctccccggcggcgcgccgctcggggtgaccatggcggagcggctggaccggctcgtcgccggcgtgctgatgccgctgctgttcgcgcagggggggatgcggctgaacgtgaaaaagatcaccgacgcctcgacgtgcgccctcctcgagacgttcctcgtcgtcggcgtcgtctccaagttcgtcgcctccatcatgccgtgcctctacttccggatgcccgtccgcgacgccgtcgtcgtggggctcatgatgaacttcaagggcatcacggaggtggtgtacgcgtcggcgttcgaggacgcccaggtgctcgacgagcaggtgtacgcggcgttcatgatcaacgtgctgctgatcggcgccgcgtcggcgtcggcggtgaagtacatgtaccacccggaggagaagtacgtggcgtaccggcggcggacggtggagcacaagaagctcggcgaggagctgcgcgtggtggcgtgcatccactcgcaggacgacgtcgggccgatgctggcgctactcgacgcgtcgtcgccgacgccgatgtcgccgctctccgtctatctcctccacctcatgccgctcgccggcctgaccagctccgtgctccggcacttcaagcacggcaagcgcaactgcgtgccgtcggggaccaccgactcggagcgcgtcgtgaacgcgttccagttcttcgtgcagcagcggccgccgggcgcggcgtcgctggtcccctacgtgtgcatcgcgccgtacgccaccatgcacgacgacgtgtgcgccgtggcgctcgagaagcgcgccatgctcatcgtcgtgcccttccacaagcgcctcgccatcgacgggtccgtcgagccgacgtcgcacaacgccggcgcgatccaggcggccaacaccaacatcctcaactactccccctgctccgtcgccatcctcgtcgaccgcggcagcctctccaccgtcgccgccgccgccgccgcggccgacgggttcccgcaccgcgtcgcgctctacttcctcggcggcccggacgaccgggaggcgctggcgctggcggcgaccatggccgaggacgcgacgatcgggctcaccgtgttccggttcatgctgccagcggacaggcagagccgcggcggcgagggcgacggcgaggaggaccgccgcgacgaggcggagctgcaggagttcgtccggcggtgggtcgacgaccaccgcgtcgcctacagcgagaacatggtcggtggctccgacgagatggtggacgtcatccggaagacgagcccggcgttcaacctgctggtcgtcggccggcgatcggagagcccggagtcgccgctgacggccggcatatcggactggagcgagcacctggagctcggcgtcctcggcgacctcctgacgtcgacagacttcggatgcagggtgtccacgctggtggtgcagcagcagaccatggcggcggccggagaatcctgccggttgccggagttgcctgcaaagcacaaatcagatgaacctgtctga

SEQ ID NO: 100278 - DNA, 1851 bp, Oryza sativa
  Clone ID: PAT_MRT4530_9800C.1
atggacctcgctagagccaccgcaggaggaggaatcatccctgtggagcgtcgctgccgcctggtcgaggacgaggagtcgctcggggaggaggagctcgagcttgccggtgataacaagcgcacatccgtcttcgtttccgccgtgatggcggcgtcacggcccctgccccggtactcgcgtctctgtcttgtccaagctcgcgccaccttttatctccccatcttctctgatcttggccaaggaggctggctctgccatcctcttcagcgctttgcctccggcgagtccactcgcaaccttgcctctgtgaactcccaagcttggtggcttgagagagaggggaaggaggtagcaaaaggaaggtcagagttcggtgaggattccaacggcggcaagccggcgaccatcgaggggagctctatagcggcgttccacagtgataattccgatggctgtgaccctcggggtgtaggtcagcgacagcactccacagcacagatggataacactggtaacaaaggctatgggaatgatggatccgatgactcaagaacccaagccaatgggaatgagaaaagcatcaacaaaacctcaccagagctaatccaaattgtggttaaccaaaccaacatgttggcaacagcctttcaactattacagaattggaacaacccagcaggggcaaccaacgttcaagtacctacagtccagcaacagtgcaagttatcagaatttctcaaaactgagcctccaacctttgccattgccgtcgatcctatggaagccagtgattggttgcgcacagtcgagaagaagctagggttgattcagtgcaccgaccaggagcgggttggcttcgcaactcatcagttggttggaccggcttcagagtggtgggatagctacgaagcatcacggccagaaggacatactatcacctggaacgagttttcatctgtattcaagagatcacatgttcccgcaggaatgatcacactaagaaaacgagagtttcgctacctgaagcaaggagatttgaccgtcacagagtacctgcacgagttctatcgtttggctcactatgcaccagaagatgtggaaacggatgaagacaaacaagagaagtttctccaggggttaaaagatgagcttgcagtgcaactactcctagaggattatgaagattttgagaaacttgtggacaaagccatgcaactcgaaagtgagcataatcggatgacgaactgcaagagaaggattgtcaacatcccagtatttccatgtggtaaccaaagacagcgcactgagccacttcagatcaccggatcttctgttgcgcatcaagagttactaccccaagaagatggacacaacgtagacaacaacattagcaatactaatgctgatgatgccaccaacaaccatggttcttgccccattcatgaccacttagatcaagcgtgcaatgtcaacaacattcaccaagatatcgacgatagtatcaatgaaggcacccagaatgacaaccctagcaattttgactctgagaaagactccaatggtgatagcaaatatggtaccactgatgccaatgttagcaaggatttccaaccaccaattccaactccaagtcagaatgatcgttcccagacggacaactcagtaaagaagacattgatttgttacaactgcaaagaaccaggtcatttctccagagattgtccacagccgaagcgtaacctgcgtcatcactccggccattatgcaagaagaagacaagtcactcgccttgtggtcactggagcaaacgccatacctgtgaggcctcgtgttaatcataacccatag

SEQ ID NO: 100279 - DNA, 117 bp, Oryza sativa
  Clone ID: PAT_MRT4530_98010C.1
atggcccacagcaaggttgagggtccccataggtggagatgcttccctatccccggcatgaagtttgggccctgccccgcattacccatggggaagattttgcccctgctccgttga

SEQ ID NO: 100280 - DNA, 360 bp, Oryza sativa
  Clone ID: PAT_MRT4530_98011C.1
atgaagagaatagcggaaagtaaactgaacatgaagaaagtgaatctgagttgcttgttcgtgggagctattcccagttatgaaccaagtgatatgttcgcagatagtctacagaggagattgagccaagcagtccagagtggagaagttttgctaggcaagtttgttataaaagatgcgacggaagaagtcagacaagaagaaaagaccgcccaacctatcttcttgctagcctcctcgaatctcggggacgagattcttgtaagggggccgcgtgcgcccggtccaccgtggaccgagaggctgacgcgtgggccccacttcccgtggacccggtccgcgcgtgtcacgtcctgataa

SEQ ID NO: 100281 - DNA, 384 bp, Oryza sativa
  Clone ID: PAT_MRT4530_98012C.1
atggtggccaagctcggcaagctcctcggtggccggatggggacgatgccgaagaatgggtctagcatcatggccgccagagccgtggcgttgctgggagacaccttcactggtaaggttgtcatcgtcatccctccttccacagcctcgacgctcgtcagggggggtgcaagtggcggcgagttcgtcggcatacctccaccgcaacctccggcgagcccacgtaccgccgctgaggccccgcgggttgctgctgtccacttccccgtcaaatactccgactccgccggcaggccctccgccgccacgtcctcctccgcctccgcctccgcctccgcctccggctccttccgtgaggtccacgaggctcgccgcgcagagtag

SEQ ID NO: 100282 - DNA, 237 bp, Oryza sativa
  Clone ID: PAT_MRT4530_98013C.1
atgggccgcgcatgctccatcggtgcactcgagaacagcgacaacaaggtccgccgtgggccgtggcgtccacggcccctgagctctgcgctcccccaacccgaacaagatctggcgtcgtccctccgagcattgagaaagaggcggccttcggatccgcctgcaaaaatcatttttggaggcggcctcttctttttcgtaggcgccaaatccacccgcctgcgaaaacatttctag

SEQ ID NO: 100283 - DNA, 378 bp, Oryza sativa
  Clone ID: PAT_MRT4530_98014C.1
atgaagagaatagtgggaagtgaaccaaatgtaaagaaagtgaatccgagttgcttgttcgtgagagctattcccagttatgaaccaagtgatatgttcgaagataatctacagaggggtaacttctatgaggttgacgccaaaaatatgaactatgcgaagttctggaactgaagcaccatcttcaagtgccgcaacccagtcgaagtcagctaaaggttcaaccagggacaagtcaggtgaagagaagattccatctgcaacaggagattgagccaagcagtccagagtagagaagttttgctaggcaagttgttataaaagacgcgacggaagaagtcagacaagaagagaagaccgcccaacctatcttcttgc

SEQ ID NO: 100284 - DNA, 379 bp, Oryza sativa
  Clone ID: PAT_MRT4530_98015C.1
ctgaaggtaatagtgggaagtaaactgaatgtaacgaaagtaaatccgagctgcctgttcgtgggaactattcccagttatgaaccaagtgaaatgttcgaagatagtctatagaggtcagatttgtatgaggttgacgccaaaaatatggactatgcgaagttctggaactgaagcaccatcttcaagtgccgcaacccagtcgaagtcagctaaaggttcaaccagggacaagtcgggtgaagagaagattccatctgcaacaggagatcgagccaagcagtccagagtggagaagttttgttaggcaagtttgttatagaagacggagcggaaggagtcagacaagaagagaagaccgcccaacctatcctcttgc

SEQ ID NO: 100285 - DNA, 378 bp, Oryza sativa
  Clone ID: PAT_MRT4530_98016C.1
ctgaagataataatgggaagtaaactgaatgtaaagaaagtgaatccgagctgcttgttcgtgggagctattcccagttatgaaccaagtgatatgttcgaagatagtctacagagtgataacttgtgtgaggttgacgccgaaaatatgaatcgtgagaagttctggaacggaagcatcattaaactaccgcaacctagtctgcgtcagctgaaaggtgcaccctggttcgagtcaggtgaaaagaagattccacctgcaacaggagatcgagccaagcagtccagagtggagaagttttgttaggcaagtttgttatagaagacggagcggaagaagtcagacaagaagagaagaccgcccaacctatcttcttgc

SEQ ID NO: 100286 - DNA, 2509 bp, Oryza sativa
  Clone ID: PAT_MRT4530_98017C.1
cccacgcgtccgccggcctcacctcgcgtcgcgtcgcgtcgcttgcgttaggaggtgcctaagtagtggcttgtcggcgtcagatgagtgcagggacgtgctgctcggaggcgtccatggcgtggatcgactgctccctcctcgcctggctcctcttccgcgtcgtcttcttctcctgccacgccaagcagttcagcatcttctagcactcgatcagctaggctgaatccacatatactccagcatatatatacagcaactgattaagtaagctgttgctcgccgacgacggtggccgagcatgtccggtgcacggcggtgcggtggccggacgtcggagagaagctcggtggtgggcgacaacaggaatggatacgtcgagaccgacccaactgggcgctatggccggttgtcggaggtgctggggaagggtgcgatgaagacggtgtaccgagggttcgacgagctgcggggggtggaggtggcgtggaaccaggccaccatcttcgacgtcctctgcaccccggacgccctgcacgccgtggacgcggaggtgagcctcctccacgaccttggggccagcatctgcatctgcatctgaagacggagggggacacgccggacggccacggcagcgagagggggaggaggagcggcggcggaggaggatgagtcggaacaggtcgatggtggacatgcggagcccagcggctgcacaaggacgctggtggaggagctcaacgaccgcctcttcttcaacaccgtcggcgccgtccacgacatcggcttccgcgaccctactacttacggatcgtcgtcgtcgtcttcttcgtcacagcatcgccggagaagcagcagcaaggttcgaccaacaagcaccactacatgttctgcataaactttttcagagcaaattagtactctaatttggtatgtacagaatgatcgatcagatgcagagtacgtaagtgtgcagctagctatctagcccgcggccacaaaattgtgtatatttggagagaagtgcatatatgagtgttgttcatgacaattttgccatgcgacatgtgaatgaatatatgagtgatatttgtacaaatcgtataaaaaaaaaaatccgcacagcgccggcaccccgaccgccgacggcgccgcttcatcggccgtaattccagtgaggagcaagaggaggcggcgccggcgccggcagcaaagacgacggacatggcgatcaccgggaagctgaacaaggagcacgacaccatcttcctcaaggtgcagatcggcggcggccgcaacgtgcggaacatctacttcccgttcgacgtggcgaacgacacggcgatggaggtggcgacggagatggtgaaggagctggacatcgccgaccgggagcccacggagatcgccgccatgatcgagcaggagatcgtgaggttggtgccagggtacaagcagcacgagtactcgtacgcggatgacaacgacgatgatgacgtcagcggacaccctaatcccttctactacctctcctcttcgccgacctcctctcagggatctctctgcggagtggggtccacatcgtcagaggggtttcctggcccacatggaaaagttgactggtcaagagattactgttactaccctccaagcagcgtcagcgtgagcgacgacgatgacagcggcacgagctcactctctgctgcagtcagtgcaagcagcctgcatcagcagcagcagcattgctcggcctcttccagcagattggggccagcatctgcatctgcatctgaagacggaggaggaggacacgccggacggccacggcagcgagagggggaggaggagcggcggcggcggaggatgagtcggaacaggtccatggtggacatgcggagccagctgctgcaccggacgttggtggaggagctcaacaagcgcctcttcttcaacaccgtcggcgccgtccacgacatcggcttccgcgaccctactgctgctgcttcttcttcctctagctcttcccaccaccgccggagaagcagcaacaagatcgaccacaagcaccactacatgttctgaataaacttttcagagcaacttaatttgctactccattatgtacagagaatcagatgcagagtattagcctctgataatggattagggccgttcactttgatgccactttgaaccttactaaattttggtaaaactaccaaaaaaaagtggctacatttagtttgttgtcaaattttagtaactatatataagaaatcctgctaaaattttaacaagttgccaaaatttgataaggttttttttttgacatcaaagtgaacatgcccttaatgtgcgcagtgcagagtatgcattgcgtgcgcggccccaaaattgtgtatatttggaacgagtgcatatatatatatgcgtgttatcaaaaaaaaaaaaaaagggcggacaatttcgccatgcggcatgtgaatgcatatatgagtcatatttgtac

SEQ ID NO: 100287 - DNA, 320 bp, Oryza sativa
  Clone ID: PAT_MRT4530_98018C.1
gcccttacgggatcaacccggccggttacacaatccacagggttatccatgaggtgcggcacgatgtgactggtgtgctgcacacccacacggccgccggtgtcgcggtttcggcacagcagcagggcgtgttgcccatcacccagcaatcgctgttcgtgctgtcaagcctggcctatcacgcttacgaaggggtggccctcaaccatgaggagaaagcgcggttgcaggccgatctcggcgaaaacaactttctgatgctgcacacccacggcctgctcacctgtggctcgaccatcgccgacaccttcctgatgatg

SEQ ID NO: 100288 - DNA, 379 bp, Oryza sativa
  Clone ID: PAT_MRT4530_98019C.1
atgaagagaatagcggaaagtaaactgaacataaagaaagtgaatctgagttgcttgttcgtgggagctattcccagttatgaaacaagtgatatgttcgaagatagtctacagaggggtaacttgtatgaggttgactccaaagatatgaactatgcaaagttctggaactgaagccccatcttcaagtgccacaatccagtcgaagtcagctagaggtgcaaccagggaaaagtcaggtgaagagaagactccatctgcaacaggagattgagccaagcagtccagagtggagaagttttgttaggcaagttcgttataaaagatgcgacggaagaagtcggacaagaagagaagaccgcccaacctatcttcttgc

SEQ ID NO: 100289 - DNA, 1479 bp, Oryza sativa
  Clone ID: PAT_MRT4530_9801C.1
atgggccaggccggttacttcctctgttccgagatcaccgcctccaagctcctcacagtcacagccacaagggaattgaagccgccgccgcctcctcgtccttccggccgtgtgctctcacgcagggcgcggcggcggcgatcttctgtgctagcgtggcggcatcgccgttgctttggaggcctaatattacaaacttggaagaaaaaccacacaatttcggcggtgcagcagagaagccacctggagagatttgcggcgctggacgaggcgccaccgccggcaccggaggagaccgtggtcaccggcggggagatggtggactacatgctgggacagccgccgccaacgacgcccgggccgcagagccaggtgtccttcgacaagctcaccttctccgacgtgctgcagttcgccgacttcggccccaagctcgcgctcaaccagccggcggcgtcggacaacggcggcggtggtggcgacgacggcgacgacgacgacgacagctacttcctcaggttccagtcgctgccgtccctccccgccgttccccctcctcgtggcggcgccgccgccgcgcatcaggtcgttgacgagcaggagggcagcaagcagacggtcgacgccggcggcgtgtccgagagcacgacgctggtgcagcaggctgacggcggcggcggccgtgcggagaaggccggtgagcaggggaagagcgggcggcggaagcgtccccggacggtcaagacgagcgaggaggtggagagccagcggatgacgcacatcgccgtcgagcgcaaccgccgccgccagatgaacgagtaccttcgagtcctccgctcactcatgcccggctcctacgtccaaaggggagaccaagcatccatcataggtggtgcaatagagttcatacgagagctggagcagctgatccagtgcctggagtcgcagaagcggcggcgcctgtacggcggcgacgcgccagcgccacctgcacggccggtcgccgacggagcagttctgccggcgcccatgcagcagccgccgccggcgacgccgccgttcttccccccgagcatcccgttccccgcgtcgtccggcgccggtgacggtacaggcgccggcgtggccaaggtcgcactggacctcgacgcgagcggcggcggcgaggtgggcggcggggtccgggaggagatggcggagaacaagtcgtgcgtcgcggacatagaggtgagggtggtgggcgtggacgccatgatcaagatcctgtcgcggcggcggccggggcagctgatcaagacggtggcggcactggaggagatgcacatgtccatcctgcacaccaacatcaccaccatcgatcagaccgtcctctactccttcaacgtcaagatcgccggcgacgcaagattctcggcggaggacatcgccggtgccgtccaccagatccttagcttcatcgacgtcaactacacgttatga

SEQ ID NO: 100290 - DNA, 1764 bp, Oryza sativa
  Clone ID: PAT_MRT4530_98020C.1
atgtccggtgcacggcggtgcggtgaccggaggtcggagagaagttcggtggtgggcgacaacaggaatggatacgtcgagactgacccaactggtcgctatggccggttgtcggaggtgctggggaagggtgcgatgaagacggtgtaccgagggttcgacgagctgcggggggtggaggtggcgtggaaccaggccaccatctccgacgtcctccgcaccccggacgccctccaccgcatgtacgcggaggtgagcctcctcgccgacctccgccacgacgccatcatcgccttccacgcctcctgggtccacccctcccgccgcaccttcaacttcatcaccgagctcttctcctccggcaccctccgctcctaccgcctccgctacccgcgcgtcagccgccgcgccgtcgccgcctgggcgcgcgccatcctccgcggcctcgcctacctccactcccgcggcgtcatccaccgcgacctcaacgtcatcggcacgccggagttcatggcccccgagatgtacgacgagtgctacggcgtcggcgtcgacgtctactccttcggcatgtgcatgctcgagatgctcaccaacgagtacccctacagcgagtgcgacaacccagcgcagatctacaagaaggtcaccgccggcaagctccccgacgccttctacctcctcaccgacgccgacgcccgccgcttcatcggccggtgccttgtcgacgccgcccaccgcccctctgccgaggagctcctgctcgaccccttcctctccccgcctcagaaccacgacgatcacaataccattgctcatgccactgcgccgccaccgccattgccattggcgtgcagtaattccagtgaggagcaagaggaggaggaggcgccggcagcaaagacgacgggcatggcgatcaccgggaagctgaacaaggagcacgacaccatcttcctcaaggtgcagatcggcggcggcggcaacgtgcggaacatctacttcccgttcgacgtggcgaacgacacggcgatggaggtggcgacggagatggtgaaggagctggacatcgccgaccgggagcccacggagatcgccgccatgatcgagcaggagatcgtgaggttggtaccagggtacaagcagcacgagtattcgtacgcggatgacgacgacgatgatgacgtcaacggacaacctaatcccttctactacctctcctcttcgccgacctcctctcagggatctctctgcggagtggggcccacatcgtcagaggggtttcctggcccacatggaaaagttgactggtcaagagattactgttactaccctccaagcagcgtcagcgtgagcgacgacgatgacagcagcacgagctcactctctgctgcagtcagcgcaatcagcctgcagcagcagcattgttcggcctcttccagcagattggggccagcatctgcatcagcatctgaagacggaggaggacacgccggacggccacggcagcgagagggggaggaggagcggcggcggaggaggatgagtcggaacaggtcgatggtggacatgcggagccagctgctgcacaggacgctggtggaggagctcaacaagcgcctcttcttcaacaccgtcggcgccgtccacgacatcggcttccgcgaccctactacttacggatcgtcgtcgtcgtcttcttcgtcacagcatcgccggagaagcagcagcaaggtcgaccacaagcaccactacatgttctga

SEQ ID NO: 100291 - DNA, 379 bp, Oryza sativa
  Clone ID: PAT_MRT4530_98021C.1
atgaagagaatagtggaaagtaaactgaacataaagaaagtgaatcggagttgcttgttcatgagagctattcccagttatgaaccaagtgatatgttcgaagatagtctatagagtggtaacctgtatgaggttgactccaaagatatgagttataagaagttctggaactgaagccccatcttccaatgccgcagcccagtcgaagtcagctagaggtgcaaccagggaaaagtcaggtgaagagacgattccatctataacaggagatcgagccaagcagtccagagtggagaagttttgctaggcaagttcgttatagaagacgcgacggaagaagtcagacaagaagagaagaccgcccaacctatcttcttgc

SEQ ID NO: 100292 - DNA, 486 bp, Oryza sativa
  unsure (1)..(486): unsure at all n locations
  Clone ID: PAT_MRT4530_98022C.1
gtctgggcgcgcgccatcctccgcggcctcgcctacctccactcccgcggcgtcatccaccgcgacctcaagtgcgacaacatcttcgtcaacggccacctcggccaggtcaagatcggcgacctcggcctcgccgccgtcctccgcggctgcacctccgcccgcagcgtcatcggcacgccggagttcatggcccccgagatgtacgacgagtgctacggcgtcggcgtcgacgtctactccttcggcatgtgcatgctcgagatgctcaccaacgagtacccctacagcgagtgcgacaacccagcgcagatctacaagaaggtcaccgccggcaagcttcccgacgccttgtacctgctgaccgacgccgacgcccagcgattcatcgggcggtgccttgtcgacgccgtccaccggccctgtgncgaggagctgctgctcgaccccttgctgtgcccggctagaaccacgacgatcacaata

SEQ ID NO: 100293 - DNA, 372 bp, Oryza sativa
  Clone ID: PAT_MRT4530_98023C.1
atgaggcagttggtggcaagttaaaagtaaatgacaagcatggtaatctcatgatgacaagcatggtatcctagtaatgacaagctggtgtcgacgcatgacatgaagttggtaacttcaatgaggttgactccaaagatatgaattatgagaagttctggaactgaagccccatcttcaagtgccgcaacccagtcgaagtcagctaaaggttcaaccagggacaagtcgggtgaagagaagattccacctgcaacaggagatcgagccaagcagtccagagtggagaagttttgttaggcaagtttgttatagaagacggagcggaagaagtcagacaagaagagaagaccgcccaacctatcttcatgc

SEQ ID NO: 100294 - DNA, 681 bp, Oryza sativa
  Clone ID: PAT_MRT4530_98024C.1
ccggccggagacggataaaaattgcgttcagttagtcgtgttacaatcatcatcccggcggccagcagcataaatgtcaaatggaatattagtcatgtaacatacacatcaatcatatatcctaggcactatacatacacatgattactgttactaccctccaagcagcgtcagcgtgagcgacgacgatgacagcagcacgagctcactctctgctgcagtcagcgcaatcagcctgcagcagcagcattgttcggcctcttccagcagattggggccagcatctgcatcagcatctgaagacggaggaggacacgccggacggccacggcagcgagagggggaggaggagcggcggcggaggaggatgagtcggaacaggtcgatggtggacatgcggagccagctgctgcacaggacgctggtggaggagctcaacaagcgcctcttcttcaacaccgtcggcgccgtccacgacatcggcttccgcgaccctactacttacggatcgtcgtcgtcgtcttcttcgtcacagcatcgccggagaagcagcagcaaggtcgaccacaagcaccactacatgttctgaataaactttttcagagcaaattagtactctaatttgggatgtacagaatgatcgatcagatgcagagtacgtaagtgtgcagctagctatct

SEQ ID NO: 100295 - DNA, 604 bp, Oryza sativa
  Clone ID: PAT_MRT4530_98025C.1
tctcatcagtgtctgacaatcctggcctttgtggtgcaaagctaaattcttcttgtcctggtgtgttaccaaagccaattgtgctgaacccagactcttcttcggatccactatcacaacccgagcctacaccaaatggcctacgtcacaagaaaactatactaagcatctcagcccttgtcgcaattggtgctgctgttctcattactgttggtgtcgtaaccattacagttctcaaccttcgagtgcgcactccaggctctcattctgctgctgagctagaactctctgatggatatctcagccagtcccccacaactgatgtgaattcaggcaagcttgtcatgtttggaggcggtaatccagaattcaggggtagtacccacgctctcctgctcaaggactgtgagcttggtcgtggtgggtttggcactgtctataagactactctgcgagatggccaacctgttgccatcaagaaacttgactgtgtctaccttggttaaatctccaagatgagtttgagagagaagtgaagatgctaggcaagctacgccaccgcaaccttgttgcgctcaagggatattattggacaccatcactt

SEQ ID NO: 100296 - DNA, 376 bp, Oryza sativa
  Clone ID: PAT_MRT4530_98026C.1
taatatgaggcagttggtggcaagttagaagtaaaagacaagcatgatattctcatgatgacaagcatggtatcctagtaatgacgagctgatctcgacgcataacgtgaaatgggtaacttctatgaggttgacgccaaaaatataaactatgcgaagttctggaactgaagcaccatcttcaagtgccgcaacccagtcgaagtcagctaaaggttcaaccagggacaagtcgggtgaagagaagattccatctgcaacaggagatcgagccaagcagtccagagtggagaagttttgttaggcaagtttgttatagaagacggagcggaagaagtcagacaagaagagaagaccgcccaacctatcttcatgc

SEQ ID NO: 100297 - DNA, 379 bp, Oryza sativa
  Clone ID: PAT_MRT4530_98027C.1
atgaagagaatagtgggaagtaaaccgaatgaaaagaaggtgaatccgagttgtctgttcgtgggagctattcccagttatgaaccaagtgatatgttcgaagatagtctatagaggtcagatttgtatgagggtgactccaaagatatgaactatgcgaagttctggaactgaagcaccatcttcaagtgccgcaacccagacgaagtcagctaaaggttcaaccagggaaaagtcaggtgaagaggagattccatctgcaacaggagatcgagacaagcagaccagagtggagaagttttgctaggcaagttcgttatagaagacgcgacggaagaagtcagacaagaagagaagaccgcccaacctatcttcttgc

SEQ ID NO: 100298 - DNA, 387 bp, Oryza sativa
  Clone ID: PAT_MRT4530_98028C.1
atgcagctgcccgagcgctcgagcgagcgggggcgagcgacgagtgggtcgcgtcacccctctcaccacgacacgagctcggcggcggctacggcgagcggcgacacgagctcggtggcgaccaagccacgcgacgagagaggaggcaagctcggcggccggcgcgggcgacgagcacggcggcagtgggacgcgagctcggcggcggcggcagaggaggcgcggcggacgacgacgaccggatctggggcggcgtggcacgccggcgagagaggaggcatggcggcggcaggggagagaggagacgggctcagcggtggccatgggggaggcttggcggcgggattgccggtgagagagaaggcgaggggcgatcggggaagatag

SEQ ID NO: 100299 - DNA, 293 bp, Oryza sativa
  unsure (1)..(293): unsure at all n locations
  Clone ID: PAT_MRT4530_98029C.1
cccgggacaggcaggcgagactgagcccctagcagcagggcaccaaccctctgcccgggagaggggcgcgcggaccgggtccacgggaagtggggcccacgcgtcagcctctcggtccacggtggaccgggagcacgcggctggcggcggtcggcgccgtgggtcccacgcgtcagccgcacctgcgggcgcgggcggttgacggccgggcccacctgcaagccgnggtgcgcgcccgaaggcggactcttcgacactgccggactcgccgtcgccgttatctcccttctctt

SEQ ID NO: 100300 - DNA, 958 bp, Oryza sativa
  Clone ID: PAT_MRT4530_9802C.1
aaagtcttcttttggctttgggccgaaagtcggcccaaaatctcttttctctctcctcggcccagccggcccagtccgcagccgcgcgcgcgcgtcggtcgctgacaggtgggtcccacctgtcaggttcttcgtcctccttcggccgccgccgccgaaaaccctagttcgcgccgccgccgtttcccttccaaatccggccgttcctttccttctccggccgaatcaaaagaggggaaacaatctcctggatctcctctaccttttctcctttggaatcatcggctaaaacgttttggaagctcgtggaatcgagttcgattcggatcggtttctttctctccaagcccgaggtttccttcgccgtcgccggtcgccgtgggccttcgtcgccgcctccgagcccctttaaaaggacccccggagtctcctctacccgtcgccaccttcgcctttgcctctcgtcgccggaagagctctagcgccgtgtgccctagctttgccgtcgtcgccgccgctccagccgtgcgccgccgccgttccagacgtcgccgtcgctcgggaaggacgtcatcgtggtcgccgtcgcgtcgccgtcctcgttcgccccttcgccgtcgccggagatcaccggagcagcgtcgccgtcgacaacccgaaggtttccgccgcttccttctcgtcgccgtcgtcgtccgttgttcgtccgccgccgttttggtcaccggtgtgttcgccgcgtcgtcctctacgtgctggtgccctccgtttgcgtcctagtgccgccgttcaccggcgagcgtgcgccgcccgagccgtccgctccgccgagccgccgccgctgtcggtgacgtcaccgctgacgtcatcggggtcgtccgccgtgagccggtcgtggaccgttcgatctcggccgtccgttttggattggttcgatctcggccgtccactcgcgtga

SEQ ID NO: 100301 - DNA, 195 bp, Oryza sativa
  Clone ID: PAT_MRT4530_98030C.1
atggagggagtgatccgccacctccctgtcccgatcaccactgccaccgtcggcccatcaacctccctaccatcaattcctccccaaatccagaaccctaaccctactggctcaaatgttgatcgtcgctgccaccgccacatcatcgacctccacgaccaccaatttctcagtaattcctccccagatccataa

SEQ ID NO: 100302 - DNA, 250 bp, Oryza sativa
  Clone ID: PAT_MRT4530_98031C.1
gactaacagctgaattgattattgcgctatcaggagcgacagacataacccacgagtgctaatcgcataacaagacttacgatggatcatgtgcatgatatgaacacaatgctgacagctcggcattgccatccatacacacatattaacacatatgcttagacgagcaaccaactgggcacacctcagcatattatgctgaccatggacgacaaatctgtgcctggaacatctaccgaaagcacgaggc

SEQ ID NO: 100303 - DNA, 418 bp, Oryza sativa
  Clone ID: PAT_MRT4530_98032C.1
attcggctcgagattttccagggttttgagccacccttatggatttaagatttcggaatgaagcttacaggtggaaagcttgatgatatcactgtaatagttggtcagattgtgagttcatgagatttgctaataatgaaagaagacaaagtcctgattgctgagatcactagagaagggtttgccttaagtatactgcggcaactaaattttggtgatgctctgagaaataaggatctattcattgaagtgagttctcctgctttgcctgttgtgctgcatgcattgagaaaggctgtctgagatactcattcagaaatagttttgtttgagatgctataatctaagaactgtctctgatacattggagaagcatgattgtgaataataggagaaaaaaaaatcaaccagtaacagc

SEQ ID NO: 100304 - DNA, 1516 bp, Oryza sativa
  Clone ID: PAT_MRT4530_98033C.1
atggattttgacctcaacagtatcccagaattagtttctggtgaaaatgaacctccagtacaccatttactagttgatgatgaagacagaacatggatgattcctgctataaatttggactacacttttgactttgaaactatgtatacttctggtgatgttggaagtttacaagcacacaatgtagccaatgatgagatgcaagtatttgaagccaatgatgagatgcaagtatttgcaaccaatgatgagatgcaagtatttgaagccaatgatgagatgcaagtatttgaagaaatgtcagatcatgcagacacaatgcatactagtgttgcaactggcgcaacaactgctactgccaacacaatttcaagtcaagactctggaacagatgattcagaagtgccgtacctcatcttgactttcaactcagaggaggaagcaagggctcactacaacaggtacgcaaagcgcgttggattttcaatcaaaatcaacactgcaaggaagtcagccaaagatggagaacgtgacaaagtaatgtttgtttgcaacaaatgtggtccagaagaaaaaacgggtgaagcattccccacaaagaaaaggaaaataagtagaacaagacaggctgcctgcaaagcaaggatgacagtgaagaggaaaggagctaggtgggaagtaattcagtttgttgaagaacacacacatcctctggttagaaagttttcactcaagaagttcctaaggtcacatagagcaataccgaaagaggaaaaagatttcatcacaatgctgcacggaatgaatctctcagctggtagaattatgaaattgatgtcggaattgtatggaggggctaggaatgtaccctacactagaaaagacataagcaatttcaagtcaaagttggggagtgagtataggtgtagagatattcctgaaccaattgctcacttcgaggaaataaaaaaggatgacccaaatttcttctacaagattcaacttgataaggaagacagggtgcagaacatattttgggttgatggagcagcaagaaatgcctacaaagacttcaaagattgcgtctcgtttgactgcacatacatgacgaacatgtataacatgccttgtgcaccattcattgggataaacagacatgggcaatcattacagctgggttgtggatttctaaggaatgaaaagacagaaacctttgtatggttgtttcaagcatttctagagactatagaagatcagaatgagtttgaagcagaagaaacaatcccttctatgtgggcttactatccgatgaaaacaaaagcattggaggtctacacaaggcctatattcaacagatttcaaaaagagctgattgcttcaacatcatataaattgacccgaacttctgaaaacatgtatctagtagaaccgaatggaggtcctgttaggaattatggatcaaaggcattcattgtatctgcaaatgtgttggacaggatatacaactgtgaatgct

SEQ ID NO: 100305 - DNA, 290 bp, Oryza sativa
  unsure (1)..(290): unsure at all n locations
  Clone ID: PAT_MRT4530_98034C.1
cggggcgancaagggctggatcctcgtactggcaagcagcagcttcactactttcctagtgctgctanacaactgaancccacccaactcaccttaggaacancttttcttttcttttttaccatttttctgctanctttgtcgccacgttctcctgtanancttgtcccggttgatctacgttaggttgttgttancctggctgttaccgaggaagtactagtgatttggaaataaaagtgccggtattcaggaaaaaaaaaaaaaaaaaaaaaaaaaaaaaaaaaaaa

SEQ ID NO: 100306 - DNA, 272 bp, Oryza sativa
  unsure (1)..(272): unsure at all n locations
  Clone ID: PAT_MRT4530_98035C.1
tcacatagtagtgagaggtcaatagagagttgccgttatgagcactagcatgcccaaactagagatcttgacgttatcgctgggaaaggaatggaaatcctgaggccagatgtccaacatgttctatgccacctgaagactgatccatactcttaatgttacgcatgtactctcccgaactttggacaaaacccangttattattacatgggcctggctgagaactgacatattgcagtctgaaagatggaatagtcgccgaatgtatgatc

SEQ ID NO: 100307 - DNA, 2094 bp, Oryza sativa
  Clone ID: PAT_MRT4530_98036C.1
tcacttctcagtactagctaggcctttcctaactgatgtctttgacgcctttgcatggaccccaggcttgcgtctcgttgaaactggtctcccttgcttttgtatgatggggggggggtcatttatctgtagtgttgggttagttgatgctgaggggatatctgaaattcctcttgcaggatcagatggggctggctgtgcttttttctgtttctttctactctgcttcatagctgctaagtcatcagtcattgagctcatacactgtagagccatacggtaggctttctcgttgcttgatgcatcttttgcaatctgtgtaaattttgtgcacagattggtatacctgattagcttcagagatttagggggcaattgcatttgttcaccaatgcttgtaactggaggcaattcaggctctttaaccatcgtccatctaggcaatatgtagtgttctggaatgtcactcacttggcccacaaaatcaaatgtcatcaccttcagaacatgacagcaaagaatgccatccctttcgaacttacagcattcacagttgtatatcctgtccaacacatttgcagctacaatgaatgcccttgatccataattcctaacaggacctccattcggttctactagatacatgttttcagaagttcgggtcaatttatatgatgttgaagcaatcagctctttttgaaatctgttgaatataggccttgtgtagacctccaatgcttttgttttcatcggatagtaagcccacatagaagggattgtttcttctgcttcaaactcattctgatctgttgcaacagtgatttttcttgaatcttcttgtacttctatagtctctagaaatgcttgaaacaaccatacaaaggtttctgtcttttcattccttagaaatccacaacccagctgtaatgattgcccatgtctgtttatcccaatgaatggtgcacaaggcatgttatacatgttcgtcatgtatgtgcagtcaaacgagacgcaatctttgaagtctttgtaggcatttcttgctgctccatcaacccaaaatatgttctgcaccctgtcttccttatcaagttgaatcttgtagaagaaatttgggtcatccttttttatttcctcgaagtgagcaattggttcaggaatatctctacacctatactcactccccaactttgacttgaaattgcttatgtcttttctagtgtagggtacattcctagcccctccatacaattccgacatcaatttcataattctaccagctgagagattcattccgtgcagcattgtgatgaaatctttttcctctttcggtattgctctatgtgaccttaggaacttcttgagtgaaaactttctaaccagaggatgtgtgtgttcttcaacaaactgaattacttcccacctagctcctttcctcttcactgtcatccttgctttgcaggcagcctgtcttgttctacttattttccttttctttgtggggaatgcttcacccgttttttcttctggaccacatttgttgcaaacaaacattactttgtcacgttctccatctttggctgacttccttgcagtgttgattttgattgaaaatccaacgcgctttgcgtacctgttgtagtgagcccttgcttcctcctctgagttgaaagtcaagatgaggtacggcacttctgaatcatctgttccagagtcttgacttgaaattgtgttggcagtagcagttgttgcgccagttgcaacactagtatgcattgtgtctgcatgatctgacatttcttcaaatacttgcatctcatcattggcttcaaatacttgcatctcatcattggttgcaaatacttgcatctcatcattggcttcaaatacttgcatctcatcattggctacattgtgtgcttgtaaacttccaacatcaccagaagtatacatagtttcaaagtcaaaagtgtagtccaaatttatagcaggaatcatccatgttctgtcttcatcatcaactagtaaatggtgtactggaggttcattttcaccagaaactaattctgggatactgttgaggtcaaaatccat

SEQ ID NO: 100308 - DNA, 2525 bp, Oryza sativa
  Clone ID: PAT_MRT4530_98037C.1
atggactttgacctcaacagtatcccagaattagtttctggtgaaaatgaacctccagtacaccatttactagttgatgataaagacaaaagtgaaacatacttccctataaatccgactgacactagcatggagattcctgctataaatttggacgacacttttgactttgaaactatgtatactgctggtgatgctggaagtttacaagcacacaatgtagccaatgatgagatgcaagtatttgaagccaatgatgagatgcaaatatttgaaggcgattatgagatgcaagtatttgaagaaatgtcagatcgtggagacacaatgcatactagtgttgcaactggcgcaacaactgctactgccaacacaatttcaagtgaagactctagaacagatgattcagaagcacagtcagcgccatcacaggatattccgtgcagcacacaagtgccgtacctcaccttgactttcaactcagaggaggaagcaagggctcactacaacaggtacgcaaagcgcgttggattttcaatcaaaatcaacacttcaaggaagtcagccaaagatggagaacgtgacaaagtaatgtttgtttgcaacaaatgtggtccagaagaaaaaacgggtgaagtgtgccccccaaagaaaaggaaaagaagtagaacaagacaggctgcctggaaagcaaggatgacagtgaagaggaaaggagctagaaagttttcactcaagaaattcctaaggtcacatagagcaataccgaaagaggaaaaagatttcatcacaatgctgcacggagttaatctctcagctggtagaattatgcaattgatgtctgaattgtatggaggggctaggaatgtaccctacactagaaaagacataagcaatttcaagtcaaagttggggagcgagtataggagtataggtgtagagatattcctgaaacaattgctcacttcgaggaaatcaaaaaggatgacccaaatttcttctacaagattcaacttgatagggaagacagggtgcagaacatattttgggttgatggagcagcaagaaatgcctacaatgacttcaaagattgcatctcgtttgactgcacatatatgacaaacatgtataacatgccttgtgcaccattcattgggataaacagacatgggcaatcaatacagctgggttgtggatttctaaggaatgaaaagacagaaacctttgtatggttgtttcaagcatttctagaggctatggaaggtgtagagcccacaaacataataactgatcaagacctagctatgaaggcagctatagcgctagttttcccacatgctaagcatcgcaactgccactggcatataatgcagaatgctcagaagaagattggccatatattagatcatgacaaagcattgtgtgatgcattcaatgactgccttgacaatagctggacagagcaagagtttgatgctaaatgggatgcaatgttgacaacatatcatttacaagataatgagcacttccgacacctttgggaaatgagacagtgttgggtcccagtatactttatgcactgtttcttccctttcctccagactacagcacggagtgagggatttaacgcagtgctgaagcgctatgtaaatccccaaaatagcatatacaacttctttttgcagtacaagaagattcaagaaaaaatcactgttgcaacagatcagaatgagtttgaagcagaagaaacaatcccttctatgtggggtaactatcccatggaaacaaaagcattggaggtctacacaaggcctatattcaacagatttcaaaaagagctgattgcttcaacatcatataaattgacccgaacttctgaaaacatgtatctagtagaaccgaatggaggtcctgttaggaattatggatcaagggcattcattgtagctgcaaatgtgttggataggacatacaactgtgaatgctgtaagtttgaaagggatggcattctttgctgtcatgttctgaaggtgatgacatctgattttgtgggccaagtgagtgacattccagaacattacatattgcctagatggacgatggttaaagagcctgaattgcctccagttacaagcattggtgaacaaatgcaattgccccctgaatctctaaagctaatcaggtataccaatctgtgcacaaaatttacacagattgcaaaagatgcatcaagcaacgagaaagcctaccgtatggctctacagcgtatgagctcaatgactgatgacttagcagctatgaagcagagtagaaagaaacagaaaaaagcacagccagccccagctgatcctgcaagaggaatttcagatatcccctcggcatcaactaacccaacgctacagataaatgacccccccatcatacaaaagcaagggagaccagtttcaacaagacgcaagcctggggtccatgcaaaggcgtcaaagacatcagttaggaaaggcctagctagtactgagaagtga

SEQ ID NO: 100309 - DNA, 422 bp, Oryza sativa
  Clone ID: PAT_MRT4530_98038C.1
aatattctcaatttatagcatttcaaaataaagctttttaccacatgttagtttcaaaaactctttagaattcatatcatttcccttggtactggtatctggtagagagttacatcatttggggccttgggggctatgaccccagtagtagcacttgcccgcataagcttctccattttccctaatttataactctaatgtttacctggagaaacacaagggtttttgccaattttcaaaatcttctttggccagtttcaaaggagcaaaaccattttagtcgttcgggccttatgttgctttggcttgggttaagttcggttagtttaaaccatttatttaatttgcccaagttttgtttaagagtcagcacccccttggaatagaatccttcaacacgggtctaccttaaacagcccttt

SEQ ID NO: 100310 - DNA, 438 bp, Oryza sativa
  Clone ID: PAT_MRT4530_98039C.1
ctacgcgctttcaatggcatcaatggagggatgcccatgctgcaaacaaacattgccatgcacgagttgatgatcctccctactggcgcatcttctttcaaggaggtcatgaacaccggcgttgtgcgcctaccaccgcttgtacagcatcttcagcaaaaagaacgtccgagatggccacaaagatcagtggcatagcagtgtgttcccttctaacatatcaaaaaacaaaggagccctctactacgtggcacggctcactgggtaaggccgtctgcaccagcatcgggtcctgctgcatggaaggtgggtgccctgcctttacatcagcaagggacaggatcttctaccttgactaccacgaagatcccagctactgctaacacaagatctggaccgtgaggcagctggacatgttcaggtgcactgactccaccc

SEQ ID NO: 100311 - DNA, 885 bp, Oryza sativa
  Clone ID: PAT_MRT4530_9803C.1
atggatcgggagtcaacttggcagaagatgacacttgaatgtttgggatatcatgctgatggaacgtttgggacaccaacctccctccctgaccatgctctggccactacagcaatgagagcagaggtcgtccaggcctccaagatcctttttctcctcgatttcatctccagctgcaaagaagatgctatctccaatcgtcacaagatcgagcggtcatcgccgccatggagtcccctcaagccgacggaccattttccacgccgccaccgccagccggactttgctgggcttcgtgccagacgcgggcaacgcggctgtggtgacggcgacgacaggcgacgcggcggcggtggggggaggagctgcgagcaggcagcggaggaggggcgacgggggaggagcagcgtgcgggctcccccactggccgccacccacaaggcccacgaggcggcggcggggggaggagctacgggcaggcggcagcgcgcggcaggcggaccgggcggcggcgggcggagcgacggcagatgcacccgccgcacagtcctgccggaggaccgggcgacaacgtggggagcagccggccggcagagcagacgggaagcgggcaagcacgttgcggaagaggaagatggcgccgacggggagcgggatggggagtgcgaggacgccgccgccgtcgtcgtccatggccgtagatctcgcgccagcgccctcaacggtgtggccggcgggagtgtgacggcgacgggcgacgctgtggggaggagggccggcaggccggtgcgcgtggccgagggcggcgtcgtcaccgagctcgaccggccatccccattttctcgccaaggaacacgcaagaggggcggtcgccgttgtcggtga

SEQ ID NO: 100312 - DNA, 467 bp, Oryza sativa
  Clone ID: PAT_MRT4530_98040C.1
tgacgaaacaagtcggctcgtctctcctcggcggcgaaggaaaaaaaaaaaacgcgcgtcgccgccgccgctcgccgcgaagcttctcctcccccggccgccgctcgccgtcggctcgggcctgaccgcccttaacgccgcccgctggtcgtcgcgaggaaccgggaaccctagatcgctccgctctcttccagtccccccccctcaacctctcctcctctctcctctccaatctgtgcagggccggaggtagggtagggctctcgcctgctctcgcgcgcggcgcggcgcgggggcgagcgggcccgtgggcacggtggagggacggcgcacggccgggtctggagggggagcggccgacgcgtccgacctcgttccattcgattccgtctcgattcgggtcggattggagctgaaactccgtgttaggtctgcccctgcctggaatccctggatgctagctgctg

SEQ ID NO: 100313 - DNA, 1717 bp, Oryza sativa
  Clone ID: PAT_MRT4530_98041C.1
aataaacaagttaagtggcacagcaatcggcacgacctctttcgatgacgacgacggcaacaccagctcttcagaagggaagccgtcccttagttgcgagttgcgacggcggcgctgatgacgacggcagcaccaacggctgctctccacaaggggcgtcttctcccatctgcgacgacggctcttcagcagggggcggcactgctgggaacggtgctgggggcgtcgctggggacagtgggttgtggcgacgctggggatgatggtgggggcgacgctgaggacggaagtcgaggcgctgctgggaatggtgctgggggcgccgctggggacagtggtcggggcgatgctggggatgacagtgggggcggcgctgaggacggcaggggcggcgctgaggaaggctgtcaaggcgacactggcgacgacgaccgcgccgacgatggggacggcggtcggggtgacgctggggacggtggccgcgccgacgatgcggacggtggtcggggcgacgctggggacggcggccgcgccgacgatggggagggaggcggccctcccgtggggtcgcgcctcgccggcgcggcccggggtcggtgggggcagccagcggatggggcgtcgcggtgggcgctgatgcggcatggcggcgggcggagaaaagccgcggcgtcgctgggaagatggcggcgctcgagaatggttgattggggcggcctggcgctcccgaatcagcagacggtggactaccccagcttcaagctcgtcatcgtcggcgacggcggcacgggcaaaaccacctttgtgaagaggcatttgactggcgagttcgagaagaagtatgagcctactatcggtgtggaggtccaccccttggatttcttcactaactgcggcaagatccgcttctactgctgggatacagctggtcaggagaaatttggtggactcagggatggttactatatccatgggcagtgtgctatcataatgttcgatgttacttctcggctgacgtacaagaatgtcccaacttggcaccgtgatttatgcagggtctgtgaaaacatcccaattgtgctctgtggtaacaaggttgatgtgaagaacaggcaggttaaagcaaagcaggttaccttccataggaagaagaacttgcagtactatgaggtgtcagctaagagcaactacaactttgagaagccattcctgtaccttgccaggaaacttgctggcgatggtaacctccactttgtggaaacacctgctcttgctcctccagatgtcacaattgatctagcagcccagcaacagcacgaggctgaactggcagcggctgcagcccaaccactgccagatgatgacgatgacctgatcgagtagatttgcaatgtgctactttacatcgtcttgcgaggagccctgtttttaagcacagttatatcctaagagatcttttttgcctcggagaaattttcgtggtgtccaaggttaaatatgggagttttgtcggatatttgaccagttcagacaagttttggttatcgttgattgatgctataaggttacttcgggttaacatatttgcgcttatagctgtcgtatgatcaatgtgtatgatccgctctcgatatttggaggaaggtctgcgtgatgcgttagttttgagcaaatatttatcttcctttgccttcgaagcaaaaaaaaaaaaaaaaaa

SEQ ID NO: 100314 - DNA, 204 bp, Oryza sativa
  Clone ID: PAT_MRT4530_98042C.1
atgcggcaggctgtggctgttgtcgttgatcttggcaacgaatccggcggcatggcgctgggcgggcagcgagacggcttggaggttgcccaaccttggagcttccgtcttgcttctctttcacgcttggaggcagcgacgagcgtggtggaggtgttggtgatagctgatttggacttggaggagctcatggcctcccattga

SEQ ID NO: 100315 - DNA, 675 bp, Oryza sativa
  Clone ID: PAT_MRT4530_98043C.1
atggcggagcaggaagtgatcaggcgtgatgatgtggttgcggcgacggcggcggaggatgagaggttcgcgtgctcacccggcagcccggtgtcgagcggcagcgggaagcgaggcagcggcagcggcagcggcgacgaggtcgacgacgccggctgcgacgtcggcggcggcggcgcgcgcaagaagctgcggttgtccaaggaccaggccgccgtcctcgaggagtgcttcaagacgcaccacaccctcactccgaagcagaaggtggcgctggcgaagagcttgaacctgcggccgcggcaggtggaggtgtggttccagaaccgccgcgcgaggacgaagctgaagcagacggaggtggactgcgagcacctcaagcggtggtgcgaccagctcgccgacgacaaccgccgcctccacaaggagctcgccgagctcagggcgctcaaggccacgcccacaccgcccgccgccgcgccgccattgaccaccctcacaatgtgcctctcctgcaagcgcgtcgccaatgccggcgtgccctcgccggcggcggcgatattccccggccacccccagttcttgtgcggattcagagatcacgccggagcagcgtcgtcgtcgtacggcggcgcatcatctggactcgcgaaggcggtcagggcggcgaggtag

SEQ ID NO: 100316 - DNA, 1493 bp, Oryza sativa
  Clone ID: PAT_MRT4530_98044C.1
atcacaagggcttaagtaaaagatcaattacaattttttcgattgggcatggagtacgctactcgtggagatcgcacggctagctgcctgagtttcctctgcaatatcgtcgttctgctgggcctcgccgccgcggcggcgagcgggcagctgacggacgactactacgactattgctgcccccaggtttaccgcatcgtccggtcccgcgtggccgccgcgatgaaggccgagatgcgcatgggcgcctccctgctcaggcttcacttccacgactgcttcgtcaatggctgtgacgcgtccatcctccttgacggcacaaacagcgagaagttcgcggcgccgaacaacaactcggtgagagggtacgaagtcatcgatgcgataaaggccgacctcgagagcgcctgcccgggagtcgtctcctgcgccgacatagtagcccttgcagctaaatacggagtactacttagtggaggacctgattatgatgtcctcctgggaagaagagatggtctggtggcaaatcagacgggggcgaacagtaacttgcctagccctttcgattcgatcagcgttatcactgcgaggttcaaggatgtcggtctcaacgcaaccgatgttgtggtcttatcaggggcgcacacgatcgggcgatctcgctgcctgctgttcagcaaccggctggcgaacttctcggcgaccaactccgtcgacccgacgctggactcgtcgctggcgtccagcctgcagcaggtgtgccgcggcggcgctgaccagctggcggcgctggacgtcaactccgccgacgcgttcgacaaccactactaccagaacctgctggccaacaagggcctcctcgcctccgaccagggcctcgtctccagctccggcgaccccgccgtcgccgccaccaaggcgctggtgcaggcctacagcgccaacggccagcgcttctcctgcgacttcggcaactccatggtcaagatgggcaacatcagccctctcaccggctctgccggccagattcgcaagaactgcagggccgtcaactgatgagcaaaaaggcaaagattttttgcatctgccatgaccccatcttggatttgccagaagctatatcgtcttcttggactcaagtgtgaatctgtcgtttttaatgtgttgtggagcgctacatgtttcgttttgttcaagctatctaggattctctctccaatgcacgagtagaataagcaattagcatgcaaagttgctcgtcctacacgaatctgcagctgcattttcagtgggtgtatcaccaattattagagcacagacaaacgcgctgtgtctatcagagtaaaagaaagaatatgcaactgccatatggtttaaaaaaaaaaaaaaaaaaaaactacctctatctatctcctatatcttcatgcatcgagcaaaaaataccctggcaattctttaatcaaacattgattgggatttgacaaatgaattga

SEQ ID NO: 100317 - DNA, 1249 bp, Oryza sativa
  Clone ID: PAT_MRT4530_98045C.1
tgcaggaattcggcacgagggctcctccccctttcctttccccacccaacggcatctcgtctccacgcgagggatggcggcggcggcgagggaggcggcggagagcccgaaccctaggtcggcgccgcggcgtgcggcggcggcggcggccaaggacgccagcagcttcctcagcccgcgtttccggtcggcggccgcgcaggccgggtgggacgaggagtcgctcctccacgcggcgctcgtcgtcgaggacacccccgtccgcgagtcccgccgcaggaggcgggcctccaccacctcctcctccgccggcggcggcgggagcgccggatctaacactaggaagcggaggtcgtggaggcagccgccgggatcgatcccgccggtggtttttctgctcgacgacgacgagaagaagccggataccacggcagatggcaagaaggaggtgaaggaggaagaaaagaagaccgtcgtcgttggggagaaggaggcctgttccgagaaagcagcggcaaccagcgagctgccctgtatggatcgcctccgggaggagctgtcttgtgctatatgtttggagatctgcttcgagccgagcaccacgccttgcgggcacagcttctgcatgaaatgcttaaaacatgccgcagctaaatgtggaaaaaggtgtcctaagtgccggcaattaatcagcaattcaagatcttgcacagtcaacacagtgctctggaacaccatccagctgctatttcctagtgaaaccgaggcaaggaggacttcaatcgcttcatcctcggaaaccaacgacgacttggcgcaacaaatctctcaaagaagtaacagcatggcacaaggtggcataagaagcagcagttccaatggcatcggctacatcacgcagcgcagcacaagaagcagcgctaccaacaacaggagcttcacaacaacaggcagcagaagaagcaccttcgtcgcacaggagggcagcagcacagcaacagggagaggctttgtccgggcttcgcagctggtccctagtgccagggtcgtctcagtgagatcacaccagtctgatgacgcggcattggcgtacaggctgcagcaggaggagttcatgacggctttcgagagcgagggcgagaggcagccacctcggagcagcagcagcacggtgtccgctgctcgagcgaatctgagagctatggcctcccgggccattcgtctccgagctcgtggctggcctgtctag

SEQ ID NO: 100318 - DNA, 333 bp, Oryza sativa
  unsure (1)..(333): unsure at all n locations
  Clone ID: PAT_MRT4530_98046C.1
aggccaccggnnnccggaattgcccgggntcgagcccacgcccgtccgccacgccgtcccgcgacgaggcggtcggcgtctgcgtaccgacgagggcaggaggggactacgnntcgtcatcagagcgacgccgcgcctctnntcacctccaccgtcatgaggcgcgcctcctggcgccgccccaacgtgaagcntgttcaacgctcgtcgccgtcgaggaccctcatcagtcaaggagaggccagcgtcaggcgagcgtggtcacacaactgggcgctggtgtccgatgaactcacgacacgcaggtcgtgcatggaccgccaaccgtgatgg

SEQ ID NO: 100319 - DNA, 144 bp, Oryza sativa
  Clone ID: PAT_MRT4530_98047C.1
atgacaagggtagaaactggtgctcttgattcatggcagatatttcttccaaaatgtttcatcagagtgcagacacaaggagtcgacaatgattctgtcttcactacggaggcgttccgtccagagcgcagcgtcctcaattga

SEQ ID NO: 100320 - DNA, 2009 bp, Oryza sativa
  Clone ID: PAT_MRT4530_98048C.1
gctgcagggtttcgctttctgctcattgctggcttggcctttggctataccttcccttcatcacctcctagtataaagcaattcaattcccaatccccccggcccgaagtgaaggaagcggatcatggagctcgccatggattttgcgctccgcctccgcgacgccgccaaccaccacctctcccgctacgagcctctcgtgctcctcgccgcgcccctcctcgccctcctcgctgcccgcaccctccacgccgccgctgccgccgtcgccgaccgcggtctccgcaccgtcctcctcgctctagccatgacagccatcaagttgcttccgggagttagcgcctacatcaacgctgagaagaggaaggttgttgaccagctgcagtcaggtggcacgtccacaaaaagtactctgcggaccgagttgccaactgttgggctttccaaccaagtgataaacgatctcgaaacactgaaagctagagatgtaaactggcagggaaaatgctctggcacagtttatattgctgggagtgaatccgaaggtcattttgcattgataaacaaggcttactctatgttttcacacaccaacccacttcaccaggacgtattcaagagtgtggcacaattagaggctgaagtagttgcaatgacagctgctttgcttggcatcaaagaaaaatcatccggtggacagatttgtggtaatatgacatcgggcggaactgaaagcatattattagcagtaaaaacatcacgcgactatatgcgaacaaagaagggcattacaaagcctgaaatgataattgccgaatcagcacattctgcatacgataaagctgctcaatatttcaatattaaagtgcggcgtgtgccagtgaacaaagagtttcttgcagatgtgaaaggattcaaaaggtgtataaacggaaatacgataatgatggtggggtctgcaccaggatttcctcatggtttaattgatcctattgaggaacttggggagttggcttcacgatatgacatttgcttgcatgttgatctctgccttggtggatttgtattgcctttcgctcgtaagcttgggtaccctattcctccattcgacttctgtgtcaagggagttacatcaatctcaactgatgttcataagtatggattagccccaaaagggacaagcattgtcctatataaaaatcatgaaattagaaagatatcatggttgtcgttacataactattacagcttaacagatatgatcatgttgcaaaactgcacgaaaatgttcaaacaggttactgaatggactggtgggctctatgtttcacctactattgctggaagtaggcctggtgggttgatagcgggagcttgggctgctatgacgtctcttggactgaacggttatatggaaaatacaggtcatatcatggaagtgtcgaagaaaatacaaagagggattgaagatatcccagggttgtttgtgattggaaagccagacatgactgtcgtggcatttggctcagattcggttgatatatttgaggtgaacgacataatgtcatcaaaaggctggcaccttaatgctctgcagagacccaacagtttacacatttgtgtgacactgcagcacacggtcatatatgaggaattcctgaaggatctgaaagattcagtggacactgtaaaagcaaatccagggcctattagcggggggcgagctccgatttacggagctgctggcaagatgccggacagaggcatggtcagggagctgctggtggagttcatggacgcgtcttgctgaacatataatatatcccctgttcttgttattgtggcattgctgattactgttgtactagtattatcatcatgttcatgtactcaccatagaaccaaaacatagccatagaataaaatgcttatttgatccaataataataaaatatagctgcatgcagttcagttcataaaaaaaaaaaaaaaaaaaaaaaaaaaattat

SEQ ID NO: 100321 - DNA, 321 bp, Oryza sativa
  Clone ID: PAT_MRT4530_98049C.1
atgtgcggccgcacgctcgggttgattgaagctggaggcgatcggcattctcgatcggtggaatccaacactctggtcgggtggcccggaactttcgatgagctgcgttcgacagggagacggctagacgtagcactcgggtcgttcggcggctatgaaggcagcatggtgatttgtcggctccggcttgcggctagattgatgggtggtcaatcggaggtcggagcgggttgtgggctcgaggtggagcagcagcggtggcgttatccatgggtgaacttctatttttggtttgaaggtgtcgacaaggtgctacagtga

SEQ ID NO: 100322 - DNA, 309 bp, Oryza sativa
  unsure (1)..(309): unsure at all n locations
  Clone ID: PAT_MRT4530_9804C.1
tgaattccatgnctaaatattgtggtctattttgtaaatccattgccggggtatctgttcatgtaatccacaaaaagacttggcccgtaaatccnccgcngttaacattcttggcccccacaagaatntgggtntatttcacaattcaaattgaaggctcccattaaataattataggtgtatttggtggatgactcgagttcagtttcgatggnatgtacactttctcttcaaattcagcttgatttttttctntgtttntnngttaaaaaaaaaaaaaaaaaaaaaaaaaaaaaaaaaaaaaaaaaa

SEQ ID NO: 100323 - DNA, 477 bp, Oryza sativa
  Clone ID: PAT_MRT4530_98050C.1
ggaagcggatcatggagctcgccatggattttgcgctccgcctccgcgacgccgccaaccaccacctctcccgctacgagcctctcgtgctcctcgccgcgcccctcctggccctcctcgctgcccgcaccctccacgccgccgctgccgccgtcgccgaccgcggtctccgcaccgtcctcctcgctctagccatgacagccatcaagtaagctttaatcgacttcaatctcctcctcttttcttacttgttgctgctattactattattatccgttcatacatacacacgcaggttgcttccgggagttagcgcctacatcaacgctgagaagaggaaggttgttgaccagctgcagtcaggtggcacgtccacaaaagtactctgcggaccgagttgccaactgttgggctttccaaccaagtgataaacgatctcgaaacactgaaagctagagatgttaacctgcagggaaa

SEQ ID NO: 100324 - DNA, 958 bp, Oryza sativa
  Clone ID: PAT_MRT4530_98051C.1
tcatggggattgatttggggagtcaatcttccgcggctttgggaagtcgatcttccactgctctacaaattcgtgaatcccgtgaaaatggccaaacttaagcagaaattcagccctctgttgctcatcgaacccatcgcagtatgggccaaaacatagtttctcttcttctggagcatccttgttggatctatgaacaagctctgcagtttccttgaatatcttgaaccggtgagccatctcagcatggtcacgctccttatcgtaagccttgcaccagcgctcatagaaggcccaaatggcttcatcagattcaaaatccttgtccgtcacactgtcaactagatcagtctcaaaatccttgtccgtctcatcgtcagctggctcaggaccatatgatggcaatgggctgggaggagcaggagttggctcgtagtcgctgtagtcgtcgaggttataagacgggatgcgtgacaccgcgcgcgcggcgcgagatgcggcggcggcggctgagcgtgccgcgcgacgtgctgcgacgacggccgccgagcgtgcgcaaggactggacgacgcgaccgccgaggagcgcgcggcgcgggatgcggcggccgcggccaagcgggcggcgtctcgcgcggccgatacgtcgcgggcgagccgcgccaccagcgccgccgttgacatgggcctggcgcggccgggtcgatcgcgcagggacactccattcgtggtgccatctgctacggcatacggctcgtcatctcaaggaagcaacaatgtctcacacagcagtcaagaacgcagcaccaccacacaggaggaagagcagaaagagattttgtttcaacgagtcagggatttccaaggagaagtggatgtagagctagctagcttccccttcatgaatggccgctggtacatcggcacgccctcgatcgtcgttgacagccttgaatga

SEQ ID NO: 100325 - DNA, 1620 bp, Oryza sativa
  Clone ID: PAT_MRT4530_98052C.1
ctaccggcggtggcagaggtggctcaaggcggtggctgcgcggagggtggagccagcggcgggcttccctccctcctcccagatccgatggaggcggaggtagaaggcggaggcggcgcgaagggtggacgccgcggcggtgggtccgctgggaggggtgagggcggtggcgtcggcggccctcccctccggatctggcgaggcggctacgtccgcggctggattcggcacctccgccgtcgtcgctgtggtgcgacctcccccgttcccgacccccttcccgcctctccctctccctagcctctgcgtctccctcttcctctcctcccctcccctcccacctctcctctcttggtggagtggtggcgtggtgcggggactgccgttgccgacgaggccagctcggagtggcggaccatggcgcgagggagtgtccaacacgcaacccctcccatctgctgcctccgtgcctcctcctcctgtgctgacggctccggtggaggccctcttcgatcgccaccgccaccgtgcccggccgcagcccctcctcctgagctggctgtcggtgccatgccgcgccgctcctcggatgagtcgatgatgccgcgacactgagccttcgtcggagagcatctgatttggccctttgtgcccaggtatgctcagcccaagtgttgtcgttgacgccggattgcacgtctccttcctctgcttgtcgactatcagcaggtcggtttggccactgcaggtggagccgtgaaggtaatggccgccgccagccagtggaccaccttcttggtcccccgtctgcacgtcgaggcagtagagagcatcgatgagatgcatcctgagagaggcgggtcccttggcgccagactccatcccgatctccccggccaggccaaagacagcaagggcgcacgccgccgcggccatggcgtcggaaggctcctccaccaccgcgaggaaggccgcgatgagggccgtcgcggcgcagcccgtcgccgttatcttctgcatcatggccacgccgttgctcactccgaccacccgctcgccgtcggtgacgtaatcgacggccccggacaccgcgatgacggcaccggtggaccgtgccagtgcttttgcatcttgaagagcgtcccctgaatcatgtgtactgtccgcgcccttgaaggtggtggtggaggaggaggaggaggcggcgagcgagcgagaggcgagggcaaggatctccgacgcgttccccctgacgacggcggggcggagggcgaggagggagaggcaggcctccatccggaactcggaggcggcggcggcgacggggtcgagcacccaggggcggcccgcggaggcggcggcgcgcatggaggggagccagccctcggacagcgtgccgacgttgacgcacacggcgtcgcagcgcggggtgaactccgggacctcgcggagggagtggaccatggccggcgacgcccccgcggcgagaagcgcgttggcggcgatgtccatggagacgaggttggtgacgcagtgcacaagcggcgcccgcgcccgcaccgccgagaggagctcccacgcccgccggccccaccacgccgccgtccgctcctcgtccat

SEQ ID NO: 100326 - DNA, 327 bp, Oryza sativa
  Clone ID: PAT_MRT4530_98053C.1
atgaagctaatcaagctcctcatcggctgcttcgtcccccgcggcggcgagaccgaggctcagatgatgatgagggagctggatgaagagctcaacgagctgttccgggacgtgctgccgccaccacggtcgccgtggaagagggcgaaggaggccatccgccgccgcaggaacggcgccaaggtcgcgccggcgacggtggacgccgccgtgatcgtgcttggcccggccgtgacgaggatgctcgtcgaccaaggcgcgacccatcttctggacgagctcgaattgcttaatcaggcaataagggagcactacgcgtcgtcgtag

SEQ ID NO: 100327 - DNA, 348 bp, Oryza sativa
  Clone ID: PAT_MRT4530_98054C.1
atgatgacttctgcaactgatcgtctgcgagcatatctactacgccatcaagctttgggttgccgctgcgtcgccctctcgggccgcagtgttgccgcctgtggtccacggagagacgtcctcctcactgtggcctcaccgccgctggatttcacgtcgctgcatcaacatggagctacacctgtatcaccccttcgggtcatagtgtcgcccgtctcgtcgtcttcatcgtcgttcgtgcatcgacaacctcgtcatccgcactggtcatcgtcagccactcgagtcttctttgtctacttcgagcatcgccgccgtgtctccaagctgccactgtcgccgttctag

SEQ ID NO: 100328 - DNA, 856 bp, Oryza sativa
  Clone ID: PAT_MRT4530_98055C.1
tttggttgatcaacaaccatcactgacatactcacattttagatttcaccagaataatgaagttatcgaacaaatattctgtacaacaatcctgagaagtacatcacctgaacatacatgtatcacgtgccgtcaaaacttcaacagcaccacaacatctcattgttacaaatcttaccaatacctaagtgacaggacactggagaagcctcttcttcttcttctcaagtccccttcaaatgctagcaattcccatccaccttcaaacacagcatcatacagaacctgatactacaaggaacatttgccctgctgttgctagcatagacccaagcaaagctccagcaacaacctgggttggagtatggcctaagagttcacgcaatggtcttgtttcagacaagggatgttcagaaggaagttcgcagactatttgattcaacacctctgcttgctttccagcatgtaatctgataccagaagcatcgtacataaccacacttgcgaatattgctgctgtcgcaaatagggcacagccaaaaccatcttggaagccaatcgctacagctagtgctgtaactgtggcagaatgtgacgatggcatgccaccagaaccgataagctgcttaggatcccatctgttctccttataccgggtgacgaagaacttgatggactgcgcgacggcgaagcccagcaaggcggcgacgagggggtagttgtggaagacggcgaagtaggagaatcccgcggaggaggcgccgccatcaccaccaccgtcgtcgcccatggctctcccttctccttcccaccccccaaggtgcgtcccttccctccctccttccttccctctaaa

SEQ ID NO: 100329 - DNA, 160 bp, Oryza sativa
  Clone ID: PAT_MRT4530_98056C.1
gcaggaattcggcacgaggcccctttctgtgcatagaaatttgggtaatgacactcctgatgtatggtaataattcatcatgctattttagatagctttcaaattgatattttcagagtagaatggtctctataagaaaggattgccagagttcagatag

SEQ ID NO: 100330 - DNA, 630 bp, Oryza sativa
  Clone ID: PAT_MRT4530_98057C.1
ctagtcgtcgtccttcgcagcctcgtcagcgcgctcgaccgcgggctccgacgatgaggacgaccactccagcgccatcgccgccacgcgagccaagaaggtgccgccctccatcgccgtcacacccgagaaggagatggagttcaacggcggtggcggcagtacgaccacccccgccaccccggcccccgctgcggcgcccaccaccccggctctggccaccgcagcgcctcctctcccacgatcgagactctcgtcgctggcaccgttgtccaccatcttggggatccccgtcacggtgcacgccgagccgccaccgccggagctcggacagcccgcctcgctcgcctgctccgccgcccacctgcccgtccgctccgcgctccggacgaccggccctcccgccggcgaggacggcgcgacgagcagcgccctccagtcgcgagtcggcggaaccctagctttccactggtttggaacaaatgaggaggaggagaggagggatggtggtgaccccatccatgggttctgcacgcgcgggtgcaagcgaaggtcgattctagcgtttccgctcagcctggctccgcgggcctttttcatccaccggatcttgctatgagacaagcccat

SEQ ID NO: 100331 - DNA, 204 bp, Oryza sativa
  Clone ID: PAT_MRT4530_98058C.1
atggagatgaagtcctttgctttccttggtgcaccctattgggcagtagtggatgcaccagcgatgatggtggaggctgaccgtgatggcggggtgacgccgcactcgccatcgacgatgttgggcacgggggtcgccgtcgacatgccttccgctgggctgtcgctggcgtcggagagaaacactcaggggtcttctggctag

SEQ ID NO: 100332 - DNA, 410 bp, Oryza sativa
  Clone ID: PAT_MRT4530_98059C.1
aaccaaacaggacgccatgcaactaatgaaataattaattaatgaaaagtcaataacaaagctaatatctaagggcgccgcttggtgactacatatagatccatgaaattaaacttacgcgccgtcggttagcatatggcctactgctacagctatcctcatgaactcccatggcggttttgcccacgaggaagaagcctacgtgctcggcgacgggccacaggacggaggtgagctaggcggcatggctcagatgattggcgtgcgcattcttgctgatccggtaggtaccatagaacaccatgtacacccacacctccgggagcacttgcaccatgtaccacttgctgtgccttttcagggtcaagagactcatggagagctcgacaccgggagacacgttctaggtt

SEQ ID NO: 100333 - DNA, 305 bp, Oryza sativa
  unsure (1)..(305): unsure at all n locations
  Clone ID: PAT_MRT4530_9805C.1
ccccaccacacacaccccacgcgctctcgccgttctagggtttccgctccgatccctcccggccgaccaagcaacagccgcagcagcagccatggccgacaagggactcttcgccaacgacggctccttcatggagcggttcaagcagatgcaggagaaggagaaggagaaggccgccgccgcctcgtcgtccgccgccgccgcggccaatgccaccaaccccaagccggttgtcgtcgccgccntcnccccgttggcgtgcttgtggccgctggcgctcccggggggcgaggtggtgtnggccg

SEQ ID NO: 100334 - DNA, 546 bp, Oryza sativa
  Clone ID: PAT_MRT4530_98060C.1
atgaggacgaccactccagcgccatcgccgccacgcgagccaagaaggtgccgccctccatcgccgtcacacccgagaaggagatggagttcaacggcggtggcggcagtactgagggcgaggatgcggttggtgcaggaccccacagcggcgccgaccaccacgccaccggtctcctacaacaagacgctcgtgcctgccgccacaccgaccacccccgccaccccggcccccgctgcggcgcccaccaccccggctctggccaccgcagcgcctcctctcccacgatcgagactctcgtcgctggcaccgttgtccaccatcttggggatccccgtcacggtgcacgccgagccgccaccgccggagctcggacagcccgcctcgctcgcctgctccgccgcccacctgcccgtccgctccgcgctccctgagaagagagagagagagagggaagaagagaatagtgaggatgaggaagaagagagagaagggagagggatgaagaaaggagtgaggatgacatgtgtgccccaccatttttaa

SEQ ID NO: 100335 - DNA, 169 bp, Oryza sativa
  Clone ID: PAT_MRT4530_98061C.1
gcaaagggtcatccggtgtacctgggtggggttgtctatctaagtatggtggcgaccaccagaggcaacaagatcgggctttaactgaggtccataatagatggcagaatgtgtgatatgtgctgaggaactaagagaacattctacggcaggggatgaagctagagta

SEQ ID NO: 100336 - DNA, 795 bp, Oryza sativa
  Clone ID: PAT_MRT4530_98062C.1
atggcgtgctcgccgcacgcggcggtgcacgtggccatgacgctggacgcgtcatacctgaggggcaccatagccgcggtgctctccgtcctccgccatgcctcctgcccggggtcagtccacttccacttcctcgccgtctcttcggaggcggcggtgagggagctgagggataccgtccgggcgtcgttcccgtcgctggtgttccgggtgtacccgttcgacgagtcctgcgtcgcggggctcatcttcacctccatccgcggcacgctcgaccgcccgctcaactacgaccgctcctacctcgcctccacgctcccctcctgcgtctgccgcgtcgtctacctcgactccgacgtcgtcctcaccgacgacatcgccgcgctcaccgtgacgccgctcccgggtgagacggccgtggcggcgcccaagtattgcggcgccaacttcactgcctacttcacgccggggttctgggcgtcgctggcgctgttcgaggcgttcgcgggcgtcatgatcgaggagtggatagagctgcagaagcgggtgcgcatctacgagctgggctcgctgccgccgttcctcctcgtgttcgccggccgcatcgccgcggtcgaccaccgctggaaccagcacgacctcggcggcgacaactactgcggcctgcacgccgtcgcggtcagcctcctgcactggagcagcaaggggaagccatgggacaggctcgacgccggcaggccatgcccgctcgacgccatctgggcaaagtacgatcgagagctcgtgatcgactga

SEQ ID NO: 100337 - DNA, 316 bp, Oryza sativa
  unsure (1)..(316): unsure at all n locations
  Clone ID: PAT_MRT4530_98063C.1
gggctgcaggattcggcacgagttcgtantgncntntggantnccttntnnnatcgatgnancgtgttggnttganaactacctccgggangaatcatttgnagcccaaccgttattatganctctttgaaaangataccattaantttggcaatantaaccgggagtatgttttgcttcatnaccccncgggggntcnnggancnaantcnccngaaacttngtctccattgttncctnagatnttnangtccctcngccgctnntggtanntccnanggtttcccccncttttttcccttgcaacaaatccccc

SEQ ID NO: 100338 - DNA, 1116 bp, Oryza sativa
  unsure (1)..(1116): unsure at all n locations
  Clone ID: PAT_MRT4530_98064C.1
aaacgcgaacacgcgaggacatggacgacatggccaagctagctcagatgccgcgcgctcctctgctcgtcctgctgctgatgctgggggtcggcgcggcggtggccgtgccggagtacagggaggcgccgcacttcaccaactcggcggcggcgcggtgcccgccgccgctgccggcgacggacgcggacgcggcgtgctcgccgcacgcggcggtgcacgtggccatgacgctggacgcgccgtacctgaggggcaccatggccgcggtgctctccgtcctccgccacgcctcctgcccggagtccgtccacttccacttcctcgcctcctcctcctcgtcgccggaggcggcggcggcggtgggtgcgggagctgaggggagcaccgtgcgggcgtcgttcccgtcgctggcgttccggcgggggaggcggccgtggcggcgcccgagtactgcggcgccaacttcacggcctacttcacgccggggttctgggcgtcgcgggcgctgtcggaggcggcgttcgcggggcggcgcgcgtgctacttcaacacgggggtgatggtgctcgacctgccccggtggcggcgcgcggggtacacggcgcagatcgaggagtggatggagctgcagagacgggtgcgcatctacgagctgggctcgctgccgccgttcctcctcgtgttcgccggccgcatcgccgccgtcgaccaccgctggaaccagcacggcctcggcggcgacaactaccgggggctctgccgcggcctgcacgccggcgccgtcagcctcctgcactggagcggcaaggggaagccatgggacaggctcgacgccggcaagccgtgcccgctcgacgccgtctgggccaagtacgacctgctccggccggcggcggcgatcgagacctcgtgagatcgactgagctgctcnccttttttttgtttttttanaanaanaaanaatgtgttggttctttggttgttcatagatcancananatgtttatgccaagtgtaaatattgtttanagaatgaacagtgatgatgccaacttttttaaaaaaaaaaaaaaaaaaaaaaaaaaaaaaaaaaaaaacaaaaaaaaaaaaaaa

SEQ ID NO: 100339 - DNA, 3471 bp, Oryza sativa
  Clone ID: PAT_MRT4530_98065C.1
atgcggcgggcccacgagcagcctcatggctcgcggtggaccgcgcgcgcgcgagcgggggtgcaggggagcgttggaccagggtcagccttgaaccggtcgcagccgagatggcgccgacgtggcgccttcgtggcagccacgcgggccagcgggaggaggaagaaggggaaggccgagatggacggcggacggcggccgagttcaccggagctcgacaagacgactatggtcaagggggagcacaccggattggcgagcggcacaagagaggacgagccaatggctcggatcgcgccgggagaggtcaagggcggtggattgcgacggcggcggctggcggcgtgcaaaaggggaaaaactggcggggcggcgagggttcgattcaaggcgtcgggagcatctccgttgttcggggaactcattctcggggtcggatgggacggaggggcctcgagggaggccgacgagcggcggctccccggaacgggtggcaatggtggcgaggccatgccgggcggcggcggggcttcgtctacgcgcgttcaggagggctaccgagctaccacgcgagctaaaagagggagagggcaagcgagaagggagaacggagggaggcactaccgagccgagacgggcgctgcgtggggtgtggagcttcgaggggaaggaaccgagcacgggcagtcaaggggagctcggttgggtcaaggtgggggcgacagtggaggtgacaatggcgctggtcagggaaaaagaagaaaaggggagagaaagggagctctgcccatgccattttgggagaaaggaggagggagagagcgcgagctctggctccgcgttttggaagcatgcggcatgggggcgtcgggactgggcgatgacagcggcgatgactgcaaaaaagcgagcggggttcggcggctgcacggcgtaggcgtggcagggctgacgcggcggcgactgggcggcagcgcgggcacgggcggcgaccgggcgacgacttatgtgatcgtctttgatggcttaccagcttctccttctggtttgcttgctacagtcgtcaccagctttcagttactgtacgtcttgagccccatccaagtgatcgtggtgcagatcgatgagagtttcgtaggagtcatcaagcagctgcccggcgtgctggccgtgatccccgacgtcctgcacaaggtccacacgacgcgttcctgggatttcctcgagctagagcgaaatggcgcggcgaccggtgcgtggaaggacgccgcgaagtacggggtggacgctatcatcggcaacgtcgacacaggtgtatggccggaatccgcgagcttcaaagacgacggctattcagtcccgtcgaggtggcgcggcaagtgcatcactggcaacgacacgaccttcaaatgcaacaacaagctgatcggcgcggggttcttcaacctcggcttcctagcgtcgggcttgctgcaggggaagccgccaagccaggctgcagagctgtacacgccacgggactacatcgggcacggcacgcacacgctgtccaccgccggcggcgggttcgtgccggacgccagcgtgttcggccatgggaagggcacggccaagggcggctcgccgctggcgcgggtcgccgcctacaaggcgtgctacgccgagggctgctccagctcggacatcctcgcggccatggtcacggcggtggaagacggcgtgaacgtgctctcgctctccgtcggcgggccggcggacgactacctgtcggacccgatcgccatcggcgcgttctacgccgtccagaagggcgtcatcgtcgtctgctccgccagcaactccggcccgcagccgggctcggtcaccaacgtggcaccatggatacttacggtcggcgcgagcaccatggacagggacttcccggcttatgtcaccttcggcggcgtcacgagcagcatgaccatcaaggggcaaagtctgtcaaacagcactctgcctcaagggcaacggtacgcgatgatcaacgcgaagaacgccaacgccgcaaacgtaccgagcgagaactcgacgttgtgcttccctggctccctggacagcgacaaggtgcgcggcaagatagttgtctgcaccagaggggtgaacgccagagttgagaaggggctggtggtgaagcaggccggcggcgttggcatggtgctctgcaactacgccggcaacggggaggatgtcatcgcggacccgcacctcatcgcggcggctcacgtctcctactcccagtgcatcaacctctttaactacctcgggtcaacagacaacccggtcggttacatcactgcatcggatgccaggcttggcgtaaagccagcgcctgtgatggcagccttctcttcccgtgggccaaacccgataactccccagattctcaagcctgacatcaccgcgccaggagtcagcgtcatcgcggcttacagcgaggcggtttcgccgacggaactctctttcgacgaccgccgtgtcccctacaacataatgtccggcacctccatgtcgtgccctcacgtgtcgggcatcgtcggcctgatcaagaccaagtaccccgactggacccccgcgatgatcaagtcggcgatcatgaccacagcgatcaccggggacaacgacagcggcaagatccgggacgagaccggcgcggccgcgacgccgttcgcctacgggtcggggcacgtgaggtccgtgcaggcgctggacccgggcctcgtgtacgacaccacgtcggccgactacgccgacttcctctgcgccctgaggcccacccagaaccctctcccgctcccggtgttcggcgacgacggcaagccgcgcgcgtgcagccagggcgcgcagtacggccgccccgaggacctcaactacccgtccatcgccgtgccgtgcctgtccggctccgcgacggtgcggcgccgggtgaagaacgtcggcgcggcgccgtgccggtacgcggtcagcgtcaccgaggcgctggcgggggtgaaggtcacggtgtatccgcccgagctcagcttcgagtcctacggggaggagagggagttcacggtgaggctggaggtgcaagacgccgcggcggccgccaactacgtgttcggaagcatcgagtggtcggaggagtcggagtcggacccggaccggaagcatcgcgtgcggagccccatcgttgccaagacgacctgcggggcggaggaggacagcacgcgctccgctcgcccgccgccccacgccccccgcacgccgcggcccttcgctcggctgccggttgctgccgcgcccctccgctcgtccgctccactccgcgtcgcagcaccggggtgggagccggcgcggcgagtccggccggcctcggggaagcgctgccgcgctcttcccgactccggcgactgcaacggctgctccaccgccgccctacaggtcgactcttga

SEQ ID NO: 100340 - DNA, 346 bp, Oryza sativa
  Clone ID: PAT_MRT4530_98066C.1
ggctctgaagaaactatggatatgtgaggtccagaacctcaagtctcttgataacttcgcttgtgttgttgagctcagtgtggatgacaaccctgatctgcagaggatatctaattttcccaaattgcggaagcttgacattatgttctgccccaaaatggaacaagtaagcatgaggaatttgttcgtggactgcagctttgagcttcttagttccatagccatgggagatacaggtcctgagtggaacaagatcagccatatccagcaagtgaaggctaattcagatgatggatacgatgaaacgatgtggtatgtctcctacacaagaccggggatcctctag

SEQ ID NO: 100341 - DNA, 459 bp, Oryza sativa
  Clone ID: PAT_MRT4530_98067C.1
cgtaagcagtttgcaggcctctctttgcacatagttatcctcggagttcggattttggaaaccgaggagagcataattagcagccaggccgcctctctccctgctggcggccacgccacacccccaccggcgcacctctccacgctcctccccaaccggcgacgccttttgcccccctccccactgccggcagccttccccaccgagcagcggcgacgacggcggcagcggtggcgacggcggcggtggccaccgcaccactctctcggcagatccggaggtggcggcggtcgcgggccggtggcggctccctcctcccctctcgcctccctcctgcccctgatccggcggcgatggcggtgtcggcgggtgggtccgtggccgacgacgaggtggcgaggagcagcgcgcctccccctcctcccgctgggccggccgaaggccaaggcccagctaggc

SEQ ID NO: 100342 - DNA, 367 bp, Oryza sativa
  Clone ID: PAT_MRT4530_98068C.1
cctatttattgccctcccttttttttttttaggatgtttacaaaaaaaagggggtgaaaaacaaaatctcacatactgaacttatgttattcggccaggcacaactccaatgatatcacagaccccatggatagcatctaccttgaacacaactgtgtttttcaagaaaaaacttttatgtaccatttcacctggtccacatttcctactaacacacatgaggcctttcctcacacctactgtaggaaacacaaaccattttttcatgtatctacttgctccacctacgtgggcatgtcaaccctgaatttccactttatatgcccatataatgattaactagagttcaagggcctccaatctatct

SEQ ID NO: 100343 - DNA, 216 bp, Oryza sativa
  Clone ID: PAT_MRT4530_98069C.1
atgcgggccatctatatggcccaaaactcgcctatgtcccgtgtccgtaaaggaaccagtcccactttaactcccttaaaaagtgacctgaatttaatccgtgaccctcaaccgcacaaccggtatgaccccccgaactattcaaaccagtgcaatttgaattccttagcggttttggacgacggttttgctgacatggcactgacgtggcgatgt

SEQ ID NO: 100344 - DNA, 698 bp, Oryza sativa
  Clone ID: PAT_MRT4530_9806C.1
caccaactcgatcggagaggagatcggagaggagaggaggtgcggtgatcccgacttcactcggtccaggccttaaatccaaggcaatcgagagaagagatccgcggatgaaggaataaggaaaccgatctcgatttggttcgtcatggacttggagtgggttgcggaaaggggaggggaggggggcctcctcgtttaagaggaagaggaagaggaggacgaggacgaggagtaagttacttgctgccgccgagtcaaggccgagccgaagacggcgaggaggttttgtttggagcttttccgtggcgggaggggagggattcccgacgcaaccgtcaaaaatcttccacccaacactctccaaaggatccaacgggctcgagtggagagattctgcaggacgagcaccgcatagaggagaaggcggagatggcttctagtggagagaagctgcagaagcaccggccagaggagatagctcttagaacgggctcgagtggtcagacaacgcagaagctccgagagaaggcagccactgagaatcaccgtccaaaggagattggcccaagtggagagaagccgccgcataagctcctccgggcaaaggggaaggcgggcacgagctcaattggagtaacgctacagaagcaccgggcagagaaggcggactcaagtcgagggataccgcacaagctcca

SEQ ID NO: 100345 - DNA, 276 bp, Oryza sativa
  unsure (1)..(276): unsure at all n locations
  Clone ID: PAT_MRT4530_98070C.1
acggagcggagtgcgcggtgtgcctagcggtgctagaggacagcgaggaggccaggtacctgccccggcgcggtcacaggcttccacgccgagagcngcagacatgtaggctcgggtaccactgcacctgcccgctctgacggctcaccgtagacgcgccgacagcggctgttactgccgtaccggcggagccggcgacgatctacaccgtcgagcctccctcagagcgtactgctcagtctgtacaagcatggcgccagagctgtgaccatgaca

SEQ ID NO: 100346 - DNA, 990 bp, Oryza sativa
  Clone ID: PAT_MRT4530_98071C.1
atgaagcaacattttgatgaagatctcatatctaataggttaagggtcattgcttgttattcttggaggttgccgcctcctagacggcttgtggaggagttgcccggtgatctctccgagaagattgtggaggaggtccggtgccggtttgcagatgtcccggatgagctacgggagaatataagacaggctttgcaggttgaatcaactgtttttgagacgaaatatctgggattacctactctggagggtaggatgaaggctggaaagttcaaaactttgaagcaacgttttgctaagaggctcactgactggtctgaaaaatatatgtcgtctggggctaaagagattctaatcaaatcagtcgcacaggctatcccgacatatgttatgggagtatttaaattgcctgctactattaaattgccgcaagtcagaacagaggatttgctagcttggcactatgagaagacaggatttttctcagtccacagtgcttaccgactagccttgacaaatcatatgaatatatctgagttgggttcttctagctccgagacaagcggagaacgaaaaatttgggcaagcatatggactacactagtgccgcaaaagattaaaatctttgctaggagattagccagggaaggtcttactacaatggttaatcggaagaagcgcaagttggaggtgaatgcaacttgccgtatatgtggatatgaagatgaagactgctttcatgctgccatctcctgtacccgagctgttgccctgagatcactgttacgggaggtatgggagatgccaaaggagagttgtctgatcaggagtggaccggattggctcttaatcattcttgattccatcaatccggagggccgggcaaagttcctcctgcttctctggagatcatggtttctccggaatgattgtgtgcatggctatgggaaagcatcagtgcagggaagctcaattttccttcagagctaa

SEQ ID NO: 100347 - DNA, 151 bp, Oryza sativa
  unsure (1)..(151): unsure at all n locations
  Clone ID: PAT_MRT4530_98072C.1
tcctccngccaccncgncaaggtgaagtccttcnccaaggatgacgtatcaagaccctgtcacnntacttnnttcgntggctacaaggntggaatnacacacattgtgcgtgaggtcgagaagcntggntccaagntncacaagaaggaaa

SEQ ID NO: 100348 - DNA, 1734 bp, Oryza sativa
  Clone ID: PAT_MRT4530_98073C.1
atgcgtcgatgtgtcattttgcctgagcatgtcgtagaaaatattccacaccatgttcgcatctaccatttccatgccaagaacatggagctaaaatgggatactcattctccaagcgaaatgagggcgtgcgctgtgaggagagaggtgtgcggcgacattgtggaggatgtatcctctttgtgtctttcccaggttggatactgggacgaacaacgtctagtcttggatgctattacatatttcgtcccgctgtggacgttgttgtcgacggcgtccaccatatggcggggggcgcgcggggagcaggtggcggccggctggcccgcctggctctccgccgtcgtcggcgaggccatcgacggctggacccctcgccgcgccgactccttcgagaagatcgacaagatcgggcaggggacgtacagcaacgtgtacaaggcgcgggacacggcgacgggcaagatcgtggcgctcaagaaggtgcggttcgacaacctggagcccgagagcgtccgcttcatggcccgcgagatcctcatcctccgccgcctccaccaccccaacgtcgtcaagctcgagggcctcgtcacctcccgcatgtcctgcagcctctacctcgtcttcgagtacatggagcacgacctcgccggcctcgccgccagccccgacatcagcttcaccgagccacaggttaagtgctacatgcaccagctgctgtccgggctggagcattgccacaacaatggagtgctgcaccgcgacatcaaggggtcgaacctgctgttggataacaatggcatgctgaagatcgcagatttcggcctggcgtcgttgttcgatcccaacaagaatcagccgatgacgagcagggtggtgacgctgtggtaccgcccaccggagttgcttttgggctccacggattatggggtgggcgttgacctgtggagcgcggggtgtattctagccgagttgttggctgggaggcctattatgccaggccgtactgaggtggaacagctgcataaaatttttaagctgtgcggctcccccacagaagaatattggaaaaagtccaagctacctcatgcaacaatatttaagcctcaacaaccatacaaaaggcgaatatcagagacttacaaagattttccacagtcagcactgcgattgattgaaacactgctcgcaattgatccagctgatcgtttaacagcgacttctgcattaagaagtgatttctttacaactgaaccttatgcatgtgaaccatcaagtctcccagcatatcctccaagcaaagaaatggatgcaaaacgaagagatgaagaagccagacgtttgagagctgctggcggtaggactaatgatggagctaagaagacaaagacgcgcgatcgacctagggcagtaccggctccagaggcaaatgctgaacttcaaataaatatcgataaaaggagattagtaacacatgcaaatgcaaaaagcaagagtgaaaagtttcctcctccgcatcaggatggtgcggtctctttggtttctacaaatcacatggacccgttatacgaaccccaagatccctcttcgtttagcactgtatttacacaagagaaaagctctgttcctacttggtccggtcctttggctgatctctctgcagttgggaaacagaaatggaaacacaagtttggccgctcatcaaaacaaccatccactgcccgtgctcggtaa

SEQ ID NO: 100349 - DNA, 602 bp, Oryza sativa
  Clone ID: PAT_MRT4530_98074C.1
gcacgaggggctttcattagtaggatacatagtgtacatggcaaagcttaatttactattaacatcagattttatcacaataaagaagctttccttggcatcctcatgtagactattagctagtcaatctttattagttttcaatgagggatatgataaacagaacaatacaaccaatctaaatagctgtttatttgctctatcatttggtggaccaaacttgattttttgagaacgtaggcacttgctttgtcatacaatctgcctccatgctcagttattcgtctaacaatcttaactccagggatttgtaaatctcgactttaaatttgggctcctttggaagaaaggatttttgaaggaattctggagaaattcaatcctatggaaaattttcatacgtggtcgtttggatcaaaggaatagatagccaaaaatcctataaaattttagattggctcaaaacataagaatttttccatgaggtccaacctcttggggaaaaaaatcttctctctctctctctctcttcttattcttacatttttcctgggctccatttaaacggtcattcctatagtattcctgcaatttttcagtcc

SEQ ID NO: 100350 - DNA, 444 bp, Oryza sativa
  Clone ID: PAT_MRT4530_98075C.1
atggcgacgggaggaggcgacgagctcggagacgatggcgacgacgacgatgcaaacccgcgacgacgacgacgcgaacccgatgacgatgacggtgcgggcggcgataaccgcgtcggtgggaggcggcggccagtgggaggaggcggccgctggcgggaggaggcgcgagctcggagacgcctgccggtgacgacgacggtgcggatggcgagagccacgtcggcggggggcggctcggcgggaggaggcggcggtatgagaggggaccacacctacaaatccaacctactccctccaaccaaacagaaaattggatcaccaaatccaccttcatctctacaaccaaacaaaaaatggatcgccatatccaacaaaatatggatcgccatatcccatctaaccttggccgtgaaccaaacacaccctaagaaagtatgttga

SEQ ID NO: 100351 - DNA, 192 bp, Oryza sativa
  Clone ID: PAT_MRT4530_98076C.1
atggcagagcaggggtcaaatggggctgggtgtctggttgaggtcaaccgcaagaccggccctcctcctcaagttgctaatggcaggtccatttcaaaggctgagaaggccttaccctgtggcttggattcatcttttggcaatcatttttattggccaccttcctcctactgggccttgctgctggtctaa

SEQ ID NO: 100352 - DNA, 868 bp, Oryza sativa
  Clone ID: PAT_MRT4530_98077C.1
tcagtgtctcctcctccccctccccctcctagtcgcagagtgtgaggctgaggtcgatgttgatgggcttgaggtcgatgttgatggccttgaggtcgaggctgtggctgaggtgttcgccgggatgaggttgacgcgggtctcctcggcgtcgggggtcttgttgctggtgttaaacgggtcgacgaacctttggtcggtgagtttggagagtccagtgattttgaggtagttggaggccgcgaggacttcgacgaagaggatgttgtcctcgtccagcttgtcgatgaaggccttgtcccagttcttgagttcctctttccgctcgtcggtgtcggccttgttgttggcgtgctcgtcgcagtactcgatcaccttcatgagggccttgtagctgacgaacaggcgcgggatggtctcgtcgccgcggcggcggccgtcgtcgatgaggttcccgatggtctcggacagcctcgccgacgcctccttcaccttgaccgtcttgccgtccaagctcttgagggtgatcatcctgccgccgctctcctcctcctccgccacctcgggcaccaccttctccggcgaatcaaacaccggatgctccaacgcctcggtcaccgccacctcctccgccaccccctccgacaccagcttccgcaccagctccgacaccgtcgcgacctcgtccttcttctccaccgccaccttcgcgaacgcctccaacaacgcattccccacccccaccgcacccggcaccaccagaatccccgccgccttcgacgccatcgcggagccctctccctcctccttccccttccccttctcctccgccatcactcgctcacaaagatcgagccctagctctcct

SEQ ID NO: 100353 - DNA, 381 bp, Oryza sativa
  Clone ID: PAT_MRT4530_98078C.1
ggggaaaaaacccctcattttgttatcattccaactagtccaaaccaacaccacaccttattcattcttagaccaaaaaagaagaataaaaaactctttttttctctctctccccttaatagccatgttaagggctaaaacatactgtttgctttaccatgggacaaagggagtttttgcatccagatgctctcgactcagttatggccaatgatgccaagcctgccataagataaaagtactaagctgtgcaagacatactagcatcagctaacattatactgtgattgaaaaaaaaaaacttgttactcgagatgcccagtctacagtaaacttcatattgatggatgatcaccaattggttcatggcaaatcacaaaa

SEQ ID NO: 100354 - DNA, 1969 bp, Oryza sativa
  Clone ID: PAT_MRT4530_98079C.1
gctcccggtggtcggccgaacctcgcgtccgggagcgaaaaaaaaaagaaaagaaaaaaagagaggaagaaaacgagaaaaatctcaccttcctcttcctccgttatctagctcgatccccgcaagaaattcgccccggaatctctcgatccgctcgatccattcccccgatctgtcgatcgttccttgcgaaccctcggttcccggggtcccgatccggtcttcgccgcgtcgccgtcgccgccggagtcggagtcggagtcggagggggaggagatgaacggcgccggcgggaaccaccagcagcagcagcagcagcagcagcggctcaggcagcagcagcagcagcaggccctcctgatgcagcaggcgctgcagcagcagcagcagtaccagtccggcgtcctcgccgccgccgccgcggcggccatgacccagatggagcctatttcaaatggcaatcttccaccagggtttgatccatccacatgtcgcagtgtgtatgttgggaatgtgcaccctaatgttactgagagccttctaatcgaagttttccagagttctggccttgtggaaagatgcaagctcatccggaaggagaagtcttcctttggttttgttgactattatgatcggaggtcagcggctcttgcaataatgacccttcatggtcgtcacatatgtggccaagcaatcaaggtgaactgggcttatgcaagtacacagagggaggatacatctgggcatttcatatttttgttaagctgaagtgaatgatgcaactctttatgcctgtttctcagcatatccttcttgttctgatgctcgagtcatgtgggataacaaaaccggacgctccagaggttatggttttgtctccttccgtaatcaacaggaagctgagactgctataactgaaatgactgggaaatggcttggaagcagacaaataaggtgtaattgggcaacaaagaacaatgcagaagagaaacaagaaactgacaaccataatgcagttgtactaacaaatggtagttctagtaatccaggaatggaggcaagtcaggacaccggaagtaaagagaatccagagaacaaccctgattgtactacggtgtatgttggcaaccttggacatgaggttaaccgagatgagcttcaccgccacttctataatttaggtgttggggctattgaggaagttcgcgttcaacaggataaaggatttgggtttgtgagatacagtaaccatggcgaagcagcattggctattcagatggccaatggattggtagtgcgtgggaagccgatcaagtgctcatggggcaacaaacctaccccacctggtacatcctccaagccattgccaccgccacttccttcatatcaacccgtaccaatggcaggtgtgccacaaggtttctcggcagctgatatcgtagcatatcagaggcaacttaccttaagccaggtcgcagctgggcagattgctggccagcatggccttgcaggtcaggtatccgcagggcttcttgctgctggctcccaggccctctacgacgggtacccgaaccagtcatcagcgcaacagcttatgtactacaactaggtgcttaaggaggaggaaggcatttgtagtgttcggcttgttcggcgcaagcctggccttcctctttcggttcctattttctggtttctgtactatttgagtgagtgctcctcttccggttcactgcttgtcgcggaattgtgttattatcttcttattattgttgtactattgaccattttcttttctaatttggtcgaagtagttctcgccttaacagagtaacagatgtatttgatggaatgtgaatttgcgattgatcaatgtaactctcctgatgcccatctgagtattgattattcaccttgggcaaagagggctagtcttatcatgtaaaaaaaaaaaaaaaaaaaaggatcc

SEQ ID NO: 100355 - DNA, 238 bp, Oryza sativa
  Clone ID: PAT_MRT4530_9807C.1
cacccacacaaagcaagatttacatgaaacaaaccccgtttacataatgcttgaagccacatggttttccagccgctatcctagacacgggattcagacatggttgacacagagacactcacactctggagggttaagtcacacttactcaggcatgggccataacactggacggactttttagttataaataaagtacacaggctgcagcctaggcgatgcataaatagatggcctc

SEQ ID NO: 100356 - DNA, 147 bp, Oryza sativa
  Clone ID: PAT_MRT4530_98080C.1
atggagaggggcgatgagaaggctacagctacatcggggttgtgtggtgtctcaggtggaggcggagtcaacagcaattgctaccgccatggcccataccgtcatagagaattgaatgggaagagaggaatcgtaaccgtcggctag

SEQ ID NO: 100357 - DNA, 1542 bp, Oryza sativa
  Clone ID: PAT_MRT4530_98081C.1
agccctttctctctctctcattcccacgcgtccgcggacgcgtgggctcgatttctctctgtgcaccagcatcagctatggtgtccgacgccagcaagaagaaggcggcgcagaagaaggccgccgccgctgccaagaggggtgacaaggccaaggccgccattactctctccgagcgcacctgcaccgccgtcctcacctcccatcccctctcccgcgacatccacatcgagtccctctccctcacattccacggccatgacctgcttcttgacaccgacctggagctcaactacggcaggcgatatggtttgcttggcttaaacggctgtggaaagtcctgtctcctcaaagctataggatgccgggagcttcctatccctccacacatggacatctatcatctcacccatgagatcgaggcttccgacatgtctgcgctacaagctgtcatcagctgtgacgaacagagactccagctcgagaaggaggctgaaatcttggccgctcaagatgacggtggcggcgaagccctggaccgcgtttatgaacgcttagaagccatcgacgcatccaccgctgaaaagcgtgctgcagagattttgtttggcttgggttttaacaagcacatgcaggcaaagaaaacctgtgatttctctggcggttggcgcatgaggatcgctttggctagggcgctcttcatgaatccaactatccttttgcttgatgagcccaccaatcatctagatcttgaggcctgtgtctggctggaggaaaccttgaagaaatttgaccgtatacttgtcgtcatatcacactcccaggacttcctaaatggagtatgtacaaatatcatccacatgcaaaacaggaagctcaagctatacactggcaactatgaccagtatgtccaaacacgagccgagcttgaagaaaatcaaatgaaacaatacagatgggagcaggaccagattgcctcgatgaaggagtacattgcacggtttggtcacggatctgccaagctggcccgacaggctcaaagtaaagagaaaactcttgctaagatggagcgtggtgggctcacggagaaggttgtaagggataaggtattgacgttccgcttcactgatgttggcacgctaccacctccagtgctgcagtttgtggaggtcacatttgggtacacaccagacaacctgatctacaagaacctagattttggtgttgaccttgactcaagggtggcgctggttggtcctaatggggctgggaagagtacgctccttaaactcatgacaggtgatctcataccgctggacggcatggtgaggcgacacaaccatctcaggatcgcacaattccaccagcaccttgcagagaagctggacctggacatgtcagctctgcagtacatgatgaaggaatacccagggaacgaggaggagaggatgagggcagccatcggcaagtttgggttgtcagggaaggcacaggtaatgcccatgaggaacctgtccgacgggcagaggagcagagtgatat

SEQ ID NO: 100358 - DNA, 537 bp, Oryza sativa
  Clone ID: PAT_MRT4530_98082C.1
atggcagcctcgtcgtccttcgtgctcgcggcggcggcgctactcctccaggccgtgacggcggcggcggaggcggcggggcagcagaaggagatgcggatgcgtgtgtactggcacgatgtggtgaccgggccgaactcgacggtggcgaaggtggcggaggcgccgacgtcgagggcctccgcgacggtgttcggcactgtgtacgtcatcgacgacccgctcaccgacgggcccagcctgacggcgccgtcgaggctggtcggccatgcgcaggggatgtacgtgagcgccgggaaggagacgatgtcgctgctgatggcgatgagcttcgtgttcgccgccgatgagccgtacaacggcagcagcgttgccatcttcgggcccaacccggcgaggccggtgagtgagatccccgtggtcggcggcaccggcgcgttccgcttcgcccgcggctactgccgcgccaccacgtactggtacaacgccgccggcgacgccaccgtcccgtacgatatccatatccgccacgattaa

SEQ ID NO: 100359 - DNA, 386 bp, Oryza sativa
  unsure (1)..(386): unsure at all n locations
  Clone ID: PAT_MRT4530_98083C.1
cgtggaagcctggaattgaatcataaggctcatctgcnatttgacaccaggattaccttgacagccttgcttgttgttctggcttctngcatctgtgctgcaagcccctagaaaagctgaaatcgtgcacttgggagggatgttgcagattgaacttgtaccatggttcttcttttcgtttgtaaatatgtgtatgatcggtantagatcaccatcacctnntgttgacagctggtatggctgttctttgttttgatttattagatttacttgcccccctgcgttggcactcttttttgcaatggacattaggcctggtatgaggtgccatttaaacatgatgcaatcaatgtaatgtttgaactgaaaaaaaaaaaaaaaaaaaa

SEQ ID NO: 100360 - DNA, 426 bp, Oryza sativa
  Clone ID: PAT_MRT4530_98084C.1
gcacgaggaaaaggcctaaagaacttgggataaggaaattggatgtggtcactgacaatgaagcaaactacaatgttatgatcggcaaaagggatttgagcaagagtagcagtcctgaaacctcgatggcatttatccaagctgcgaaggaatacgacatctgcaagtgcaggagagagccaagggaaatgataagccatgtgaatgacctcgccaaggaagcacacaccaaaagcactgacatgttggatcttagagagatcattgagcgcaagtctcctcaattttggggaatgccatttgtgcgcatcaagcaagatgattcttctataaaagcaaaattaggagactcgaaggtcagcgacacaccttttgaagcaactaattattacatggaggtctggagcaaggctcagaaaaatgatg

SEQ ID NO: 100361 - DNA, 2629 bp, Oryza sativa
  Clone ID: PAT_MRT4530_98085C.1
cccgggctgcaggaattcggcacgagggcgctagccatggcggctagccgagcgaggcaactccacgctctctacctgacgagaggatgccgtgacccagacatgtgggccaacctcgccaaggtctacgcctccaactccttcctccgggaggccgctatcatctactcgaaactactgccccatcgtactcaccacctgccccttgtcatcgtcctcctcaaggcaaccgcctcccgcgcggatcccgtcctcggcagggccctccacgcggaggccgtgaaatccgccaacgcccacgaccgcctcgtggggacgacgctggtgtccgtgtactgcaagtgcggcctcctggccgacgcgcgcagggtgttcgacggaatgctggaccggaacgccgtgacgtgcaacgccatgctcgccgggtacgcggcggcgggagacatggtgagcgcggaggcgctgttcgccggcatgggctcacggactcccgtcacgtgggcaacgctgatccgggggttcgcggggaagggcgacatggcggaaacgcggcggtggtttgaggccatgccgctgggcatgcagaacgtcgtcacgtggaccgtggccgtgcaggcctacgttgccgcgggggacatggagaccgcgagggagctgttcaacaagatgcctgcgcggaacgcgtttgtgtggtcgtcgatggtcaccgggaacttcaaggctggcaatgccgacgaagcgcaagcggtgttcgacaaaatccccgtgcgcaacttggtgaactggaacgcactaatagcagggtatgccaaaatgggatgctgcgagaaggcactggaagcatttcactccatgctaaaggacaagatcaagccggacgagttcaccatggcaggtgttctctctgcctgcgcacagctcggttcgctagagcaagcgagaaaggttcacaatttcatcatccagcaccgtatccggaagaaccagttcgttatgaatggcctggttgacatgttcgccaagtgcggtgacctcgctttcgcacgaaatatcttcgacaacatgcaatggaggaacaccgaatgctggaactcgatgatctctgcactttccagccatggacagagcattgaggctattcggttgttctccaagatggagtgttcggaccagaagcctaatgcgatcacacttctcgccgtgctcggagcttgcacgcacggaggatttgtagatgaaggactaagaatcttcagcaagttcgatgtttacggggttgctgctgcagtggagcattccggctgcctggttgacctcctggcccgtgctggaagattgagggaagcttatgagattgtcaagaacatgcttgttcaacccaacgaggtgatctggggctccctgctcggagcttgcagggtgcatggcgatgcagagatgtctgaactcgtatcaagtgagatccaccaattgcactcccgtcgtgtgtcaaccaacgatgcagagtacatcctgctgtcaaatatcatggcctcgtcggagaggtgggagcaggctgaacgcatgaggagaaagatggcgctccatggagttgggaagaccccagggtgcagttcagtggagctcgaggttcccgaacaccaagtacgcgcaggcagtggtacgttatcccagccgccctgaaggagttgggaagactccagcagggtgcagttcagttgatcttgacattcctgaacaccaagtacacccaggcagtgtgataccagaacatacttctgtacaggtgcatgtggcgccccgctggggcctgaacacgcatgccgccaagatcccctttctcggagacaccccgggcttgttctactacattggggatctgaagccccaggctcagcagttcatcttactgaacttcttttttaataaaaaggtggttttgagacttgagaatgataatggatcttgttgcaaggtagctttgttttccgtagattattcccttcgtgaatgctacggaacatcatcccgccatgcatccccatgctgtcgtgaacccaaacgacgttattcccttctcaagatcagctcaatggaatcgaacatgaggtacctgtttatgtttcatgcacttcagaatgtacacactgatggttctgaagaatttgaaccaaatgacctggatcaacaaagtattgacgaactaatggcagagaataacttgaaaaagttgacctttgcaagaaaggattttaaaaccgaagacgacagtgtatgcaggacttctttgccgccaccttctggttctacgccaccacctaccagtccaccatcttcatcgcacatgggcatcggttctcacactgcggaggtcattgacaacaaagaatgtgacaccgccggcggggaggggaggatgctgcacccctaccaccgcctccctgtggggagcctgctgcctctccacccgttggatctggtagaggggagggcacccctgcctcctgccacccctcctcgggtgccgtcgcctaccgcctccccttccgctggatctggtagagtggtgggcactacagccacccgcctactcccagccacggtgaccactatcatccgcgagtggtga

SEQ ID NO: 100362 - DNA, 1746 bp, Oryza sativa
  Clone ID: PAT_MRT4530_98086C.1
gttttatatcgcgagctggacaaccaactacaggtggttatttttaaaaaaggtgcttggttacaacaactttaaatttgtgtacattcaacatgctgcttactcattttaacaaactgtgaattctaccactcgtcatattgggttcttcctctgaaacaatttgctgttacagtaatatgcaggatacattatgtcttttatcgcaccattctcattcttgcattgacgctaggttttacaaagcatgaactttgaatagtctgctgcctcgttgacaatcataccaaacctctatcttcatgccaccatcttcttcttttgtttgttcagggcactgcacaatattattcccagctactgcctatgttgccatcctacttaagaagtccatatttgatgggcgtgaccacgcggctgccggcccctccagggggcggcctccagcgccgcgcgccgcggggcatcctcccggcctcgctccccgtggagcgcccggcgcggcgccgcctcgcgcccggcgtccgcgccgcctccgggatccctggacccggcggatcgcccgtccctaggcggacgacgcctgcgccggccgacgcggccgccgcggcgccgccctccgccgcggcgtcgtctgcctcctcggccatcgatttcctcaccctctgccatcgccttaagaccactaaaaggaaaggctggataaaccatagcataaagggtcctgagtctattgctgatcacatgtaccgtatggcccttatggctttgattgccggtgacctacctgctgtagatcgagaaagatgcatcaaaattgctatcgtgcatgacattgctgaagctattgttggtgacattactccatccgacggtatacctaaagcggaaaaaagccgccgtgaacaaaaggctctaaatgaaatgtgtgaagttctcggtggaggaccaatagctgatgagatcaaggagctctgggaagaatatgaaaataattcatccattgaagccaaccttgtaaaggattttgataaaaggggtgtcatgcaaaccagggttcaatctatcgggaaagggaaaattttcggagggggacaggataggagaatgaaacgcaaggattgtgtcgtcgtgtcctctctggcttgtgtgccttgtgtcgttgtcgcggtcgcggtcgcgcccgacagccgtggagccgctgctggccactccagccaaacacaaggatgcgaggtccacggcttgtgtcgccgtcgagccggagccgcggagccgttgctggcactccagcacgaggatgcgaggcccgcgccgccttgccgcttgtgtcatcgtcgtcactccggagagccgcggaaccaccgctggccactccagccacccctctgcctccagttccagcaaccgctgccggtgttgctcgctagtgctgggaggatgggaggagatgttgggggaggacggggggagaaagtttcactctggggcacatctcatttgtccttttctttgttttcattctctatttattcactatggttcaagggattttaccatttcttgtatttacttgttttgcaggtggaaatgatacttcaagcactagaatatgagaaagagcatggcaaagtgttagatgagttcttcctctctaccgctggcaagttccagacagagattggcaagagctgggctgctgaagtgaatgcgaggagagaacagagatgcggaaaacagaagtag

SEQ ID NO: 100363 - DNA, 763 bp, Oryza sativa
  unsure (1)..(763): unsure at all n locations
  Clone ID: PAT_MRT4530_98087C.1
gggctgcaggaatcggcacggcgcccggggctctccttctgtctctctctctctctcccctccctctcataaccgggccaccgcgcgtccactcccaactcccaagtcccaccgtccgcactcgccggcgggatgaggagctgccgtccccctccacccgcttcgccaccacggcaccactgctccgccgcgacagtcgctgcccgccatcgctgcggtgggagcggcggcggcggaggcaaccccgacgctgatcgacttcgccaagccgccagatctggagttctggactccacggcgccttcgcagatgcgggaatagggctccgccactcgatgaacctgctgcggccacgaacacgacgacgagctcgctggcctcggcggctggcgtcctacaggagcacatcgccccgggctacttcccgggttcccctgctccgagctcgccaccgcccccacccctcggcttcccggggcttctccctcaacctcaacctcgccggctccgagcgggtcccgttcgccatccaccacgtcaggctccctgagctctacaaacgacgggtgcacggcctccacggcttcgttcctgccaccgcgcgctctcccacggcttgcatcatcgccactgccaccaccaacagcacatcaccgccgcctccgtgtcccgtggtgcgcatcatgatccgcgaggccatcgaccactatggctntcgtgggcgctggcccatgcgcgtcaagtnntcgccgagctcgatagg

SEQ ID NO: 100364 - DNA, 373 bp, Oryza sativa
  Clone ID: PAT_MRT4530_98088C.1
aaaaaagaaaaaaaaactttttttttttttttttcccccaaagtttcacatggcaaatttgaggatttcgggccttttttttaacttccaaaccatttttttgttaaaacttattacaaaacccccccagggggggtattggtcctggggcccccatattcccttggggaaatcccatatttagagggcccgttaaaacccaacaaagtttggccttgacccaatttccgttaaaagttaaaatccccaaactgttggattttaagtttttgccctttggcctaaaaaatgttaatgtcctgattgggaaatttttgcccccccagcgcgagcttttgccaaatttggtttttttttatttaaaacccacttt

SEQ ID NO: 100365 - DNA, 1315 bp, Oryza sativa
  Clone ID: PAT_MRT4530_98089C.1
tcacgagggtcggaagtccgaatggtaggccataatcgaggcgaggcagacggggcgaaccccgggcggcggggaagacgagggtggggttgaggaagtcggaagtccgaaggcatggcagcggcggcggcgaggcagacggtgtgcgtcaccggcgccggggggttcatggcctcgtcgcacgtcgagctgctcctctcccgggggaactacgcggtccgcggcaccgtgcgggatccaggtgatgccaagaatgatcatctcagggcgctacaaggtgccgaggagaggttgcagctgctcaaggctgatctgttggactatgacagtgtagcttcagcggttgccggctgtgagggcgtcttccatgtcgccagccctgtaccctcgggccgatccaccaaccctgaggtagaggtcatagctcctgctgtaacaggcacacttaatgtgttgaaggcctgccatgaggcaaaagttaagcgagttgtcatggtgtcttccattgctgccgtgttcagtaatcctaactggccaaaggataaggctttcactgaagacagttggtcagatgaggaattatgcagaaagaatcaggattggtattacctttcgaaaacggtggcagagcgtgaggcttttgcttatgcagcaaaaactgggctggacattgtaactatttgcccatcattggtgattggacccttaatgcaatctacagtaaacgcgagtagtaaagttctcattaactatttcaaaggagatcgtgacactgtcgaaaatagactccggaatgtagtggatgttcgtgatgttgccaatgctctccttttggcgtatgaaaatccagcatccggacgatacatctgcagctcagctccaataagagtctctgatatgataaacattttaaagaccttatatccaacttatacttatcccaaaaactttgtggatgtggaagagaacaccatatacagttttgagaaacttcagaagcttggctggagtttcaggcctattgaggaaaccctccgggacagcgtggaatcctacaaagcatttggcatccttgattgaggatccaaactgtgagaacttcagtgtctgttaaactctccatgattcatgtaatctgtgttgagatcaaccgggtcaataaagaatcgttattaaaaccaccaagtgcatttccgtaaaaacaacacacaacaccaccagtgtccccgtgtgtcccggtgcctgaatcttgtgcattgacaatgcagatatatatagttgacagttgttggctcaaaaaaaaaaaaaaaaaaaa

SEQ ID NO: 100366 - DNA, 190 bp, Oryza sativa
  Clone ID: PAT_MRT4530_9808C.1
tccttgtaggatttgttgatgtagtagaggagaggtgaaaattggttctggttgtagatatgatgaaacacatgctgttgacaagggacagccttccctgtaaatgtatatgcagtaaagaaagaaacagaaaaggctaacaactacagtattataaagaaagagaatttcaagacaaaaaaaaaaaaaa

SEQ ID NO: 100367 - DNA, 1368 bp, Oryza sativa
  Clone ID: PAT_MRT4530_98090C.1
atgggagcctaccactaccagcccgtggtgtatcaccatccccacaaccagaaaccatccggcaaaaatccaggctacttcgtgtccaaacacgcctgcgcttggctcggctgcggcttcctctccctggctctccttcacctcctctgctgcgctcccgccgccactcgtcaagccgccttctctcctctccgccaatacatcaacaacacctactccttcgtctcaacagtaccgggaggagggaagagctgcaactattcggaggggagttgggtgtgggcgccgggccatggacggcggtacaacgccaccgggtgcaacgtcaaggagagccacgactgcatccgcaacggccggcccgacaccggctacctcgactggcggtggcagcccgcggcggccgggtgcacgctgccggcgttcgacgccgggtcgttcctcgcggcggtgcgcggcaagcacgtcgcgttcatcggcgactccatggctcgcaaccaggcccagtccctcatctgcctcctcaccgccgccgccgccgacttgccccaccgcctcgtctaccgcggcaccggcgcctacccggacaagtacaactactggcggtacgcgttcccgtcgcacggcgtgacggtgtccttctactggacgccgttcctcgtcagggcggagggcaagtcggtggacgacggcctccgccacaactacgtccacatcgacgagccccacggccggtgggcggccgacgccggcaccatcgacgtggcggtgctcgccgccggccactggttcctgaacggcgccgtctactacaacggcagcggcgaggtggtcggcgtccacaacgccccgccggagttcgccaaccacaccctcgtcggctacgcgtggccgctccgcgcggcgttccggtcggcgattgagcggctgctgacctccgggcggccgcggccgcggaccctggtgctcgccacgttctcgccgtcgcacttcgaggggaagccggcggagaacccgacgtcgtgggtgtgcaccaagacggagccgtacagggagggggagaaggagatggcgtgggtggtgaaggacacgaggggcatcgtctacgacgtggtggacgccgcgagggcgaggtatggcgatgtcggcagcggcggcggcgcggtgaggatcgaggtgctggacgtgacgaagctggcgtcgatgcggccggacgggcaccccggcgtgtacatgaaccgtgacccgttcgcgaacggcggcgtggatgagcagaagttggtttccgattgcctccacttctgcttgcctgggccggtcgacaccttcaacgagattcttgtgcagcttctcaagagaggccggtga

SEQ ID NO: 100368 - DNA, 363 bp, Oryza sativa
  unsure (1)..(363): unsure at all n locations
  Clone ID: PAT_MRT4530_98091C.1
ctcgctcgctcgccgcctacnnctcagccgtccccttctccggcaatggcaacccaccaccaccaccaccaccaccgccctcctcctccgccgtctccccgccgcctcctccgcnccgtctccgtccccgcgccgccgcacccacgccgccgcccgcgcnctcccctcgcttccctccaacccccanngcctccccttcctcctctccccggcaagcgctcttccgaccccgtcgaggccaaccgcgagtnggcggcggcggcggcggcggtgttggaggaggagaccggagcgagggaggaggaggaggggtangttgcgaacgtgggaacaggggcgtaccccgnttgccggcttccggtg

SEQ ID NO: 100369 - DNA, 2349 bp, Oryza sativa
  Clone ID: PAT_MRT4530_98092C.1
atgttctctccccctctctctctctccctcttcgttctcctctctctcacgacccctcctcacgaccgaacgagcaagcggcgggtgcggcggcggcggcggcggaggttcttgccgccgacgcaggtagtgatgatcaagactagcgaagctgagaggaggtttcctgcttgtttggggaacaggaagatggatgcagtagataagcttgtggtcagatttcatttcaatggtgaatttctttttgatggcaagaacacatgttatgtcaatggacgtgaagcattgtcttacgttgaccgcaagaaggtttcccttaatgagattcgtgatcaagcaaaggagcattgtgaggttgcagaaaaggcgttgtttcactggtgttttcctgggaaatcaatagacgatggactcagggttttgcatgatgataagacttgccttctaatggcaaagtataccacacaaggagttgtggcagatgtttatgttgagttggttgatattgaggagatagatactgaggcaaacaaggatgaagttggtagtgattttgaggatgagatgaaagaaattagtgataacgatgatttagatgacaatactgtagaactgattggaggtaatgaggtcataatgataaattcttcaccaactcatgtaaacaagaatgatatgtgtggtggaaagagaaaggtgttcaagacatctagtgtaggtacaaaaagtaatggagatagtagctcagacagtgagtacctacctggtgattcatcttcttctggtgatgatgaagaggctgacgaaattgagaagacattcaaagagtttaagaggaaattcaaggctggtcatgtttctgagcttgatgagattacatgggctggtggggctgaaccaagtaggggtattgtgccgtatgtgctagaggaaggacatgagaccccatattatgactcaagtgatgatgaggcctcttttgatgaacaaggaagcagtggtgagttggaagaaaacaagcttgtcacttcaagaagaattgctgagaagtatgagaacctgatcaaagccaatccacaatggagtttgaatcacattcagactactataagtgaggagatgtttgccaatgttagtatatcgaagatcaaaagggcaaaagctttagtgatgaagaaaatgtttgatgataagaagggagaatacagtttggtgtttaattatcaagaagaattactgagaagtaatcctggaagcacagtgatggtaaaactagacttagatgaagtagaacctgtgtttcagagattttatgtttgttttgatgcttgcaaaaggggcttccttgctggttgtaggaaggtagttggtttagatggctgttttttcaagggagcaaccaatggtgaacttctttgtgctattggtagagatgcaaataaccaaatgtaccctattgcatgggcagttgttgagaaagagaataacgactcttgggactggttttgtagcctcctcttcagagatttgaaagttggttctggtgaaggatgggtgttcatatctgaccagcagaagggtattctgaatgcagtccaccattgggcacccttagttgaacatagaaactgcgcaagacatatctatgccaattggaaaaagaaattcaggaacaaagagtggcaaaagaaatttggagttgacaacaacatgtgcgaatcgttcaataagtggattgtgcaagccagatatttaccaatcattagcatgcttgaggccattagatgcaaagttatggtcagaatacaagagaatagagacaaggctgctaagtggaatactctaatctgtccaaacatatacaagagattgaagagttatattacagagtcagccttttgccatcctatttacaatggggatgatagctttgagctagctgtacctggatcacaacagagctccactagttgccacaaaaggaaggcaaatgcatcagctagagcaatttctacagagaaggcaaagagaacatgcactggtcttggtttacaatctaggaagtcttcacaggatacagtcaatcttgacatcggtaagaggagagtgataaggacttctgccactgcaagggtggcaacaattctagggggaacagcaacaatgaacctgcatgctcatggacgatcagcacatgcctcatcaaatgtgaccattaccgtgacttctggaactgcaagtgctcatgtgcaaactcatgaaccagctcctagaagcaattcaccacaaagaaagagaaggctaccacaacttctactatcacccccaagatctgatggcaatgagtag

SEQ ID NO: 100370 - DNA, 776 bp, Oryza sativa
  Clone ID: PAT_MRT4530_98093C.1
cggcggaatggaggagcggaggggatgccggggtacgacatgacacagcgaagccgtcggtggcggttgcgcggagcggtggtggcgggagcaacggtggcgaccggctagagggcgtcgacgggcggcggagctcgggcgcgcgttgcggcagtgtttcggaggcggagacgggaaaaggagtaggggccagggtgtggcatggcacggcgatgcaaatggtggtggcggcgtggcgcgacggcgtctggagcggcagtggcgtgcggctggaagcacggcggcgagcggcggagctcgggctcgcgcggggagagcgggagaaggcccgatgggctcaggaaagttggggaaacgagcgaggggagtgtggggaggagttttatgggcgcgggagggcgacagtgggctggggcgatgcggattcggggcggcaaccaccggcggtgtggggtggcgacgtgggcgcgtggcggggcaaaccggtgccgttttcttggtggaaaattggtgaaatggtggaggaggtggtgggggtgcagttccaccacttgggcgtgagcgggaggggcggggtggtgcttccattggacaacaatggcgttgactctgactccgactccgggcttgcacctgagcttgtatctattgttggggacactgtcgttgcatctactgcattggactctgcggtggctgcatcaatctatgacacattgttggtaattcttacggtcacagataaaatccgcaagcgcacggatataccgatgtag

SEQ ID NO: 100371 - DNA, 334 bp, Oryza sativa
  Clone ID: PAT_MRT4530_98094C.1
tttaataattttttttttttttttttttttttttttggttttttttaaattttttttgggtttttccccttttttttttttgggacccaaaactttgggagcccttggccccttttaacaatttgattgatttgggaggagcacatgggacaaacaccaattttttaaaaaggtttaacttccaaaaaaaacaaagcccaaaaagggttttggaggctaaaatggtttgatccaaggcccggggttagaatgaatttgctgttagggccctcctgttcccggtggctttttaaaaagggggttcagccccttaaccacaatggtcaaaattggg

SEQ ID NO: 100372 - DNA, 819 bp, Oryza sativa
  Clone ID: PAT_MRT4530_98095C.1
gcacgaggccaccaccggtttcactgctcgatcgcaacagcatcgccacaagtccgcaataaaccaccacacaccacgtaccggggtggccactagtctcaggcggctctcaagctctcaagctactcgctgcctaccagtatggggaacgccgcgccgcgcgtgcggcgccgcgacgagcccgcggcgaagagttggtccaagggcgcggaggctgccggcgagctgctgccggtggccaaggccgcgggcggcgaggagaaggcggcggccgagcgcgcggtcgtgacggtgaaggtggtgatgacgaggaaggaggcggagaggctcgccgcgcggctgagggagcagagggcgagggggcggaacgccaggatggcggagctgaagaacgcgctccgggcgggggacggcgccctctgcggcgccgccgcggcgaggcctggtccgcgcggccgggcgcagagcctggcgccgatccaggagagttgtagaggcttcggagttttggggagtttggagtggcatccgttttggcgtggaaaacgaaggacagctggggacaacgagagcgacggcgacgagtgtacgtggtgctttgcccacttgaaaacagcagttaaaactttggcatccggagttcttatctccctccctctgaagccgccgctatcaagggcgtcgcaattaccgacttgttcaaagtttatcgggaaaaacatcatcaaaatgcatttgacggttgatgatgtcttcttaagggttagcgtgacagagctggcaggatggaagtgcgccagagaagctacaacattttag

SEQ ID NO: 100373 - DNA, 563 bp, Oryza sativa
  Clone ID: PAT_MRT4530_98096C.1
ccccgagtaagggaaaggcccccggctgctgcttcgtcgaccggggaggaccggacgtctccggagaaggaggaggccgccgggacccgcccggcgctgctgctccagtatctggaggaccagatggagctcgtcggcggcggcagcggcggcgagccggaggaggccacagaaagcatcggccccaattggagacgagcatcacgagcttagctaagcttggagatcaagattaattttacgatttttttttgttgttgtttgattgatgatatgctctgcttcttggaggaaaaaaaattcgttacatgccaaaaaaaaaaaaagaaaatatttcattttctttgctcgagtttttttttttgttgctgcagtagtagatatatattattaggagaggtgttgttgagagcatgtgatctaggagtatttgattagatgattcatgcaggtgatgcctgacagcttcatctgttagacaattggattgttcctctgccctgtttatctggattgggagttgattgttcctctgccctgtttagaaaaaaaaaaaaaaaaaa

SEQ ID NO: 100374 - DNA, 588 bp, Oryza sativa
  Clone ID: PAT_MRT4530_98097C.1
ctagccctgcgtcgagctctgggtaccgtcgatgcccggggccccctgtgctagctcttccgtagcggctggctttggccccgtcagctggttacgacgctcagcgtcgacgcacggggccccctgtgctagctcttccgtagcggctggctttggccccgtcggctggttacgacgctcagcttcatgtcggtgatatgggcccggggtatcaggtttagagggaggaggctgccccccgatgccacgtagccctcccccgaggggagtcaggcccgaggtggggtggcggccactccttccccaaagactagttggaggaggctgccctccgatgccacgtggccctcccccgaggggagtcaggcccgaggtagggcggcgaccactccttcccagagactggatggaggaggctgccctccaatgccacgtggtactcccccgaggggggtcgggcccgaggtagggcggcggccactccctggccgagactagagggagaaggccgccccaggcgccacgtggctccccccccccccgaggggggatcaggcccgaggtcgggcgtcggccgccccctcccat

SEQ ID NO: 100375 - DNA, 851 bp, Oryza sativa
  Clone ID: PAT_MRT4530_98098C.1
atgctggaagagaggaagctgttcgtggcgggcctcccgcagcagacgcgggagggcgacctgcggggccacttcgcccggtacggcgaggtggtgcacacccgggtggtgctcgacatggccagcggcaacagccgcggcttcggcttcgtggagttcgccgacgaggcggcgacgctgagggcgctcgccgacgacgagatgcccaaccacgtcttccgtggccgcaagggcggcggctactccttcccagagactggatggaggaggctgtcccccgatgccacgtggccctcccccgagggggagagtcaggcccgaggtagggtggcggccactccttcccagagactgtatggaggaggctgccccccgatgccacgtggccctcccccgaggggagtcaggcccgaggtggggtggcggccactccttccccaaagactagtcggaggaggctgccccccgatgccacgtggccctcccccgaagggagtcaggcccgaggtagggccgcggccactccttcccagagactggatggagaagactaccctccaatgccacgtgtcgggcccgaggtagggcagcggccactccctggccgagactaaagggagaaggccgccccaggcgccacgtggctccccccccgaggggggatcgggccccgaggtcgggtggcggccgccccctcccgtgactaggggtcgggctttcccgaccccctctccacatttatggcgtcctgagcggtcgcgccacgccgcatttaatgcggtgtgcagtgcactcaaccggtctgtgaccggtcgaatgactgatgggacccaagatgtcaggcgcaccat

SEQ ID NO: 100376 - DNA, 447 bp, Oryza sativa
  Clone ID: PAT_MRT4530_98099C.1
atggtgcgcctgacatcttgggtcccatcagtcattcgaccggtcacagaccgagagggggtcaggggagcccgacccctagtcacgggagggggcggtcgttgcccgacctcgggcccgatcccccctcggggggagccacgtggcgcctggggcggccttctccctctagtctcggccaaggagtggccgccgccctacctcgggcctgacccgtcgggggagggccacgtgatattggagagcagcctcctccatccagtctctgggaaggagtggtcgccaccctacctcgagcctgactcccctcgggggagggccacgtggcatcgagggcagcctcctccgactagtctttggggaaggaggtggccgccgccctacctcggggctgactcccctcgggggagggccacgtggcatcggggggcggcctcctccctttaa

SEQ ID NO: 100377 - DNA, 2109 bp, Oryza sativa
  Clone ID: PAT_MRT4530_9809C.1
atggctaaggatgaacctctgatgtcggcagcttcttatttctggtccaatgccatgaatggctttctgtttaaacagggaccaatgaccccaactttgctagacataaccatgataactggtttagacatcacttcatcggttaatccagtcggcttgaataccaaaaacaagtttgacttcaaaaccaggagcataggtggttggtcagggtttgtctcatcaaacatggggaatggagctgttactccaagagaacacacagcattccttctgatgtggctagaaaagtacttgttctgtggtccaagctgtggcccaactgtaaactggcaacacatagccgagtccctagtagaaaaaaaaggatttccattaggaaaatatctattaggttatttataccaaacactgaactcaacatcggctagaattgcttctggatcagcaatcgacataggtggcccttggtggcttcttcaaatctggttgaatttgcatactatgaaagttgtcgatagaccagccctgacagaagcagatttcccaagattcgaaccaatcaccgatgaagatagggaagaaataaccacatgccgatgcatgtcttttggagaggcagcatcaactaatgctggatccaaactgtcagccgatcctttcagagattggtttgcaagcttctacaatgggttccccagggattcaatagtttggtttgcatatgccgattctgatagctttgaacttccctcggacttcagatttgatgacattaattctgagaagtttgataagtctagagaagttttcactactgctatcagcccttgcatactctcagttggcatacatcagggtagaaacatccaagtttcttacgaattctatcaccccatgagtgctgccagacaacttggattgggacagctgccaattggtttgtattttgccgacaagatccagcatagaggggaaattacattggcattaatgatggatcggctgctaagcatccaaggacctccccttggaagtattgataatattgagctagctttgctcaggagcacaacatttgaccgatggtgggttgaatggaagaaacatttatttcatcaatcggtttccatgtatctcactaacatattccctgatgttatccctcaagccttcttcctaatggtggtggactggctcctcctgtcatcggcttccatgccccccaagacaacaagtttgcttcaaggacagatgagagagcctatcccaatggataccggaaagaagaaaagaaccaagccatcggttgtagatccatcggctaccaagaagaagaaaacaaataagcaaaaaactttagcaaccgatgatctaccaactgttgatccagatgtcgacaaatttctggatgatgaagccatggaagaagacattgatgcagctgctgccgaagtcagtgacactagagaacaaacacctcctgccgataccccagctccacaaagaattcctccggcaccacctcaactagctcggcatcccaggcctcctcattctccaactcctgttcagcctgaatcaagtgaacacaccccatcggctgtaggaagtcatcatgtagaagatgcagcagctccaactcctgctgtccctgttttagccgatatgttctcttttgacataagacaattctgggatgaagaagaagaagacacctcaagcaaagccttagctcctctagccgatgatgttaagagaactcttatggaaatatcaaatcggctagagaattccttggatgtcttggtagtcgattgtggatcaatcagggcctggttccacgaaattcaaaatatgatcccagaagacttagccactacgctaactccagctttttatcttgaacaacatcaattcaagttggagaaagcaagacaaaggatagccaataggcgagaaagaaaagatatagaggcaaccatccaagtcaatcggcaatctgtcaatgaggagaaagccaacctagatcagctatcttttggcccttgtcgggaccccaattacgatccctctgtgtgtaatgtgctagtcccagatcaacgctag

SEQ ID NO: 100378 - DNA, 273 bp, Oryza sativa
  Clone ID: PAT_MRT4530_980C.1
gcctggaacaagaagggtcgtcgtacaatttcggcgattcaaaaaaagaaggaggcgagctccctatccctctttggggtgcagacaggttcgtcgggggttatgcaagcttcagaggtggggggtacgattgtggaagatcgcgtggaggcaggggttggagatgtgatgcaaggatgcggggaattgggtggaaggacagtcgttaatgtggagtcaggtttgacgggcgtgaggcaagaagtggagggaagtgggatctagattagaaga

SEQ ID NO: 100379 - DNA, 250 bp, Oryza sativa
  Clone ID: PAT_MRT4530_98100C.1
gtcgtttcaaggcatgccttgtttcgaatcttgttgttattgttatacatcgctgttgttgctaatagtgcaaccagaatgtagtgaagatagtaaaatcaagagacgtgaaactgatgtactgatgcataattaccatgtgaaatcctttattgggtattataaaaaaaaaaaaaaaaaaaaaaaaaaaaaaaaaaaaaaaaaaaaaaaaaaaaaaaaaaaaaaaaaaaaaccaaaaaaaaaaaaaaaa

SEQ ID NO: 100380 - DNA, 312 bp, Oryza sativa
  Clone ID: PAT_MRT4530_98101C.1
atgcgcgtgtacggagctatggagtcggcggcagcacggacgacgacgacgtcggcgtccgtcttcgtcttcctctgcttgctgttcgccgtggcggcgctgcagtgcgccgccaccgtcgacgccgcgaggcagctgcggccagcagctgacgacggtggccgccgggcggcgccggcgttagtccagagccaggacgcggcggcgtacgccacgctgcgtgagaggtcgccggcgaggtcgacgacgacggtcatggcgtggacggcgcagctcccggccgggccgagccagaaaggccccggtcactag

SEQ ID NO: 100381 - DNA, 462 bp, Oryza sativa
  Clone ID: PAT_MRT4530_98102C.1
gctacgacaactctcctcctggattcggcaacaactcccctccgctgtacgggtccatgtcgcctccgggttacaacgacaacatcggcgccgccgcggccatggccggcagcaaggaaacactcctgtcgctggcgtgcgtcgtcgcaacggtttctctgaacctgtacaagtgagaatccaagctgctgtttcacgattcaaatctgtagaaactgcacggctttggtggatgttttggtactcgcacagttgccctgatgcaagcagaaagcagagaaatgaatgtgcagaatatgttttggtcagatgagctaggagaagcaggccggcaagattgatagatagatcgacttctcctagctgtagaaatagtagcatgtggtgctgtatgtagttactagtagtaatcagtaagaacattgagctgaacttttgcgttcacctaaaaaaaaaaaaaaa

SEQ ID NO: 100382 - DNA, 153 bp, Oryza sativa
  Clone ID: PAT_MRT4530_98103C.1
tcagcggcgggccacggggtggctacgggcgatgggatggctgcgggcgacagggtggcggatgatggggccacggcaggcgacggcgcggccaaatccagcagccaggtgcggaggcgccgccgggttctcttttccgccagctgcctccat

SEQ ID NO: 100383 - DNA, 309 bp, Oryza sativa
  Clone ID: PAT_MRT4530_98104C.1
atggcttcagctcgggagcttcttgcagccaccatctccatcgtcatgtcccttaccggtccgatagaggaggtgaagaagcagatgctggtgctgacaaaggtgaagctgattgagggaggccggcggagtggcgatgggcaggcagcaggcccgtgcagcagcggagtggcgatgggcggtggcaggcagagcggcgccgggctgtgggcggagcggaggcgggcgaagctcatcttggggcagctcgcgggatcatggggcggggcgcatccaaagcgcacattcagatcactatttgtggaatga

SEQ ID NO: 100384 - DNA, 493 bp, Oryza sativa
  Clone ID: PAT_MRT4530_98105C.1
tggacgcgtgggcgcgtgtcgtctttgcgttgtgcaataggtattgctggaaaggattcacaacttactagacctgattcacgtcctcgttggagcacgcaacacattgcgttacgcctctcgctgacagcaaccatggcagactatttcccggcgccggggcggaaccatctgtttgtgccaggtcccacaaacattccggacaaagtgatccaggcaatgaccagaaacaatgaggatcacagatcgcctgcttttcctgcgctcagcaagacgtgcttagaagatgtcaagcagctctttggaaccaagaagggccatgcattcattttcccgtccacaggaactggtggttgggagagcgccctcacaaacactttgtcccctggggacaaaattatctcctttcgtgtggggcaattcagcctgctatggattgaccagatgccgcggctgaatttcgacgttgatgtgggtgacacgtgatggggcg

SEQ ID NO: 100385 - DNA, 171 bp, Oryza sativa
  Clone ID: PAT_MRT4530_98106C.1
gtgatcgaggaattgaggcgcacatcggaggttggagaccgaccatccatgcttctagcacccgctatcttttattctttctaccttcattcacagatggacgcactccatgctgctctctcctgctctctattagatttcttgacctaatgcacatcttcatttctccat

SEQ ID NO: 100386 - DNA, 661 bp, Oryza sativa
  unsure (1)..(661): unsure at all n locations
  Clone ID: PAT_MRT4530_98107C.1
ggggccgatggatccgccgccggcgacgacgctaggcgacgggggcgacggatctgccgccgatgacgacgccgagcggtgggggtgacggatccggtgccgccgctgacggatccggcgccggcgacggcggggggtggcgggagcgatggatccgccgccggcgacggcgtgcggcgtggatgcggcgctccggtggcgggctagggtttggtttagggttttttcgattttttttgtttgcttaatttattttcgcatgcggccggtataagcaaccgcatgcgaaaataggattttcacatncggttgcnccgnccgccatgccaaaagggtgatttttacagacgatttaccgcatggaaagatggttctcagccgtatggaaaaaacatatctgtagtagtgtatgtaacgtgatactatgatagacgtggctattaaatacgaatcaggatctgtcctataactgaaaacctacagggaaatgcgattaaaccctgtcagaaattatttctgtcgttgctttcaagcctgactgaaaaaaaacatgaatagatccttttttggtttaaaaaaaaaaaaattaaaaaaataaatttaaaaattttatataaaaatataatattaaaaatattaaatttaatatattttattaatt

SEQ ID NO: 100387 - DNA, 565 bp, Oryza sativa
  Clone ID: PAT_MRT4530_98108C.1
cacgagggttgatgattcgtgataatatcattcgatggtaaaaataaattaattaaatattataaggattgcaaatcaaatttaaattcatttataacaaagtttacactaccatttagaagctcgggaagcatatatttactaagtcatttcattccttgcaaataaatataatttcagaaaatacaatttaaaagcttggaaaacataaataagtataattgaattttaaaaatcattatagttatcctgttattttattcctcgcaaaaataacagtgtcgggtatagttgtgacagcagtgcaaggatgggaatgttgataatttaccgcaatgaaaaacagttcgacgtgtgtatcagtgtagagctaccaagcagagcatcatatcccagtgacatacggtgaagtcttaaaaaaattaacttctgactagtacgaatcttaggttggtctaagtttgtctgatctgagccatccgtagaagggatcgatggttcagatggagcagaatgtaggcattattagttggaagctaacatatgatgaggcgtgggcgtccaa

SEQ ID NO: 100388 - DNA, 1622 bp, Oryza sativa
  Clone ID: PAT_MRT4530_98109C.1
cgggctgcagcggtccggcccgcggccgacaatgacgacggccgcggcgggggcgacggatccgatgctgccgccgacggatccggcaccggtgacgacgatgggtggcgggggcgatggatccgccgccggcgacgacgctgggcgacgggggcgacggatccgccgccgacgacgacgccgagcggtgggggtgacggatccggtgccgccgccgacggatccggcgccggcgacggcggggggtggcgggagcgatggatccgccgccggcgacggcgtgcggcgtggatgcggcgctccggtggcgggctagggtttggtttggggttttttcgattttatttttttttgtttgctcaatttattttcgcatgcggccggtataagcaaccgcatgcgaaaataggattttcgcatgcggttgcgccggccgcatgcaaaaagggtgatttttacagacgatttcgtccatgcggttggcacaaccgcatggaaagatggttctcagccgtatggaaaaaccatatctgtagtagtgtcgcttgcctcgcccttgtgctgctgctgccgccgcctgcccaagcggcgacggtggtcacccacctgccgggattcgatggtcctctacccttctacctggagaccgggtatgtgggcgtggaggaggagaccgggacggagctcttctactacttcgtggagtcggagcggagccctcacagcgacgtcgtgctgctgtggctgtcgggcgggccgcggtgctctgtcttcagcggcttcgtgtacgaaataggccctgtaatgtttgtcgcggaacgttacagcggcggcacggttccgcggttggagtataatccgtattcctggacgaagttggcaagcattctcttcgtggactcgcccgttggttccggtttttcatatgcgcacgatcccaaaggttatgatgttggagacatatcatcttctatgcaaattatgaaatgtctacgatagtcgctggatgttcatccaacgcgcgttccccctcggtgcatagaaggacatttcaacgtcaccaccaggggttaccgtgctcttgtgtacagcggagaccacgaccctattgtgccattctcaggcacgcaggcatggataagatcattaaacttttccattgttgatgattggagagcatggcaccttgatggccaggctgcaggattcacaatcaagtatgctaacaacctgacctttgcgacaataaagggtggttgccatattcctcccgaaaatcggcctaaggaatccttcattatggcaaaacggtggctggctggtggacccctctgatgtgccgtcgcgcacaatacggcatctctgaattcagattccgatcatcatcaacatatgtaatgtgctcattatattgagtaaatcaatataactagctggatggcccgtgcaattgcgcggctatgtagcgcccgtttcgtcgtggcgcctagcgggaaaattatctcataaaaaccctaattgcgaaattgtttcaatgcttggtatctccaacacgcataaccgcaaaattctcgcgacttggtctctctctcccacaccagttgctaaaaaaaaaaaaaaaa

SEQ ID NO: 100389 - DNA, 5148 bp, Oryza sativa
  Clone ID: PAT_MRT4530_9810C.1
atgggggtggagtggagcgtggtggacgcggcgatagggtggctggtgcagagcgtcctggggaccctcctcgccggcaagctggaggcctggacgcgcgaggtcgggctcgccggcgacgtgcggaggctcgaggtcgggatgaggagcgtcgagatggtgctcgccgcggcggccgcccgggggagggagctcgtcgggaacgagccgctgtcccgctccctcgacgacctgaggcagctgctgttcgacgccgaggacgtcgtcgacgagctcgactactaccgcctccagctagagatcgagcagcgcgaggacgctgctgctgctgtggattcttgtgttgagggaggcaatgcatcttccttcagctccacctcgtcttctacttgccgtcttgtatggaatgctgccactaagcttacttcttgggcatcaatggcagtagatttcgtcatggcccatgccggaagcaaaaggaaaaggggacaatatgagctagcacaagatgatgccactgttgtggttgtgccgttcgaaaacaaggatgatatctctcgcaggataaacgagatagcaacctcgctgtgcacaattagtgattctgtgcacaaggctatccatttagaggcctcttactgcattgcggtaccaaaagaaggcgtggtcagcaacagacgactgacaacttcggtgccagttgaacagaaggtgtatgggagggatagtgacagagacatgatagtggagcttctggtaaatgggaaatccagggacctgaatgttctgccaatagttggaaatggaggggtcggaaagaccactcttgctaaatttgtataccgtgatcgaagaatcaaagatcattttgatttgcaaatgtgggtttgcgtatcttccatcttcgatgaggtgagactaacacgcgagatgctagagcatgcctgtagagacaggcaggattgtgagaaaataagcagctttaatgtgcttcaggagatgctcatgggcagcgttagaaacagaagatttctgctcatcttagatgatgtgtgggaagacaaggataaaaacggttggaatagactactaggtccattgcgccagaatcaaacagtcggatgcatgattctagcaacaactcggagcccctctgttgccaaaaagatcagaacactgacctcagttgaattgaaaggtttggatgacgacaacttttggttgttcttcaagcaatgcgcatttggtgatgagaaccacggggatcatcctagtttgcaagtcattggacaacaaattgtgaaaacactgaagggttacccactagctgcccaaagtgttggtgcacttttgggacagaatcttaactatgagcactggtggaaaatccgggaccaatgggcatctctacagaaaggtgatgatgatattttacctatcttaaagcttagttatgattatctaccatcttgcttgcaacgctgtttctcttactgctcattgtttccacaagagcataaatttgatggggaaaagttgatttttgcatggatttcacaaagctttgtgtcttgcaaagatacaaaaaatagagtggagcaaacagggagggagtacctggacaaattggtggatttgggcttcttccagaaagatggcccgcactatgtcatgcatggtttaatgcatgaactagcacaggcagtttcatctaatgactgtgccactattgatggtttgaagtccaattcgattccttcaactattcgtcatctttcaatcattacctctgcttatgatgaagttgagcatgacagttttcccacagataagtttgagagacaattggagaaaattacatgtttaaaaaaactgaggaccttgatgttctttggtcatggaccctacgggagcagaaatttgttgaaatgtttactaacattatgcaaacatgcaaaaggtctgcgttacctaagagtacactttgcatttatgttaattgatgctctctggaactccataaagcctttccatctccgatatattgaattttttaatggaagtatcactttcgaaaaatcttgttggtgggaaacagaagatggacctcgtatctacaacgtcgatcctcaaggttcttccagcaatcttgtacctaggcgcataaataatctggtcaacctacggcatcttattgctgataaggaaaggcactcggaaattgctaatgttgggaggttaacgtctcttcaggaactaagaaaatttagagttgaaaatgttgatggttttgaaatcggacaacttcagcaaatgaatgagctcgtaagtcttggaatttttcaacttgggaatgtcaagactaaagaagaggccaggagagcaagactgatagacaaggactacctagaaaatttgtgcttggtatgggatgatagtaccacaaatttgaaacctgctatggcaacagcagaggaggtcttagaaggtcttcatccaaatagaaatgtaaagcgtatcaaaatccggggctacaatggtgctatctgccccatgtggcttgggagtaatgtttctgtccctttacttcgatcccttcacttaaagaattgtagtgaatggagagcaattcaacttgaagagatttcttcacttggcaagctgaatttgatccggatgtggagtttagtggatgtctcaattccttctttggatgaattagtgctaattgatttgccaaacttggaaaaatgtattggtacatataatagggaattgacttctaacatgagaattctgaggatggagagatgtgacaagctgaaggactttactcttttcctgaactatgatcatttcagagttgagcggaagacatggcaatggactatccttccatttgaagagatgcattctcttaaggacttaaagttgattgcgatgcctggtgttagagaagtttcagttccttacctgaagaagttggtcataagaaacatgccaaacctagaatgttgcacatgtgcgaacctcgacctattatcttcctgtctagaagtactgaaaattacaaaatgcagaaaattgaccagttttcaagtcttgcaagttttaccaccccactgtgaggagaagacatggcttccaaacatgaataaactcaaagtgcacagttgtcctcattttatagtatcatgcccttttccaccttctgcagaattgtccaaggtatctgtatccatccgaggagttttggctcctcctgcaatagaaatgcgtaagcattggccactctttacaatcaagtcttatgagtggagtgtcttgaatgatgataccgtggcattcaacaacttgacaagtatactaaacttccgcatcataaattgccccaatctggtctctgtttcgtttgaagcgttaagtcagctcatgtctttacagagcttggaaatcgttgactgccccaggttgctttggccacagatgatgctggaagaagcatgtgaaggaaagacaaagtttccatctatcacacatctatcaattgtgtcatctagtatgctgggtgatccattattgcttccatgtacacagtctgaacagctgactgtaaatgacaaaccttcaacattcagttgtcctgtagaagagcaaagcaaccatctgtctttactatatatctcctcaactactactacagcaacaacagagtcgataagaaacggacccatactatttcatatgccacatcttctctacacatatgtcaaaaagttgcacatatctgactgcccaaatttggttttttgcagcagaaaggttggttttgcgggattcacctcccttgaggagttgacagttaccagatgccccaaattactcatgcccatggtgcatgaaggtgttagtgatgatcatataggtgggaggtttctccttccaccattactcaaccaatttgagaccgatcatctctcagaaaagctccagctctattttccagagaaccatacctctctcagaagattgtcagtgtgggacagccctagcctgatatgcctacagctgcattcttgtacaaagttggaggagttggaaatctttaactgtaagaacttgtgtacacttgggggattgacatttctcagctccctaaagatcatgaagcttgcaaggaatcccaagctgtccacttcatgggaatttgactcacaggatcaacaatgcacgggagatcaggctggagatctaagcattttatctggactggaatggcttgagactgatgacttctctgtccttaccatgtccttcttcaaacacctcaactccctccaacacttgacgctttcaagctcgcgaagttattggagagtggtgagactgtcagaggggcaagggagagtgcttcagcagctcacccacctccaggagctcagattcctctgctgcgatgatctcctcgtgctgcctgaacagttgcattgcctgtcctccctcaagaagttggagattggctactgtccgggtatcttacgtttgccggaagagggactccctcttttatcacttgaagaattggaaaccagaggctgcactgaggaactaaataggcagtgcagactagcagcgacagaaaagctaaaggtcctaattgatgggaaaccgcggctgtctgtcattgcttgtgcaatcgcactcaaccgctgctggacggcggacaggttaagcatcaggggcttgcttcaccccagcatgtgtgtcttatgcgatcagcacgaagaaagcatcgatcacattttggtcgcatgcccagaatcaaggcagctctggtggctactgctctcggccatcagtcgcccggaatgcttgcccgtcaatgaaatctcattccattcctggttgtgtgacaagagggaaaccttcccaagctctcaacggcgaggtttcgataccattgctacactcgcagcatggacaatttggaaggaatggaataacagggtgttcaatcagaagcagagaagctggacagaagtggcaagggcaatggcagaagaggcagcgctgtggcggctcaccaatactgccatgccggccatgcctttaggccgcttaggtcgcaacattgtgtcgcgagaatag

SEQ ID NO: 100390 - DNA, 4425 bp, Oryza sativa
  Clone ID: PAT_MRT4530_98110C.1
atgtcagaatgcgcaacaacagcacggatgaagaggaaagaatacatgcaactcaagcggggcatgaagcgtgcaagaactgatggaaatgaagaaaaaggaagagctgatccaacttacatcagcaatatggagttgaaaaatacccttagctggaacatgacctggccaaaatgcatgtgccgactttgccaaggacccaacggaatttacaaaaacatcaagaatgtagtggaaccaaaatactgcaatattcaactaatgcaactcaaggaaccatcagttataaacagtgcaataatatacagccaactgaagaaagcaaggcgggcaaaagaattagcaaaaatagcaagaatgaagaggaaagaacagaacacactcaagaggagcagaaaaggaactagaaccaataaaaatgtaataacgaaagagatcatttccagtgatagtaagatatggaactttggggggccaacatgcatgtgccaacactgccatgcgcttatgtggcatgcagaaagatcactacattcaacagtcaaacagccatcctttggactctgctgcaagcaagggaaggtagcattgccaccgttaaaagaacagcccccttaccttacgagtttattgacaagagatggaggaagatcaacaaactaccaacagaacattagatcatacaattcgatgtttgcatttacatcaatgggaggaaccgttgacagaaaaataaacaacgggcatggaccttatattttccgactgaatggccagaatcaccatcacataggaactctgctaccagaaggtagcaacaagcctcgcttccaacaattgtacgtatatgacacagagaatgagatcgaaaataggattgaagcatcaaaatctggtgcaagtaatgccccattagaccaaaaaactattgccagcctactaaaaatgcttgatgagaacaacacactagcccagacattccgaatggcaagagatagatttaaagaagatgactatcacaattacactctgagattacttgataatagggatcaagatggaaggcaagacaatatgccatcagcatcagaagttgctctcttgatagtcaaagatccgaccaaaaaaagctatggacgcgacattgttcttgagtacaaagatatgagacctaaaaggatatcagaaacccatccaaaattaatggccatgcaatacccactgctcttcccttatggagaagatggttatagacctggaataaaatacagcggaaaggaaggtgtaagaaatgacaagaaatgtgtcactatgcttgaatattatgcgtatcgcctccaacagcgccaagaccaatcaatgttgccactgatgtgtggaaacctctcaatgcaatacatggtcgatgctcatgcgtgcatagaacagattaggctcaactggatcaggcaaaatcaaggagttctaagaacagaactttatggtgggctacaagatgcactcagaagaggagacacaagaacagagcaagtagggaggaggatagtacttccagcaagtttcacaggaggtcctagaaataaagagcaaaactaccaagatgcgatggcaatatgtcgttgggctggacatcctgacttgtttgtaacattcacatgcaacccaaagtggccagagatccagtgcatgctagataaagttggataccagaaaccatcagaacgccctgatattttagttcgagtgttcatgataaaactgaaggaattaatgtcagatattaaaaggaatcaacattttggaaagactaaagcaattgtcttcacaatagaatttcagaagaggggactcccacatgcccatatcctaatcttccttgataaaagaggaaagagcctagagccctcacaaattgatgaactgatatgcgctgagattcctgacagagacaaggatcctgaaacatttgaagctgtcaagaatttcatgatgcatggaccatgtggagaagcaaacccaaagtcaccgtgcatggtagaccataaatgcaatagattcttcccaagaggattttctgatgagacaatcattgatgaagtcaacttcccaatatataggagacgagatgatgggagacagataaaaaagggacgagttaatctgaacaatggattcgttgttccatacaacaaagatctcctagcgaaattccaagtacacatgaatgtcgagtggttcaaccggtctaggtcaatcaaatacctatttaagagcatatgcaatgaagatgaccaagcaacagcagttgttgaagaaactgacgaaaagaataatgatgagattaaaaggtacctgggatgcaaatacacaacagcaactgaagcttgttggcgaatattcaaatttcctctacactaccaagagccacctgttgagaggctatcattccacgaggagaatgagcaacatgtgatttttcctgactcaacagacctacaggaaatcgtaagacgaccaagatcaggggtcactatgtttactgagtggatggaaacgaacaaaaggcatgaagatgccagagaattaacatattcagaatttcctacaaaatggacgtgggataagaatgtgaagaaatgggtaaggcgaaaaggagggatgaaaattggcaggatctacaatgcccatccagcaagtggagaaaggtattatctcagagttatcctcaacacggcaaagggttgcacaacatttgaagatatcaggactgtaaatggaaccgtgcactcatcatacaaatcagcatgccatgcactaggatttctaaacgatgatagcgaatggattgagtgcatcaaggaagcatcatgctgggcatctgggatgaaattacgacaattatttgcaactgttttatgccattgcgagatgaactatgacaaagagaagttgaagcacgagcacctgcaaatactaaacactctgaacatagagcagaaaaaggcatttgatgcaataatagaatcagcacatcaatcactaggcaagctaatatttgtggatggttatggtgggacaggcaagacatacctttggaaagcaatcacaacaaggttaagatcagagggaaagatagtgcttgcagttgcgtctagtggcgttgcggcacttctacttcaaggaggtagaacagcacattcagcattcaatatcccgatcaacctaacagatgaatatacatgcttcatcaaacaaggctcgcacatagctgatctattaatgaagacatcactaatactgtgggatgaagctccaatggcaaacagaaactgtttcgaggcactagacaagagcctaagggacgtgcagaggtgtagaaatgagaatagttgtcaaaagccctttggtggcatgacagttgttctaggaggggacttcaggcagatcctccctattgtgccaaaaggaagaagggaacacactgtaaatgcaacgatcaaatgctcatacctctggcaacatttcgaggtgttcaatttgacaaaaaatatgcgactcaattatgtgtccaaagatcaaacagagcatcagaagtctgcagaattcgctgagtggatactacaaatcggcaatggtgacacgatttcgttagatgaaaaaggttgggtgaggatgcctagtgacctgctgttacaaaagggagatgacccgaaagctcaaatcattgagagtacctatcctgacctacaagacaattgctgcaagcagaattatctagaagaaagagcaatattgtgtccagtgaatgagaatgtcaatgagcttaatgagtatattatggaccagatccaaggtgacaaggtaacctaccttagccgtgacagtgtgagcaaatcagtgtcttacagccatgagatggaaatgttatatcctacggagtttctaaacagcttgaatcactccggaattccaaaccaccaactgaagctcaaagtcggtttgccagtgatgcttcttcgtaacatcaaccaaagtgcagggctatgcaacggcactagaatgacaattacgcgactaggcaataaggttattgaggcacagattataactggaacacacagcggcgatatggtatgtatcccacaaatcatcatgtcaccaaccgaaccgaaatggccgttcatgctaaacagaaagcaatttcccctctcggtgtgttttgccatgacgatcaacaagagtcaggggcaaactctaaacaaggtcggcctctatttacctaggcaagttttcacccacgggcagctctatgtggcagtctccagagtcacaagcagagatggcctgaagatcttgatcgccgacgaagaatgcccgggtgaaggaatggtgaaaaacatagtgtacaaagagatcctccagtaa

SEQ ID NO: 100391 - DNA, 1052 bp, Oryza sativa
  Clone ID: PAT_MRT4530_98111C.1
ggggccggcaggatcacaccatcacgagcaccaccaccactcaccacgcgccacccacccccgcaccgcacgccaagatccgaccgccgccgccgccgccgccggagtagggagagggagaggagatggggcggagggcggggtcctacccctactacgtggaggcggcgccgccggtggacgtgaacaagaacacggagtggttcatgtaccccggggtgtggaccacctacatcctcctcctcttcttcgcctggctgctcgtcctctccgtctccgcctgctcccccgggatcgcgtggaccgtcgtcaacctcgcccacttcgccatcacttatcacttcttccattggaagaagggaactccatttgctgctgatgaccaaggcatctacaacagactaacttggtgggaacaaattgataacgggcagcaacttactcgtaataggaagttcttgactgtggtacctgtggtgctgtacctgatcgcgtcacacttgaccgactacaaacagccaatgcttttcctcaacaccattgcagttctggtactagtggtagcaaagctgccaaacatgcacaaggtccgtatatttggaatcaatgcagatatctgaggaccatatgaagaacatcagggcacaagcttctgtgtgtttgcaacgagggacaagcgaactttgtgcaaacacggtatctaaagtagtgaaaaaactaaactttttcaccactgcaatctgtagtatgtgcataggtgtaggaagaacctgtaaatgttactgtagcttataatttgcctacaggttggaggctgctgcatgtttgctcatgccacttcctttaagaactctagtggagagtgtagactgtaacttaaataaacatgtaatcttgtggatatggaaagtttggtggttgttaaaatggtgaaccggagttcagttcctgcaaaaaaaaaaaaaaaaaaaaaaaaaaaaaaaaaaatattaaaaaaataaaaaaaaaaaaaaaaaaaattaaaaaaaaataaaaaaaataatataataatg

SEQ ID NO: 100392 - DNA, 772 bp, Oryza sativa
  Clone ID: PAT_MRT4530_98112C.1
atggggcggagggcggggtcctacccctactacgtggaggcggcgccgccggtggacgtgaacaagaacacggagtggttcatgtaccccggggtgtggaccacctacatcctcctcctcttcttcgcctggctgctcgtcctctccgtctccgcctgctcccccgggatcgcgtggaccgtcgtcaacctcgcccacttcgccgttgaactcaagtccaactacgccttcagtctaaaacaactagcaatcacttatcacttcttccattggaagaagggaactccatttgctgctgatgaccaaggcatctacaacagactaacttggtgggaacaaattgataacgggcagcaacttactcgtaataggaagttcttgactgtggtacctgtggtgctgtacctagatcgcgtcacacttgaccgactacaaacagccaatgcttttcctcaacaccattgcggttctggtactagtggtagcaaagctgccaaacatgcacaaggtccgtatatttggaatcaatgcagatatctgaggaccatatgaagaacatcacggcacaagcttctgtgtgtttgcaacgagggacaagcgaactttgtgcaaacacggtatctaaagtagtgaaaaaactaaactttttcaccactgcaatctgtagtatgtgcataggtgtaggaagaacctgtaaatgttactgtagcttataatttgcctacaggttggaggctgcttgatgtttgctcatgccacttcctttaagaac

SEQ ID NO: 100393 - DNA, 149 bp, Oryza sativa
  Clone ID: PAT_MRT4530_98113C.1
tttttgaacctgtatttgtagaggaccagaaagactcctagtcatgcttgaatagttgaacttagaactcctgaaactccgagagaagtgatctgtgatcatacctagtgttgatcgtccaaacttctgaccaatatcaacccaccgag

SEQ ID NO: 100394 - DNA, 1474 bp, Oryza sativa
  Clone ID: PAT_MRT4530_98114C.1
ggggggaagaggagggtttgggggcaatggatactaccacgagggccaagatcccgtcccttcaccaccagacggagatcaactgggacaacctcgacaagaccaagctctatgtggtgggagccgggatgttcagtggcgtgaccgtggcgctgtacccggtatcggtgataaagacccggatgcaggtagccactggggaagccgtgaggaggaatgccgcggcaacattcaggaacattctcaaggtggacggagtgcccgggctgtaccgagggtttgggacagttatcacaggggccatccctgctaggattatctttcttacagcgcttgagacaacaaaggcggcctcgcttaagcttgttgaaccatttaagctgtcggagccggtacaagcagcctttgccaatggccttggcggtttgtcggcatctctatgttcgcaggctgtgtttgtgcccattgatgtggttagccagaaattgatggttcaaggatattctggtcatgttagatataagggtggacttgatgttgcccaacagattataaaggctgatggaattcgggggctgtacagaggatttggcctgtctgttatgacgtactcaccatctagtgctgtgtggtgggcaagctatgggtccagccagcgcataatttggagtgcttttgatcgttggaatgataaagaaagttctcctagtcagttgacaatagttggtgtccaagccacaggggggattattgctggtgcagtgacatcctgtgttacaactcccatagatactatcaaaaccagactgcaggttaatcaaaacaaaccaaaagccatggaagtagttagaagattgattgctgaagatggatggaaaggtttctacagaggtttaggtccaagatttttcagctcatcagcttggggtacctcaatgatagtatgctatgaatacctaaagcgcttgtgtgctaaagttgaagaggtctgagtcagcttaaacctatcactctgatgctcgcagtggtggaaattttgtagcaaaaatccaataatgctgtatgccaacaactgtgacccatgaggaagctctctttcttgctgacttgatactagatatctttaaaattttagtgctcttgaggctattttgaaaatgcagaggttcatattgtttgcctctaacgatgaatatggattaggcagaatgttttacatgatatataaacgaaagattagatatgttcacttttcattctttttagctccagcctccagggcttgtaatagtgagaccggagtattggaaccggtttcagtgaggaggagcaaggatatatatacatttgctcgtttctcttcgatgtactcaaaatatcattcttcgaatttttttacgatggtgctggtcttcgttttgtatcaataatcattcgtagcgaaattattttctaaaaaaaaaaaaaaaaaaaa

SEQ ID NO: 100395 - DNA, 974 bp, Oryza sativa
  Clone ID: PAT_MRT4530_98115C.1
gattgagttgagaagtttacttgatgccaggacctgcttccttcaaaatttgcagaatgacttttctaagcttttggatgaaaagaaatactgtgaaactcaggttcttatcttgaatgagaagctggagatggctcaggcattggcagaagaaagtgaagcaattgctacagaagctaaacagatggcggaggaaaggatgactcccgctgaagagaaggatgaagaagtcaagctattggagaggtccattgaggagcttgagactactgtttgtgctttggaaaacaaggtggacatcattaaggaagaagcagagcgtcaaagaatgcacagagaagaaatagaactagagctgcagaaagtcaggcaacaaatgctagctgttccttcctcagggcaagcaacgagctccctagaaggtggaatgggtgattttactgactcatccaggcactccagagagataaagaatgagctactggctgcccaggagaatataagaatacttcaaaaggatgttgctgagaaggaaacagagattgctcagtgcaaggcacacatatcagagctaaacatacatgctgaggcagcagcccgagaatataagcagaaattcatggagctagaagccatggcacaacaggttaagagtgacaatacatctgcaaatgcttgttccacaagaccagagaagatcagtttgaaacctcgcggttcaggctctccatttaagtgcattggactgggatttgtacaacaaatgaattctgagaaagatgaagagcttagtgctgcaaagcaacgcattatggaacttgagggcatagcagctagtcggcaaagggagatattcatgttgaatgcgagattagctacaacagagagtatgacacatgatgtgattcgtgatatgttaggtggtaagatgaacatggcgactttggcggcactggttgacaaccagcaccaaa

SEQ ID NO: 100396 - DNA, 313 bp, Oryza sativa
  Clone ID: PAT_MRT4530_98116C.1
ataattacctaagttttttaataagaaaaatctttaaacctttgtcccaaggcaacaatgttgagccttaaaaactggggggggccctttttaaaaacaaagggctaatttttgctaatgaacctgcccctcgatcggatggggaaaaccaagggggcatgctgaatgatcccccccccccattcataaccccctttaagctgaaaaaaagaaaaacaatgcttcggaagcccaactgccaaagaagggcaaaatttggctgattaccaaatacttccaaaaaaaaaaaaacaacagagggggcctcgtgccc

SEQ ID NO: 100397 - DNA, 465 bp, Oryza sativa
  Clone ID: PAT_MRT4530_98117C.1
atcttatgttatttttgttgggccttggtgttttacttatcatgaggcaaaaccatacttcataccattttcagaaggacttctattatttaaccactctgggcatatgtaccccatatcaaaaccaaaaccttatgttgtcttcacaatgattttagcaatttatctactgttctcaccagaaacggtgtggagaaaaacaatgacctaacaagctaaagacgtacaaccagaggggataacgatgagcatgatccatccaaataaacggtaagggatgggtagactcatcctttggggactttattcttcactgcgtcgcacaatacataagcttgaacagagatcgcttatataagatccatgtgagtgcccaaaaataagcgctgccattaataggtcatgatagaaaaaaagggatcctgagcacatgcatagcatgtaagtgtctaacattgtatgaaa

SEQ ID NO: 100398 - DNA, 482 bp, Oryza sativa
  Clone ID: PAT_MRT4530_98118C.1
cgcctatcaccaccacggcttgcagctctggccgtagcagcagcagcgcgcgcgcgggtgcctgtgcccgccgctgctcacggctactcgccgccggctagtgcctccgatacgggagctccccacggtgcggcgccccgacggtgtgcgagggggtctggaaaccggcggatctcgggcgctcgccgtcggagaccggcacgggtggaggagtaccgcgacccgcttttttcttagcgaattggtttcctctgctctgaggctgagcctaattatactgccattgtagctccccaagcgccgtgaattggtaagacttttgtgggaggcgcttgattctgctctactcacaacaagtttctaaagactacgaagcaattgattgtgaagtatttctttcaagacggcttgacatccaagtagctgactgggtgcagcatatgctattcttaacgatgggcgaatgatgcaccccacaatgt

SEQ ID NO: 100399 - DNA, 205 bp, Oryza sativa
  unsure (1)..(205): unsure at all n locations
  Clone ID: PAT_MRT4530_98119C.1
acataatcatatcaacttttttccaaagggcggcacgtgcattacattcaacgtacaacaaanccacccacaccaaactcccccatgatacactgatccgatacactaaacgtttccatctttctttaaacgaggccataataaacattcgccaaataatgcaaaaagcttattcctcggtaaaattgatctcctctcaaatttc

SEQ ID NO: 100400 - DNA, 2640 bp, Oryza sativa
  Clone ID: PAT_MRT4530_9811C.1
atgtcaacttccgctggtccttttgctgcaccatcggctgaattccccgagaacctttctcatcagatcgcaatcccaagtttagttcatcccaatcagtactttcttggtccgatcgacaatttggatccaactgagttcattaatgccgaaaccaataggatcccctttagactagccaatccaaacttaagtctttgaaaaaatacctttaagtcatggccatcaacttagaagagttagccggcttggtataaaagggtatcggctagcaagggttctcactgggaggaaattgggatagcccaagccctagctctgactgcagccaatatggctaaggatgaacctctgatgtcggcagcttcttatttctggtccaatgccatgaatggctttctgtttaaacagggaccaatgaccccaactttgctagacataaccatgataactggtttagacatcacttcatcggttaatccagtcggcttgaataccaaaaacaagtttgacttcaaaaccaggagcataggtggttggtcagggtttgtctcatcaaacatggggaatggagctgttactccaagagaacacacagcattccttctgatgtggctagaaaagtacttgttctgtggtccaagctgtggcccaactgtaaactggcaacacatagccgagtccctagtagaaaaaaaaggatttccattaggaaaatatctattaggttatttataccaaacactgaactcaacatcggctagaattgcttctggatcagcaatcgacataggtggcccttggtggcttcttcaaatctggttgaatttgcatactatgaaagttgtcgatagaccagccctgacagaagcagatttcccaagattcgaaccaatcaccgatgaagatagggaagaaataaccacatgccgatgcatgtcttttggagaggcagcatcaactaatgctggatccaaactgtcagccgatcctttcagagattggtttgcaagcttctacaatgggttccccagggattcaatagtttggtttgcatatgccgattctgatagctttgaacttccctcggacttcagatttgatgacattaattctgagaagtttgataagtctagagaagttttcactactgctatcagcccttgcatactctcagttggcatacatcagggtagaaacatccaagtttcttacgaattctatcaccccatgagtgctgccagacaacttggattgggacagctgccaattggtttgtattttgccgacaagatccagcatagaggggaaattacattggcattaatgatggatcggctgctaagcatccaaggacctccccttggaagtattgataatattgagctagctttgctcaggagcacaacatttgaccgatggtgggttgaatggaagaaacatttatttcatcaatcggtttccatgtatctcactaacatattccctgatgttatccctcaaaccacagaatcttcacctcctcatcatagtgaaagtggtttggagatcaattatgctgcaggccttcttcctaatggtggtggactggctcctcctgtcatcggcttccatgccccccaagacaacaagtttgcttcaaggacagatgagagagcctatcccaatggataccggaaagaagaaaagaaccaagccatcggttgtagatccatcggctaccaagaagaagaaaacaaataagcaaaaaactttagcaaccgatgatctaccaactgttgatccagatgtcgacaaatttctggatgatgaagccatggaagaagacattgatgcagctgctgccgaagtcagtgacactagagaacaaacacctcctgccgataccccagctccacaaagaattcctccgcctcctcattctccaactcctgttcagcctgaatcaagtgaacacaccccatcggctgtaggaagtcatcatgtagaagatgcagcagctccaactcctgctgtccctgttttagccgatatgttctcttttgacataagacaattctgggatgaagaagaagaagacacctcaagcaaagccttagctcctctagccgatgatgttaagagaactcttatggaaatatcaaatcggctagagaattccttggatgtcttggtagtcgattgtggatcaatcagggcctggttccacgaaattcaaaatatgatcccagaagacttagccactacgctaactccagctttttatcttgaacaacatcaattcaagttggagaaagcaagacaaaggatagccaataggcgagaaagaaaagatatagaggcaaccatccaagtcaatcggcaatctgtcaatgaggagaaagccaacctagatcagctatcttttggccctttgaagtccttaactgaccagggcgacttgcttaaactaaggacctcaagcacacaacaaaaatggagcacacagctctggagcacaccgctcaatcgaccacacaggtcaatgataagcacgcacacagatggcttacctcccaggttcacacagatccaccatcgccccggtctaaaacattttccaccagttcattactacacacggtgcaacacatgccacca

SEQ ID NO: 100401 - DNA, 441 bp, Oryza sativa
  Clone ID: PAT_MRT4530_98120C.1
atgaacccgcctcccgtgtcccccaagcccgcgccggcggcactcgcctcagtggcgcagggggtggaggacgacgaggaaaaggcggaggtggatgacggcggtggcggcggcggctacgcgcggacgccagatttggggtgcccctactactacgctccaccgaaaaaggtgacgacgacgatgccgccgccgcctcctgcggcgtcggcggttggagggtgggatttctttaacctgttctacgtggtgcaggaggtggccgcagtagccatcagcaacgaggatatgcgcacgatgagggagcgggaggggatcccggagctggaggaagcggagacgagggggcaaagacgtcggcgaacgccgagacccccaaagcagcagaaactccgctcggagtggccaatcaagaagaggccaaagacgtgtgcgggctag

SEQ ID NO: 100402 - DNA, 222 bp, Oryza sativa
  Clone ID: PAT_MRT4530_98121C.1
atggaggctgaggaggaggaggcagcagtagaggagatggcgggcggtcgagggccggactccggggtctacgccagcggctgcggtggtgggtggccatggcaagttgttagggcctcgcctgcccaccgcgatcgtcgctccatcgccctcatgcccgccgccgtgcggccctcatcgccgtcgagccgctaccctcgtcgctgccagatgaaggggtag

SEQ ID NO: 100403 - DNA, 1654 bp, Oryza sativa
  Clone ID: PAT_MRT4530_98122C.1
gagcccctctccgttaggaacgtcgagcgccgcacctcacgccgggccaacgacctccagtaccaaattggcctccgttatactggtggtgcacgcatggcattggccctctccttaaagtttagtgccgtacctgtcgttgtgccagtctgggttcgagatttcgatatcgatggggaattgtgggttaaactaaggcttataccgacagaaccttgggtgggagctgtatcttgggcatttgtatcgctcccaaagattaagtttgagctgtctctgttccggcttttcaatcttatggcaattcctgttctgtcaatgtttctcacgaaacttctaacagaagatttgccacgtctctttgtgcggcccaagaagattgtccttgattttcaccacgcgtccgctatgggacctgttgcaggagatgttgcaagtgacgtaatccaaaatgttgcaagtggcatacttcaagatgttgcaagtgatgtaattcaagatgggaataaggacttcgttggagaactatcagtgacattagttgatgccaggaagcttagctttgtcttattcgggaagactgatccatatgttgtcatgattcttggtgatcaagaaataaagagcaagaagaatagtcaaacaactgtaattgggcaaccaggcgaaccaatctggaatcaagactttcatatgctagttgcaaaccctcgcaaacagaagttgtgcattcaagtaaaggattcagttggtctaaccgatgtcactattggcactggagaggttgagttaggatcacttaaagacacagtacctacagacaaaattgtaactttatatggaggatggggcttacttgggaaacggtcaaaaggggaagtactccttcgcctcacatacaaagcatatgtcgaggacgaggaagatgaaggggtaaaaaatgagtttgctgcgggctatgtttcagacgaggatgtgctagattatgtccaagacagtacaagtaagcaaagtgacatggatggtaaagagagagagaccttcatggatctgctggccgcgctgcttgtcagcgaggaatttcaaggcattgtgtcgtcgtctgaacccggaagcttgagagatagtgagcaggctgctaaatccagagatggtgaaaatgctgcagcagctgctgatacagggactgtatccaatagctccacagatactgctctagtgtggcttgctgccataacaagtgtgatggtgctggtctcatccaaccttggtggttcaggctatttcaacccttgaagagttgatgcatgaagaatctgatctgactggagtatttggacgatccatctgtctgaatctgatcatccgcagctagtagcagaggtcgttttgttttgattttttttaactttatttttgccgactagtgtatattccattcccatgtatctaatcttgcagaggaatcaaagaatggcttggcttttggcggctgtctctcctccctttttctatttcatacgattgacatgatgtagcatatcctttttgtgcaaccatccacgcacatgatttaatttgtgtgaatgggaaatttggagttgcgttcaaaaaaaaaaaaaaaaaactcgagactagttctctctctctctcc

SEQ ID NO: 100404 - DNA, 1298 bp, Oryza sativa
  Clone ID: PAT_MRT4530_98123C.1
ttggttttagctgcatccggggtattaattgcaaaaagaagaagaagaaggaatcaagaaaacccaaattgtgatgatgagatcgagacgcgaaatatatatctcttctccgatcgattgcgacgacgatgacgacgacgcagtggatatgatgtgcgtttcaagccattgctgctgatcattcttcgccatgacaagcttcagacgaactggctctggctaagctggggttggcgaaagatgatcagcaccaggttggtgtatatcacatatatatttcacatctcaggagaaatttttttttgatcattagcctctgtgattgccatctaatcatgatctgcaccgtgccagtcaggcctccctagagtgaactcgagactagggctactcagctcatggttggacacctgcgagctgctcgatctgcacggttccaagttctcaataggagaagacaatcctacggagcgatgggcgtccatgttgcaagaattggacgacagccatgggtcccttgaggagttgctccacctggtggtgctggtgttgccggccgacgactggtccatgtcgccgccgccgccgccgccgaccgagctggcggcgccctccgacgccgaccggccgtgctccgcgaacgccgccgcggccaccccgccgccgccgccacccctcaggcacatgctgtcgccgccgcccgacgccgcctgcccgccgccggcgaactcctcgtcgccggagccgccgtccgccggccctgaagaggctgcaggcttgtcagtgctcttcacggtgcgatacatctggaggtggctcttgacatgcgctagcgtcagatccttgacgtccatgagctccagcaccgacttgggcgtcgccctctcgtggccgccgaggagctcgacggcgtggacgaagcgggcgtggagggtgctcgtccagcgcatgcgcggcgcgcgcatgctgcgcttggcggggagcttgggcatgaagcgggacgcgagggcgccgacgaacggctggccgccgtggaggtggtggtggtggtggtgcgcgccgccgatgacgccgggggcggcggcgccggggacgccgtagctgcggagggtgtcggagacggagagcatgccgttgagcctccccgaggcggcggacagcatccggtggtggggggaggagaggaacgccgccgtggggtcgagcggcgacgacgcggcgcccggcggcgccgcgagcggggacggcgacgtggagggccacgtggatgggtggtggtacgagctgtagaatcccat

SEQ ID NO: 100405 - DNA, 1140 bp, Oryza sativa
  Clone ID: PAT_MRT4530_98124C.1
atggagttgggtcagccggggtgtccggttgtccagcttccagattcaccgcagcgcacagggagactgcccactgcctgtttaggagtgggggtgaaacctcatcatggtgtggatgaagataatgatggaagctttcattcagcagcagctaatgagagtgatgagagtggacctgttcaaggaaagggtgcgaggagtcgtgtccctattgggccaaatcatcaggctaagttaccagattgtacatttggcaagaaagacggaaatgttgctgaggactctgctgatagtctctcatgtctttatctcggtagtgataggactgaaaacatcagcaacaatcaggctcctgtgcgcagctctgttcttcatccaaccgatagtatgccaactgatgccatgccactgctgttgactccaacattggggcctcccattgatgctcctcagccagaaacgacagcggtcgttcatgagtccgctggagaggcatcgaccacgtcatttgactggtcgaagttaacagagatggggtaccgggcggtggaggtgatccagacttggagcagcgaagtcaagcttcttaaaaccatattcgtggaagagaaagacaggaatgagcatcttaagaccatgctcggggaggagaaagacaagaatgagcactataagaccatgctcgcgaaggagaaagacaaggccgagcaccataagaacatgctcgaggaggagaaagacaataacaagcgccttaagaccatgctcgtggaggagaaagacaagaacaaacaccataagatcatactcgaggaggaaaaggacaagaacgagcgtcttaagaccatgctctcagaggagaaagtcaagaacgagcaccttaagagcatgctcgcggaggagaaagacaagaacgagcgtcttcagctcagacttcacggggaggaaaaagataagaatgagctcctaaagaccatgctcgcggagaagaaagacaagaatgatcgccttcaactcagttttccaaagaacgaacaccttccacttggtcttcagagagtgcataccaggttggacgaatgcatagccttgatcgacagaattactcagaaagacacggtttttctggaaatgttatag

SEQ ID NO: 100406 - DNA, 414 bp, Oryza sativa
  Clone ID: PAT_MRT4530_98125C.1
ttatcagatagtgtagttgaatacttcaaactacacgtaacacgtttgactaggattccataagctgccaaatgccaatgttcccatcagtgaaataattgtttgatgagaaactaacaaccaaaacagcaggaacttgaagcaaacactcataattcaaaacaaaaatatcaatatccactttgcattttatattcttatgaacattgctgtgacaatgctgtgtttaatttctttcctcgatagcaaaactagatgtcacgcgcattattataataagagtttatctagtggacattaggccacagtagcatggaaatcttcctgtataacgaaatgatgtgtcattcttttctatatatataaagaaaactatcaactagatgaacacactttggatgcattgaatcggtt

SEQ ID NO: 100407 - DNA, 193 bp, Oryza sativa
  Clone ID: PAT_MRT4530_98126C.1
atggcggtgagtgaggcacaagcggccatggtgctggcaacggtgcgaggcatgcagcaagctgtccagccggctcaactggcggacgatgccgtcgccgagggtggtgttctggtggcggcggagccggagccagggaaccgcattggtaactttttggcggggatagcctggcgatgggtgcgggcccaag

SEQ ID NO: 100408 - DNA, 393 bp, Oryza sativa
  Clone ID: PAT_MRT4530_98127C.1
ccccgcgtccgccccgcgtgctgggacttcatgttcttctgaataaaaaaaaaaaaaaaaaaaaaaaaaaaaaaaaaaaaaaaaaaaaaaaaaaaaaaaaaagggcggagggtcttaaaggtattccaaggcttcacatactgcctgctctgcgtacgtgctagcctcttttcttgttgtctcctggggtgggggtggtctggtccgctttttttacaactttccagcctgggtaaatccctggcgctttcccagcttccctcgttttgtcggctcttccccctttccccttttggcgtcttggctaataggcccgcgccgttcgcctttcccccttttgcccgttctgaatggtgaatgggacacgccctgtcccgtgtctttacgctttgg

SEQ ID NO: 100409 - DNA, 522 bp, Oryza sativa
  Clone ID: PAT_MRT4530_98128C.1
cttagatacatttaattgtctgtttattctttgtttttgggaccaaaaggaaaaacttcctttttgttacaggggggtccgacgggcaaaaattgggtgaaaaaaaaaccaggggcggcgaccgcgatgcaaaaaaaaatcaggaggggaccctcccactgttgagacaaaaccaggggggggaaaaaagatctgggggccacttcccggacaggggggggggcgacccaactttaaagggggaccgccccccttatgggcggggaaaaaaaaaaacccccaaaaaaaagacggcaccccactaaggagaagggggcaaaaccttttgttcctgagagaagcccacaacattttgaggcccccacggggaaaataccatcccttggggggccgcccaaataaaaccttggggggccaacacagccggtttgggggggccccccgggggggggggggcgccccggaaaccatccgccccttggaaacgcggaacggaggataaattttttgcccccaaagctt

SEQ ID NO: 100410 - DNA, 1362 bp, Oryza sativa
  Clone ID: PAT_MRT4530_98129C.1
atggccggtcagcgtgtggtggccgcggtggccgtcgctctgggcgtgtgcctgctgcagctgccggcggcgagccgcggccagctgcaggtggggttctacaacaccagctgccccaatgccgagacgctggtccggcaggccgtcaccaacgccttcgccaacgactccggcatcgccgccggcctcatccgcctccatttccacgactgcttcgtcagaatggggatcgatggttgcgacgcgtcggtgctgctgacgtcgcccaacaacacggcggagcgcgacgcggcgccgaacaaccccagcctccgtggcttccaggtgatcgacgccgccaaggccgccgtcgagcagagctgcgcgcgcacggtgtcctgcgccgacatcgtcgcgttcgccgcccgcgacagcgtcaacctcaccggcggcgtctcctaccaggtcccctccggccgccgcgacggcaacgtctccgtcgcccaggacgccatcgacaacctgcccccagcccaccttcaccgccgcccagctcgtcgccagcttcgccaacaagtcgctcaccgccgaggagatggtcgtcctctccggcgcccacaccgtcggccgctccttctgctcctccttcctcgcccgcatctggaacaacaccacccccatcgtggacacggggctgagcccggggtacgcggcgctgctgagggcgctgtgcccgtcgaacgcgtcggcgacggcgacgacggcgatcgacgtgagcacgccggcgacgctggacaacaactactacaagctgctgccgctcaacctggggctcttcttctccgacaaccagctgcgggtgaacgcgacgctgggcggcgtcggtgagcagcttcgcggcgaacgagacgctgtggaaggagaagttcgtcgccgccatggtcaagatggggagcatcgaggtgctcaccggcagccagggcgaggtcaggctcaactgcagcgtcgtcaacaaccggtcatcctcctccgccgccgggatggagacgtcgtaccactactactccggatccaccatgtccgtcgacgaggtcgcgtcgagctgatcgacgacgatgtacaacctgtttggtgttaattaggatgtgtgtatcccacgaggtcacgacgatgtagaagccgggaaggtcaaaacattaattctatgatgtatgaaaaaaagcgtgtctatgtaaaattttatatatttgtctgcatacatgcatgcatgcagtatgcgagttatttgcagtacgtgtcatttagtttgtaacgcttgatgcaaccatgttcctttcagcttatcagtccattatccccccaaattattaacggcacgctttt

SEQ ID NO: 100411 - DNA, 1385 bp, Oryza sativa
  unsure (1)..(1385): unsure at all n locations
  Clone ID: PAT_MRT4530_9812C.1
gacactatagaatactcaagcttgcatgcctgcaggtcgactctagaggatccccatggctttctgtttaaacagggaccaatgaccccaactttgctagacataaccatgataactggtttagacatcacttcatcggttaatccagtcggcttgaataccaaaaacaagtttgacttcaaaaccaggagcataggtggttggtcagggtttgtctcatcaaacatggggaatggagctgttactccaagagaacacacagcattccttctgatgtggctagaaaagtacttgttctgtggtccaagctgtggcccaactgtaaactggcaacacatagccgagtccctagtagaaaaaaaaggatttccattaggaaaatatctattaggttatttataccaaacactgaactcaacatcggctagaattgcttctggatcagcaatcgacataggtggcccttggtggcttcttcaaatctggttgaatttgcatactatgaaagttgtcgatagaccagccctgacagaagcagatttcccaagattcgaaccaatcaccgatgaagatagggaagaaataaccacatgccgatgcatgtcttttggagaggcagcatcaactaatgctggatccaaactgtcagccgatcctttcagagattggtttgcaagcttctacaatgggttccccagggattcaatagtttggtttgcatatgccgattctgatagctttgaacttnncctcgacttcagatttgatgacattaattctgagaagtttgataagtctagagaagtttcactactgctatcagcccttgcatactctcagttggcatacatcagggtagaaacatccaagtttcttacgaattctatcaccccatgagtgctgccagacaacttggattgggacagctgccaattggtttgtattttgccgacaagatccagcatagaggggaaattacattggcattaatgatggatcggctgctaagcatccaaggacctccccttggaagtattgataatattgagctagctttgctcaggagcacaacatttgaccgatggtgggttgaatggaagaaacatttatttcatcaatcggtttccatgtatctcactaacatattccctgatgttatccctcaaaccacagaatcttcacctcctcatcatagtgaaagtggtttggagatcaattatgctgcaggccttcttcctaatggtggtggactggctcctcctgtcatcggcttccatgccccccaagacaacaagtttgcttcaaggacagatgagagagcctatcccaatggataccggaaagaagaaaagaaccaagccatcggttgtagatccatcggctac

SEQ ID NO: 100412 - DNA, 369 bp, Oryza sativa
  Clone ID: PAT_MRT4530_98130C.1
atgtggacgcaggggtttttacatgcgagtgcaaacagtgggagcatacaggatgggcattatgcgaatacatgtccgacaaacccagcaaatttcgacaaggtcatgaaggccactaacaggggtaagggtaagaggggcaggccacgaggatccagcaggggtagaggacgcggtaccaatgttggatgcaaagttagtactgcagtccctagaccaacaaggagatccaccagggagggtccatcgctgcgaagatgtttggacgacgagtgggctgcatatgcggctgattatgctgcgtacacagatgacgatctaacaaatgcagacgatgacatcgggtgttatgaaagcgattccacatga

SEQ ID NO: 100413 - DNA, 1734 bp, Oryza sativa
  Clone ID: PAT_MRT4530_98131C.1
ctagtggatcccccgggctgcaggttttttttttttttacaccgtacacggatcccgtatagagacgagacaagcgtacattcgtacgtactccgtgcaaatactgtttgttgcgtcgaatacacgacaaagtcaacgaacgatacagcgtggcgggggagctcatctcactggcctcgcgctcccacactgccacgtcactcacactctcactaatggctacttggtggttccggcgaagtaggcgagcgcgccgacgagcggcgcgttgatgtaggtggccggctccgactgcgcgaagttgccgcggtcgtcggcaaaggcgtcgcggctgtccggcccgccgacgacggcgccgacgagcacgttcgggttgggctcgccggagtggaggtagccgaagccggcgtcgcaggagatccgccccgggtgggcgcgcaccgacggcatggacgcgccgcggtggtgcgcccgcctcgggtacctgcacccgaaccccaccatgtacgacatccccgccgggttcttccccaggatgtagtccacctgccgcttcgccaccgccaccagctccgccgccgacacctcccccctcgctccgccgccgccgtcgccgcacgacgcggtggcgccgctcgaccggaggtacttggcgtacgccagcatcaggaacgtcgccgtcgtcacgtactgcatgttgctggagccttccctgtacaggaggccgccgggggtgtaccgcgactggaagctcgccgtgccgggcaccagcgagcagatgtagctgtcggagtgcgccttgtagagctcgaggccatggaggcggttgcggaggaagcccttggcgaggagcaccttggtgcccacccgcttgtcgtcccagctgaaggagtagtcgtcgtccccggcgccgagctgcatcccgttcgcctccacgtacgacatgaacgacgcgttcctcgacgcgcggtgcagccacgacgccccccacaggagctcgtcgtggtagcccgagtaggagcagtagaacgggcacaccgacgacgccagcgagtcgctgtacgacccgcggtgccggtcggcgaagtcgaacacctgcgtcgcggcgtggaggaggcgcgcggagtaggccgggtcggcgcggcggaacaccatggacgacgcggcgagcgcggcggccgtctcgccggcgacgtcggaacccggcttgtcggcggtgacgcggtagacgctgcggggtgtgtccatgtcctcggggcgctcccagcagcggtggtcctggttggggtcggcgacctggacgtagagcgcgccgggcgtggcggtggcggccttgaggaggtagtcggcgccccagcgcacggcggcgcgggcgttgggcagctcggcgcccatgaacttgccgaagtcgagcacgctccacgccagcatcgtcgtcgagaacgccatgggcaggccgaacttgacgttgtcgccggcgtcgtagtacccgcccaccaaatccacattgtactgggcgccgtcggtgaggccggagtcggcgcgccacggcatgcggttgccgggcgggagcttgccggagcgctggccctcgaagaagatgatggacttggcgagcgcgtcggcgtagttgaacgccatggccgagctcggaactaagagcagcaggtggagcacgaccagcagccgcagccgaatgccggcgccgccgcagctgctgctctttggctccat

SEQ ID NO: 100414 - DNA, 2754 bp, Oryza sativa
  Clone ID: PAT_MRT4530_98132C.1
atgtctccggcgtccattgcagcgcttcgccacctcgccgccgtgctctccatcctcgctcactgcctcctcctctcttccgccgacgtcgatttcatctacaacggcttccgcaacgccgccaacctgagcctagacggctcggccaccgtcctgcgcggcggcgcgctgcagctcaccaacgacagcaacaatatcatgggccacgcgttcttcgactccccggtgcagatggtgagcgacgccgccgtcgtctccttcagcacggccttcgtcttcgacatcgtcaccaacggcagcgtcggcggccatggcttggctttcgttgtcgccgcctccaaggtgctccccggcgcaaccgccgagcagtatcttggcctcctcgggaagagcaacatgggtgacccctccaaccacgtgttcgccgtcgagttcgacactgtgcaggcgaacgggctcctgaacgagacgaacggcaaccacgttggcgtcgacctaaacagcctcgtgtcgaacgtgtcggagccggccgcctacttcaccgacggcggcggtggcaagaggaacttgacgttggagagcgcgcagccgattcaggcgtgggtagactacgacggcagcgccaagatcctcaacgtcaccatcgctccggtggcgtcgacggtgccgacgcggcctcgccggccgctcatatcgcacgccgtcgacctcctgccgatcttcaagcaggaaatgtacgtcggcttctcgtcgtcgacggggaagctcgcgagctcgcactacgtcctcgcatggagcttccggaccggcggcggcgccgcgcggccgatcgatctctctcggttgccgagcgtcccaaagaagccggcgccgccgccttccgcgtccgtcgtcgtcaagatcgttgctctgacctgcgctgccacggtcacagtgatcgtggcggcgatcggcgtcgcgctctggctgcggcggcgggcggcgctcgccgacacgctcgaggagtgggagcttgaccacccgcacaggctcccgtacagagagctctacatggcgacgaaggggttcaagaacagcgagctcctcggcgccggcggattcggcgaggtgtacaggggcgtgctccggcgatccggcgacgtggtggccgtgaagaggatctcgagcaacgggaggcaggggatgcgcgagttcgtcgccgaggtggccagcctcgggcgcatgcggcaccgcaacctggtcgagctccgcgggtggtgcaagcgcgggcatgacctcctcctggtctacgagttcatgcccaatggcagcctcgacgcgctcctgttcggcggcgcaccggcgacggcgacggcgacggcgctgacgtgggagcagcgggtgaggatactcaggggcgtggcgtccgggctggtgtacctgcacgaggagtgggagcaggtggtggtgcaccgcgacgtgaaggccagcaacgtgctgctcggcgccgacgcgagcgccgcgcggctcggcgacttcggcctcgcgcggctctacgagcacggcggcgacccggccacgacgcgcgtggtcgggacgctgggctacatggcgccggagctcaccgtgacgggcaaggccaccacggccaccgacgtgttcgcctacggcgcgctgctcctcgaggcggcgtgcgggcgccgccccatcgacccggccaccggcgtcaacctgctgcgctgggtccgggagcacggtgccaggggcgagctggtgcacgccgtcgacgagaggctcgacgggcgctacgacaaggaggaggcgaggctggtgctctggctcggcctcgcgtgcagccaggcgaggccggaggcgcggccgagcatgaggcaggtctgccagtacctggacggcgaggaggacgtaccggaggaggccgtgctcgtcttctccgacgtcgattccatcgacttcgggtcgttgacgtcgctgacatggtcgtcgtgcgctacaatgtccgtcggctcgctgaacggtggccgcggggagggggcgcgctgcgccgttgatgagatgaaggaggtggtgctccacgtgtacgacgtgacgaacagcgactcggagaagacgaacaacaccatcctccagatcaaccgcatcttcaaggaccggatcggcctcggcggcatcttccacagcgccgtccaggttcgcctccgcgcggcctcccagatcccccctagtgaggggcgcatttgcttttgcttcgccttcgccttccttcctcctccagatctcgctgattttggttggttctctctcgcccttttttgttcggatcccggaggtgcgcaggtctatggcgaggaggagtggtcgttcgggttctgcgagaacggcagcggcgtcttcagctgccccatcgggaagaaccccatgtacacctaccgcgagtgcatcgtcctcggggagaccgagtgctccatcgccaccgtgaaccggatcctgcgggagctcagccgcgagtggccgggacactcctacgacctcctctccaggaactgcaaccacttctgcgacgtgctctgcgagaggctcgccgtccccaagctcccaggctgggttaatcgttttgccaatgctggtgataccgctgtggtagttgctgagaacacagcagttaaggacaacccgcccagtcagcatcagaataagctgtcaaagagtcaactggtgcagttccgatgtgaagaccaatgtgtagagtacccttga

SEQ ID NO: 100415 - DNA, 903 bp, Oryza sativa
  Clone ID: PAT_MRT4530_98133C.1
atggccaacgtcgtgcccatcaatgacaggaactcgcgcatcaacaactatggcatcaccgaggaggacaacctcactcacctcgacctcggcttcaagttctatgatctcactgataacgtgcacagggtcctcggccagactcaccgctttgactacgtgaacaaactcagtgtcagcgccaacatgccagttatgggtgggactccctggtacgccgtctctgacatcttctccactaaccatgccctccgctacccgtcgccaccctcgccttcgcctcttgtcgccggtagagccctagcgccatgccgcctagcgccgccgtcgccgccgcaggtccagccgtgcgccgccgtcgcttcggtcgtcgtcaccgctcggggaggtcgccgtcgtggtcgtcaagccgtcgccgatctcgtccgcccctccattttcgccgaggaccgccggaacatcgccgtcatcgtcaatccgaaggtcgccgccgtttcttcctcgtcgccgtcgccgtccgttgatcttccgccgtcgctttggtcaccggtgagttcgccgcatcgcccgcatcgtttaggtgttttctgttcgcgccgtcgtgccgtcgttcgccggtgagcttgtgccgtccaagccatcgccggtgatgacgtcatcgccgacgtcatcgttgccgtccgccgtagaccggccgtggaccgatagatctcggccgttcattttggatcgatagatcccgaccgttcgtttccgtgagccgccgccgtgcacccggtccaccgtgaaccctagatgctgacgcaataatcctctttttccttctgtatagtatgattcatagtagagtaccagactgtgaagtggcggagataagcccacgggggtcactggggagtccat

SEQ ID NO: 100416 - DNA, 3195 bp, Oryza sativa
  Clone ID: PAT_MRT4530_98134C.1
atggcatctacatcatccggctctactccatcttctgctgccagcaccggggattctaccggctcgatcttcgtcaacccgtatgccaccgtcaacgtcaagactcacataccaattaccctggagctcaagcaccccaatttcaacaagtggaagaccttcttcacttctatgtgttgcatgtttgggctccttcctcacattgatggcactgcaccccctcgtcccgacgactcgacttgtgcacaagccgattgttgtgttcggggctggctgttcggctccgtttccgatgctatcctcgacgtcgttatggaacccgaccagaccgcccgcgacctatggctcgccatcgacgatctctttcaagcaaacaaggaaccccgcgccatctatctcagtcacgagttccactcaatgacgcaaggtgacatgcccattgccatttattgtcagaaggtgaagactgctgccgatgccctccgcgacgtcggccaccccgtcaccgaatctcagcttgtcctcaacttgctgagtggcctcaactctcgtttttcgagcaccgccgacaacatcaccagcgcccctgttctgccctccttcacctcggcgcgcaacaccttgttgctcaaagagctgcgagttgccaatgcacacaagtctcgtggcggtggctccaacaacggtggtcgccgcaaccagcgacgctacaatggtggccagaacaacagcagtggtggcggcaatggcggacgacagaacaacagcaacggcggcggctatggcaacttcgggaacaatttccagcagcagcagcaccaggctgggccacgacctaccggcccatgggtctgtttcaatccatgggctgtgcagcagcagcagtctccctggcgtcccagcaacagtgccggcctcctgggcccatatcctcaagcacacacgacatttgcaggcccatatgtctctccaccaatgccgggcttgccaccaatacagcaatctcagcccaattgggatcaggcaggtctgattgctgccctcaatcagttgtccgtgcaaagtccaagtccttgggtgcttgacacagaagccacttcacacatgtcctctaccgacggtattctcgttactcgtcttcccaattcccataccttcattaccgttggcaatgctcatactattcctgttatttgtcgtggcacttcttttctacctataggaaccactaaatttgatcttaaaaacatccttgtcgccccctctttgggtgtttctaaagcggtagctccgtcctccttggacgtcgagcatccgctttctctaccggtcgctccctctcctgaggtcgagccgccggatgacttggccggccctgatatgtatcggcttcttctccataatagaaggctacaatcatcgcaagctctagaaccagctatattggcgccttccagtgcatcctctggtgccgatgctagtactacgggggggagcatgtcttcttcatcaccagtgcaaactatatcgaattcttctattgctcagccgcctgccttgcatagtgttccttctgctcggccgctgatctctccatatcgccatacgtatgtgcgtcgtattcagcctgtggcggttcatggtcctatacgcaccaccagagcttttcgagctgcacaacatacacaggatcaacagcgtcatgctatggtaactcgctctcagaccggcaatcttcgtcctgtccatcgcttcaattatactgctatgcagacttctgtttcgccagttccttccaattatcgtagtgctttggctgaccctaactggcgtgcagctatggctgatgagtacaaggctcttgttgataacaacacttggcgtttggttcctcgacctcctggagctaatgttgtatccggaaaatggatctttcgacataagtttcattccgatgggactcttgctcgacacaaggcacgatgggttgttcgtgactattctcaacagcatgggattgactatgatgagacttttagtccagttgttaaacctgctactattcgtgttgttctcagtattgctgcctctcggtcttggcctatccatcagcttgatgtcaagaacgcatttctccatggcaatctagaggagacagtgtattgtcagcaaccatctggttttgttgatccttctgcgcctactgctgtatgtttgctccaaaaatcgctctatggtttgaagcaggctcctcgtgcttggtaccaacggtttgcaacatatatttgtcagttgggtttcacatcttcagcatctgacacttctctcttcatttataaagatggagataatattgcatatttacttttgtatgttgatgacatcctgctgactgcctcgtccacttcacttcttcagcatattactgctcgcctacactcggagtttgctatgactgatcttggtgacttacacttctttttgggaatttctgtcactcgatctgcagacggtttatttctttctcagcggcaatatgctgttgacttattgcggcgagctggtatgtcggagtgtcatcctactgcaacaccggttgatgctcgatgtaaactttctgctatagatggagctcccgtttcagatcctacggagtacaggagtctagctggggctcttcagtaccttactctcacacggcctgagatagcttatgcagttcagcaggcgggttgtcctgattctcgtcgttccacatcagggtattgtgttttcctcggtgaaaacttggtctcatggtcctccaagcgacagaccactgtctctcgatctagtgctgaagctgagtaccgtgcagtagcacatgctgttgccgaatgttgctggcttcgacaacttcttcttgaactacatattccacttgcttcggccactaccgtttattgtgataatgttagcgccgtctacatgaccgctaatcctgttcatcatcgtcagacgaagcatattgagattgatattcattttgttcgagagaaagttgctttaggacaagttcatgttttacacgttccgtcctcacatcagttcgcagatatcatgaccaaaggcttgccagttcagttattcactgagtttaggtccagtctttgcgttcgtgatgttcctcccactttgactgcgggcgggtattag

SEQ ID NO: 100417 - DNA, 3921 bp, Oryza sativa
  Clone ID: PAT_MRT4530_98135C.1
atggcatctacatcatccggctctactccatcttctgctgccagcaccagggattctaccggctcgatcttcgtcaacccgtatgccaccgtcaacgtcaagactcacataccaattaccctggagctcaagcaccccaatttcaacaagtggaagaccttcttcacttctatgcgtggcaagtttgggctccttcctcacattgatggcaccgcaccccctcgtcccgaagactcgacttgggcacaagccgattgttgtgttcggggctggctgttcagctccgtttccgatgctatcctcgacgtcgtcatggaacccgaccagaccgcccgcgacctatggctcgccatcgacgatctctttcaagcaaacaaggaaccccgcgccatctatctcagtcacgagttccactcaatgacgcaaggtgacatgcccattgccgattattgtcagaaggtgaagactgctgccgatgccctccgcgacgtcggccaccctgtcaccgaatctcagcttgtcctcaacttgctgagcggcctcaactctcgtttttcgagcaccaccgacaacatcgccagcgcccctgttctgccctcctttgccttggcgcgcaacaccttgttgctcaaagagctgcgaattgccaatgcacacaaggtccaggctgagacagccatggtggtggctgcctcctctgccaatgactgcacttccggcacctgtgcgtcctcttcttcatcccagtctcgtggcggtggctccaacaacggtggtcgccgcaaccagcgaccaacagcagtggtggcggcaatggcggacgacagaacaacagcaatggcggcggctatggcaacttcgggaacaatttccagcagcagcagcaccaggctgggccacgacctaccggcccatgggtctgtttcaatccatgggctgtgcagcagcagcagtctctctggcgtcccagcaacagtgccggcctgcttggcccatatcctcaagcacacacgacatttgcaggcccatatgtctctccaccaatgccgggcttgccaccaatgcagcaatctcagcccaattgggatcaggcaggacctccgtacccggcgcgtgattcttcgctgcaatagtcgtggtgacctctacactctacctactgctgcacctgctattgctgcccacagcttcctggcccaatcctctaccctgtggcatcgtcgtcttggtcatcccagttcagctgctattcagactctccacaaattagctattcttccttatactaagatagatcatagtttgtgtcatgcgtgtcagttagggaaacacacgcgtctacctttttctcggtctcagtctagtacatcttctccttttgagcttgttcactgtgatgtgtggacctctcctgtcttgagtacttctggctttaagtattatttagtggtgctggatgattttagtcacttttgttggacttttcctcttcgccataagtctgatgttcaccagcatattgttgagtttgttgcttatgttacgacccagttcggctcttccattaagtgtttccaggcggataatggtaccgaatttgttaaccaagccactacctcgtttctcgctagccgtggaaccttgcttcgcttatcctgtccttacacttctcctcaaaacagcaaagccgaacgcatgcttcgcacaatcaacaattccattcgcaccctactcatacaagcatccatgcctccttactgggccgaagctctagccacagccacatacttactcaatcgaagaccctcaacttccgtccacgactccattccgtttcaaatcctgcatcacaaagttcctgattattctaatcttcgggtttttggttgcctctgttatcctaatcttagtgccacgactcctcataaactctctcctcgatccgctgcctgtgtttttcttggttacccggcttctcacaagggctatcgttgtttggacatttctacccgtcatgttttcatctctcgtcatgtggtttttgatgaacagacattcccgtttgcagctattccccaaactgcttcttcttttgattttcttctacagggtgtttctaaagcggtagctccgtcctccttggacgtcgagcgtccgcgttctctactggtcgctccctctcctgaggtcgagccgctggatgacttggccggccctgatatgtatcggcttcttctccataatagaaggctacaatcatcgcaagctccagaaccagctatattggcgccttccagtgcatcctctggtgccgatgctagtactacgggcgggagcatgtcttcttcatcaccagtgcaaactatatcgaattcttctattgctcagccgcctgccttgcatggtgttgcttctgctcggccgctgatctctccatatcgccatacgtatgtgcgtcgtactcagcctgtggcggttcatggtcctatacgcaccaccagagcttttcgagctgcacaacatacacaggatcaacagcgtcatgctatggtaactcgctctcagaccggcaatcttcgtcctgtccagcgctttaattataccgctatgcagacttctgtttcgccagttccttccaattatcgtagtgctttggctgaccctaactgccgtgcagctatggctgatgagtacaaggctcttgttgataacaacacttggcgtttggttcctcgacctcctggtgctaatgttgtaaccggaaaatggatctttcgacataagtttcattccgatgggactcttgctcgacacaaggcacgatgggttgttcgtggctattctcaacagcatgggattgactacgatgagacttttagtccagttgttaaacctgctactattcgtgttgttctcagtattgctgcctctcggtcttggcctatccatcagcttgatgtcaagaacgcatttctccatggcaatctagaggagactcatattactgctcgcctacactcggagtttgctatgactgatcttggtgacttacacttctttttgggaatttctgtcactcgatctgcagacggtttatttctttctcagcggcaatatgctgttgacttattgcggcgagctggtatgtcggagtgtcatcctactgcaacaccggttgatgctcgatgtaaactttctgctacagatggagctcccgtttcagatcctactgagtacaggagtctagctggggctcttcagtaccttactctcacgcggcctgagatagcttatgcagttcagcaggtatgcttgtttatgcatgatccccgtgagcctcatcttgctctagttaaacggattttgcgttacatcaagggtactctacacattggtcttcacatcggaactgcaccagttgactctttgacagcttattctgatgctgactgggcgggttgtcctgattctcgtcgttccacatcagggtattgtgttttcctcggtgaaaacttggtctcatggtcctccaagcgacagaccactgtctctcgatctagtgctgaagctgagtaccgtgcagtagcacatgctgttgccgaatgttgctggcttcgacaacttcttcttgaactacatattccacttgcttcggccactatcgtttattgtgataatgttagcaccgtctacatgaccgctaatcctgttcatcatcgtcgaacgaagcatattgagattgatattcattttgttcgagagaaagttgctttaggacaagttcgtgttttacacgttctgtcctcacatcagttcgcagatatcatgaccaaaggcttgccagttcagttattcactgagtttaggtccagtctttgcgttcgtgatgttcctcccgctttgactgcgggcgggtattag

SEQ ID NO: 100418 - DNA, 4481 bp, Oryza sativa
  Clone ID: PAT_MRT4530_98136C.1
agccccgcaagcaaccaaccaaccaccacccgctcgctcgccgaccgccaccggcgacccaatcacccctcgccgccgccgccggagaaggaggaggagggagggagcagccggcagcggggagggggcgcgctgcgccgttgatgagatgaaggaggtggtgctccacgtgtacgacgtgacgaacagcgactcggagaagacgaacaacaccatcctccagatcaaccgcatcttcaaggaccggatcggcctcggcggcatcttccacagcgccgtccaggtctatggcgaggaggagtggtcgttcgggttctgcgagaacggcagcggcgtcttcagctgccccatcgggaagaaccccatgtacacctaccgcgagtgcatcgtcctcggggagaccgagtgctccatcgccaccgtgaaccggatcctgcgggagctcagccgcgagtggccgggacactcctacgacctcctctccaggaactgcaaccacttctgcgacgtgctctgcgagaggctcgccgtccccaagctcccaggctgggttaatcgttttgccaatgctggtgataccgctgtggtagttgctgagaacacagcagttaagttcagacaggctaaaacagaaatagtcaatgccagtagagtagcatacagatttatggcaggcctggcatcgaaaaatcaaaacccacaaccagagtccccaagtaaccaaagcagaaatggcccaactttccaggggacttggttcaagaacatcatttcgaatggcgcaaagccttcctcaagcgaatcaacttcatcgcatgacactggtactggtggtgatgaatcctctttgcagaatcaaaaaccgtcggagcagtcaacacggttgtagccgctgccaccagttatcacctgttgaattgaatctgtagtgtaacagtagccagcatttgttaaaaatacatggcatgtttattcacgcatgaatctcttgtatctctgcgttgtcttgcaacgggaaacatgaaatgttaaaacacgtctcaaagccaacaacattcggcaacagcatgtgctactgcacggtactcagcttcagcactagatcgagagacagtggtctgtcgcttggaggaccatgagaccaagttttcaccgaggaaaacacaataccctgatgtggaatgacgagaatcaggacaacccacccagtcagcatcagaataagctgtcaaagagtcaactggtgcagttccgatgtgaagacaaatgtgtagagtacccttgatgtaacgcaaaatccgtttaactagagcaagatgaggctcacggggatcatgcataaacaagcatacctgctgaattgcataagctatctcaggccgcgtgagagtaaggtactgaagagccccagctagactcctgtactccataggatctgaaacgggagctccatctgtagcagaaagtttacatcgagcatcaaccggtgttgcagtaggatgacactccgacataccagctcgccgcaataagtcaacagcatattgccactgagaaagaaataaaccgtctgcagatcgagtgacagaaattcccaaaaagaagtgtaagtcaccaagatcagtcatagcaaactccgagtgtaggcgagcagtaatatgctgaagaagtgaagtggacgaggcagtcagcaggatgtcatcaacatacaacagtaaatatgcaacattatctccatctttataaatgaagagagaagtgtcagatgccgaagatgtgaaacccaactgacgaatatatgttgcaaaccgttggtaccaagcacgaggagcctgcttcaaaccatagagcgatttttggagcaaacatacagcagtaggctcagaaggatcaacaaaaccaaatggttgctgacaatacactgtctcctctagatttccatggagaaatgcgttcttgacatcaagctgatggataggccaagaccgagaggcagcaatactgagaacaacatgaatagtagcaggtttaacaactggactaaaagtctcattgtagtcaatcccatgctgttgagaatagccacgaacaacacatcgtgccttgtgtcgagcaagagtcccatcggaatgaaacttatgtcgaaagatccattttccggttacaacattagcaccaggaggttgaggaaccaaatgccaagtgttgttatcaacaagagccttgtactcatcagccatagctgcatgccagttagggtcagccaaagcactacgataattggaaggaactggcgaaacagaagtctgcatagcggtataattgaagcgctgggcaggatgaagattgccggtctgagagcgagttaccatagcatgacgctgttgatcctgtgaatgttgtgcagctcgaaaagctctggtggtgcgtataggaccatgaaccgccacaggctgagtacgacgcacatacgtatggtgatatggagaaatcagcggccgagcagaagcaacaccatgcaaggcaggcggctgagcaatagaagaactcgatatagtttgcactggtgatgaagaagacatgctcccgcccgtagtactagcatcggcactagaggatgcactggaaggcgccaatatagctggttctggagcttgcgatgattgtagccttctattatggagaagaagctgagacatatcagggccggccaagtcatccggcggctcgacctcaggagagggagcgaccggtagagaacgcggacgctcgacgtccaaggaggacggagctaccgctttagaaacaccctgtagaagaaaatcaaaagaagaagcagtttggggaatagacgcatgacacaaactatgatctatcttagtacaaggaagaatagctaatttgtggagagtctgaatagcagctgaactgggatgaccaagacgacgatgccacagggtagaggattgggccaagaagctgtgggcagcaatagcaggtgcagcaataggtagagtgtagaggtcaccacgactattgcagcgaagaatcacgcgccgggtacggaggcccttaacagaaaaaccaaactcatcaaactcaatggaacagttattgtcacgagtgaattgacgaatggaaagtagattgcgaaccaaagagggggcgacaaggatgtttttaagatcaaatttagtggttcctataggtagaaaagaagtgccatgacaaataacaggaatagtatgaccattgccaacggtaatgaaggtataggaattgggaagacgagtatcgagaataccgtcggtagaggacatgtgtgaagtggctcctgtgtcaagcacccaaggacttggactttgcacggacaactgattgagggcagcaatcagacctgcctgatcccaattgggctgagattgctgcattggtggcaagcccggcattggtggagagacatatgggcctgcaaatgtcgtgtgtgcttgaggatatgggccaagcagaccggcactgttgctgggacgccagggagactgctgctgctgcacagcccatggattgaaacagacccatgggccggtagttcgtggcccagcctggtgctgctgctgctggaaattgttcccgaagttgccatagccgccgccgttgctgttgttctgtcgtccgccattgccgccaccactgtggttgcggcgaccactgttgttggagacatcgccatgagactgtgatgaagaagaggacgcacaggtgccggaagtgcaggcattggcagaggaggcagccaccaccatggttgtctcagcctggaccttgtgtgcattggcaattcgcagctctttgagcaacaaggtgttgtgcgctgaggcaaaggagggcagaacaggggcgctagcgatgttgtcggcggtgctcgaaaaacgagagttgaggccgctcagcaagttgaggacaagctgagattcggtgacggggtggccgacgtcgcggagggcatcggcagcagtcttcaccttctgacaataatcggcaatgggcatgtcaccttgcgtcattgagtggaactcgtgactgagatagatggtgcggggttccttgtttgcttgaaagagatcgtcgatggcgagccataggtcacgggcggtctggtcggtttccatgacgacgtcgaggatagcatcggaaacggagccgaacagccagccctgaacacaacaatcggcttgtgcccaagtcgagtcgtcgggacgagggggtgcagtgccatcaatgtgaggaaggagcccaaacttgccacacatagaagtgaagaaggtcttccacttgttgaaattggggtgcttgagctccagggtaattggtatgtgagtcttgacgttgacggtggcatacgggttgacgaagatcgagccggtagaatccccggtgctggcagcagaagatggagtagagccggatgatgtagatgccat

SEQ ID NO: 100419 - DNA, 3501 bp, Oryza sativa
  Clone ID: PAT_MRT4530_98137C.1
gtagatatataggctataaatctagtctaactctaatacccgcccacactcgaagcgggagtatgtatcacgaacgcaaagactggacctaaactcagtgaataactgaactggcaagcctttggtcatgatatcagcaaactgatgagaggacgcaacgtgtaaaacacgaacttgtcccaaagcaaccttctctcgaacaaaatgaatgtcaatctcaatatgcttcgtccgacgatgatgaactgcactagctgtcatgtagacggcgctaacattgtcgcaataaacgacagtggccgaagcaagtggaatatgtagttcaagaagaagttgtcgaatccagcaacattcggcaacagcatgtgctactgcacggtactcagcttcagcactagatcgagagacagtggtctgtcgcttggaggaccatgagaccaagttttcatcgaggaaaacacaataccctgatgtggaacgacgagaatcaggacaacccgcccagtcagcatcagaataagctatcaaagagtcaactggtgcagttccgatgtgaagaccaatgtgtagagtacccttgatgtaacgcaaaatccgtttaactagagcaagatgaggctcacgaggatcatgcataaacaagcatacctgctgaactgcataagctatctcaggccgcgtgagagtaaggtactgaagagccccagctagactcctgtactccgtaggatctgaaacgggagctccatctgtagcagaaagtttacatcgagcatcaaccggtgttgcagtaggatgacactccgacataccagctcgccgcaataagtcaacagcatattgccgctgagaaagaaataaaccgtctgcagatcgagtgacagaaattcccaaaaagaagtgtaagtcaccaagatcagtcatagcaaactccgagtgtaggcgagcagtaatatgctgaagaagtgaagtggacgaggcagtcagcaggatgtcatcaacatacaacagtaaatatgcaacattatctccatctttataaatgaagagagaagtgtcagatgccgaagatgtgaaacccaactgacgaatatatgttgcaaaccattggtaccaagcacgaggagcctgcttcaaaccatagagcgatttttggagcaaacatacagcagtaggcgcagaaggatcaacaaaaccagatggttgctgacaatacactgtctcctctagattgccatggagaaatgagttcttgacatcaagctgatggataggccaagaccgagaggcagcaatactgagaacaacacgaatagtagcaggtttaacaactggactaaaagtctcatcgtagtcaatcccatgctgttgagaatagccatgaacaacccatcgtgccttgtgtcgagcaagagtcccatcggaatgaaacttatgtcgaaagatccattttccggttacaacattagcaccaggaggtcgaggaaccaaacgccaagtgttgttatcaacaagagccttgtactcatcagccatagctgcacgccagttagggtcagccaaagcactacgataattggaaggaactggcgaaacagaagtctgcatagcggtataattgaagcactggacaggacgaagattgccggtctgagagcgagttaccatagcatgacgctgttgatcctgtgtatgttgtgcagctcgaaaagatctggtggtgcgtataggaccatgaactgccacaggctgagtacgacgcacatacgtatggcgatatggagagatcagcggccgagcagaagcaacaccatgcaaggcaggcggctgagcaatagaagaactcaatatagtttgcactggtgatgaagaagacatgctcccgcccgtagtactagcatcggcaccacaggatgcactggaaggcgccaatatagctggttctggagcttgcgatgattgtagccttctattatggagaagaagccgatacatatcagggccggccaagtcatccggcggctcgacctcaggagagcgagcgaccggtagagaacgcggacgctcgacgtccaaggaggacggagctaccgctttagaaacaccctgtagaagaaaatcaaaagaagaagcagtttggggaatagctgcaaacgggaatgtctgttcatcaaaaaccacatgacgagagatgaaaacacgacgagtagaaatgtccaaacaacgatagcccttgtgagaagccgggtaaccaagaaaaacacatgcagcggatcgaggagagagtttatgaggagtcgtggcactaagattaggataacagaggcaaccaaaaacccgaagattagaataatcaggaactttgtgatgcaggatttgaaacggaatgaagttgtggacggaagttgagggtcttcgattgagtaagtatgtggctgtggctagagcttcggcccagtaagaaggaggcacggatgcttgtatgagtagggtgcgaatggaattgttgattgtgcgaaacatgcgttcggctttgccgttttgaggagaagtgtaaggacaggataagcgaagcaaggttccacggctagcgagaaacgaggtagtggcttggttaacaaattcggtaccattatccgcctggaaacacttaatggaagagccgaactgggtcgtaacataagcaacaaactcaacaatatgctggtgaacatcagacttatggcgaagaggaaaagtccaacagaagtgactaaaatcatccagcaccactaaataatacttaaagccagaagtactcaagacaggagaggtccacacatcatagtgaacaagctcaaaaggagaagatgtactagactgagaccgagaaaaaggtagacgcgtgtgtttccctaactgacacgcatgacacaaactatgatctatcttagtacaaggaagaatagctaatttgtggagagtctgaatagcagctgaactgggatgaccaagacgacgacgccacagggtagaggattgggccaagaagctgtgggcagcaatagcaggtgcagcagtaggtagagtgtagaggtcaccacgactattgcagcgaagaatcacgcgccgggtacggaggtccttaacagaaaagccgaactcatcaaactcaatggaacagttattgtcacgagtgaattgacgaacggaaagtagattgcgaaccaaagagggggcgacaaggatgtttttaagatcaaatttagtggttcctataggtagaaaagaagtgccacgacaaataacaggaatagtatgaccattgccaacagtaatgaaggtataggaattgggaagacgagtaacgagaataccgtcggtagaggacatgtgtgaagtggctcctgtgtcaagcacccaaggacttggactttgcacggacaactgattgagggcagcaatcagacctgcctgatcccaattgggctgagattgttgcattggtggcaagcccggcat

SEQ ID NO: 100420 - DNA, 218 bp, Oryza sativa
  unsure (1)..(218): unsure at all n locations
  Clone ID: PAT_MRT4530_98138C.1
cttcctcctcgccggcctcgtcgccgcccacgggaggncgacaccatgatccgtctcccaagcgacggcgccgaagcaccaccacggccgcccaaaccctgggacttctncgacaanatcgagatgttcccgntngagatctttccggcggtttaccnctncaacgacgnggttaagnanttcttcggcggcttcaaagagttcgttgaggcggcccg

SEQ ID NO: 100421 - DNA, 424 bp, Oryza sativa
  Clone ID: PAT_MRT4530_98139C.1
gacagaaaagaaccacaaaactgtcaagctttggatgacgtgttttaacatttcatgtttcccgttgcaagacaacgcagagatacaagagattcatgcgtgaataaacatgccatgtatttttaacaaatgctggctactgttacactacagattcaattcaacaggtgataactggtggcagcggctacaaccgtgttgactgctccgacggtttttgattctgcaaagaggattcatcaccaccagtaccagtgtcatgcgatgaagttgattcgcttgaggaaggctttgcgccattcgaaatgatgttcttgaaccaagtcccctggaaagttgggccatttctgcttttggttacttggggactttggttgtgggttttgattttttcgatgccaggcctgccataaaattggttgct

SEQ ID NO: 100422 - DNA, 342 bp, Oryza sativa
  Clone ID: PAT_MRT4530_9813C.1
atggtggcgaggaagaagagcccgccgccgtggaagacgaagggatcgcagcaaccgcgcggcggcggagaagcggcggcggcggcggggagcaagaaggcgaagaagaagaagaaggagacgccgctgccgccgctgctgccgccggggacggcggtggaggtgctccggaacggcgcgtgggtgggcggcggcacggtcaccatccgcaacgaccgcacctacacggtccgcctcgccggcggcatgaccgtgctcgccacgcggaggagggtcaggccggcgccgccgccggtgacggcggacgtgtcgcctgaaccggacaaggtcgccggcgattga

SEQ ID NO: 100423 - DNA, 169 bp, Oryza sativa
  Clone ID: PAT_MRT4530_98140C.1
gatgtagatgatggtatcgaatcaaactaattaaaccggacagttgttgttgatgatgatataccatcgagcaggagcagctgaggattagcacagaatccatatattggtagctacgagcctacgacctcgctgcctcgtatcgtgaaatgagatactagctagaaag

SEQ ID NO: 100424 - DNA, 502 bp, Oryza sativa
  Clone ID: PAT_MRT4530_98141C.1
cgccatagcgttgcgtgtagcgacgtgtggctgttgtgtggatgcctgtgcggatgtgcgggctgctgtgcctgatgcatgtggcgaacagaatgtgcgccaagtggttgggattggtgtgctacccactgaatgaggggaacgtggagctggggtgttgagaccgtgcggtggagacaggttgagtgtgtgtgaccctgatctggttgtgtgtgagtgatgcttgaatgagtgaatgtgcaatgttgagtgacgaggaggaaccgttggattgcaagtgatgatgacgaaagggggctgggtgggaaacaccattgaccccgatgggcacgcttggctggggttgatgggctggaacgcctgctaagtgcagaacccactgctagaaagggtacatgaagacctgaatgggtggtggttaacacgatgaaagaattggatgaaccgcccaagtccgactggggtgcgctacccgggaggatagaaccaaaaaaaaaaaaaa

SEQ ID NO: 100425 - DNA, 534 bp, Oryza sativa
  Clone ID: PAT_MRT4530_98142C.1
atgacgcggctgacggaagggtcatcgaggatggacaacataagcagctcgagctccaccttgacggtgaggagctcttgcggcgccgcccccaccccatgcgctgccacagcagccgctgcagccggaagcctatccagcgccgcacgctcgagccctgtaatttttccccttcccttctctacttctctcattgacgcggtggaggcggtgaatggtctgttgtcctggtcgtcggtgtcgtggccatccaaccacgcccgccagcaaacgcggagcaagctcgggcgactggcgatggaggcggcagatgggctcgggcacgcggttgtggacgggcagtgggcggcgttgcgtggggacgcgcggtggacggcgggggtggcggcacagcgcgggaggacacggcggtggcgggcttcaccatctcgagctccgtgtcaacgacgccgcgtccaccctcgacgactgcggcttcgtctgcaccacggcgtacgcgtcaacgggttcttggccgcaaactccatcgcctga

SEQ ID NO: 100426 - DNA, 314 bp, Oryza sativa
  Clone ID: PAT_MRT4530_98143C.1
ggaaaacgaaggcatgactgggctataaattagttcctattacccccacaagcatgacggggccacgtttgggaataaatcccaaagaacccttggattacagggacattaccatactttggaagggccatttagggcccttttttttccatttgcaaaaagccaacacccctatgggttcaagaaaaacaagggcaattgggtttaaacaagggggaccaccgcagcaattcccagggaccccccctggaaaaaaacccccagttcgtcaaacaaaatgggagggggcccaccccccccttttggggctttgg

SEQ ID NO: 100427 - DNA, 387 bp, Oryza sativa
  Clone ID: PAT_MRT4530_98144C.1
attcggcacgagggcatggctgttaggcctttaatggaaggcattacccaactccctcacattaagatcttgtgcttgaatttactaacacgagggcatgcttatggagctagtgtgttgcatattctgacaatgtgtactggtatagcagtgctgggcctgagaatagaagaagatttccaggtaatcatgtttcctatgaattccgaacaactgcgttttttaattctaatttctatacctgcagtaaattcttaagtgtaattacaaacgctctgttggtttaggcaggaagttactccctcagtcccatatttgactcatcccatttgtgtcccaaaataagttcatttttaagcaaacattgcatcagagtttgcgaaagtg

SEQ ID NO: 100428 - DNA, 232 bp, Oryza sativa
  unsure (1)..(232): unsure at all n locations
  Clone ID: PAT_MRT4530_98145C.1
cccaccaccaccaccttccttccttcttctctctttctcagtctcagatcagaattatcagatcccgagggagggaggaagggaggccatggncaccgcctttgnntccccgaccgcctcgcccgccgcctntcccttcgacgacgactnnttnctccgcttngacgtcgccgcgcccgntcccgcgccangancgccttcccgccatcaccggagncctacgaattccgac

SEQ ID NO: 100429 - DNA, 851 bp, Oryza sativa
  Clone ID: PAT_MRT4530_98146C.1
atggacagggcaggcaggtggggctcaacagcgggtgaagtagcggcggaccaccacctcctctcccctgttctctctctccccttacacaggagaagaaacgatgggagaggcagcgatggggtgcaaaggagattcgggcagcacggatggagcctgtggagagaggtcaatggcgggagcacctctaagggtgagtggagcgacatgtcactggggagcagcagcgaagagaaggaggacgatgacgaggaggggaaagttgaagatgacgagcaggagcgggtcgaggaggcggtcgaagtggtcgtctccgccgccagcggtggaggaggagagctagtagtgatcttcgctggcgtcacaccgctagcggcgggagcccgtcggatctttgcccatcgccggcgaggcggaccggatctggatgaggaaagacgtggcatcgacagcaaggtggcagccgcacaagtggagacgcggggacgccgccggcaaggtgttgacagaaaacacgaggcctgggagatctgcttaactccagtgcaggtccaaagctcgccttcgggtgtgctagcgtgccagttgatttgatcctgtaatcaataagaaatagaagcaaagaaacctcggttaaatctataaatgatagccgatcggctaggactctatccatgtgcggcaatcaccttgaagcgcctcaattcaacctgatatctcattcatcaagttgcattgtcggaatcggctacaccggcttacctagtccgactcagacccagccaatcctaatcgtagccgatctggtctccagccgattcctgctctgttttcgaactcgatctccgcct

SEQ ID NO: 100430 - DNA, 418 bp, Oryza sativa
  Clone ID: PAT_MRT4530_98147C.1
ccatagaatcggtgctgaccaagatgcacacggcaacaatgtacaggcgtacgccagtgctaataccagcagacagcggccgccgccgtccagcaaccagctgcagcacacgatgtcggagcggaagcggcgggagaagctcaacggcagcttcgtcgccctccagtccaggccgtacgtcctccctcccggctccaagctagacaagacgtcgtcgatactgatcggagcaagggagtacgtgaagtttctcgagtcaaagctgtcggagctggaggagaagaaccgggagctggaggcgcggctagttagcagccccgccgtcgtcgccaagaacgacgcggaggaggcggcggcgccacccgaggctggcggcgagtcccggttcaaatacccggtactaaagatcgatttttag

SEQ ID NO: 100431 - DNA, 1759 bp, Oryza sativa
  Clone ID: PAT_MRT4530_98148C.1
atggcggcggctgaggcggttccgaccggcagcggcgatgttcgaggcggcgctggagaagctagaagctgtcgcagcggcttctccaatcgtcgcattcccctctacggctctacccccaccacacactcaccccgcggctgtgtgttgctgcggttccgaccagcggcggcggcggctgtctccattcccagcgttgagagcacatgttgtatttttgtctcagactttgtttctgtgtgttttttttcaaggatgcctgattggtgtagtggttccaacttcaagcatagatggggtggtgtgaggtttaagcgcactatgcttcagttggaacccgatcaaaagcaattcatcatagataatgactttgaatcttttctatcgctaagcaatttcaaggtccatagtcgacttgcagaatggattatgcaaaagatgaacccagagatttgtgagtttaggttccgtggcaaggttatcatgtttgataagttgttagtacagaagattactgggctaaatgatggcgatctacctgttaagcttagtggtgccaacagtgaagttgtgaaagagatcaggaccctgtaccatccatattttgtcagcaatagacttggtacaggcatgtgcgagaaattgttgctttctctgcatgatgaagagaagttcttgaggactttcattttgtacctgcttgccaccatcttgtgtcctgccactggcaattatgtgaatctcgactatgtgcattctttggttgatgtccagatgtggagtcagtatgattggtgcacatatgtggcgagctgtttgatgcgggaaatcaagaaatatcatggattctctactaagcaacgagattccatttttcagattggagagtgcctccccttgcttgttattgcttacatggatcatttgcaaatgccaacaactggactgcatctccgcatcattgactacagcacaccaagattttgtcatgtcactgatgaggactttgagtatattgttgttgtagaccgttgtaggatgaaccttggctatgtcacatatgggtctcgcccgttccgtccacagaatgagatcccatatctagcccaagttcatgttgttgctggtgggtctgaggctgagaatgctagggttgcaagggctgaagatgttccaattggtgctggtcaagatggtgtaggcattggggctggtgttgttgttgacagaaaacacgaggcctgggagatctgcttaactccagtgcaggtccaaagctcgccttcgaatgtatgagcgtgccagttgatttgatcctgtaatcaacaagaaatagaagcaaagaaaccgcagttaaatctataaatgatagccgatcggctaggactctatccatgtgcggcaatcaccttgaagcacctcaattcaacccgatgtcatacatcaagttgcattgtcggaatcggctgcatcggcttacctagcccgactcagacccagccgatcctaatcgtagccgatctggactccagccgattcctgctctgtttccgaactcgatctccgcctccgacttcgctttgatcaaatcttctttcattaagatgatgtctaagatgatggtcgttaacagtagacgaatagatgaatcttcgctatccctcttaagctcatcgacgtcactcacgtcgatgacggagggcatcctcagaagctcgtcgtcatggccgttggccatggagtcacctgccaccatcat

SEQ ID NO: 100432 - DNA, 733 bp, Oryza sativa
  Clone ID: PAT_MRT4530_98149C.1
cggacgcgtgggttcagcaggagcagcaaccggaggttgccatggcggacgatgttgtggcctcgccggaggagtcgctaacagcgctgctactcgagccggcggcgagccctcgcgacgacccgtcggtggaggtgcggctctaccggcgtggcgccggcccggtcgccgtcttccggtcggccctggtgggcccccgccgcgaccgcctccaggtccgggccatccaggcggagcacggcctccgggcgctcttcgccttcaagcccgagtcctccctccgcggcatccggatccggcccggcccggccgccgccgccggctgctccgccgtgcccttccgcgacggcgccgtcatcgccctcgacggcgagcccaaggggtcgtggacgaagccggcggcggtgatcgtcgccggcgtgctcgtgccggcggtgatggtggcggtggcggtgaaggggtgccggagccgctgcggtcgtcgagggtggtcaacgccatcttcccgccgtggatcctcgccagcgccgtcatcatctacgctcgcatcaggacgcgcccaagggcggctgctccatgacccatcaccaattgcttgctcatcatcatcaccatcgacaacttctcccagtttattttttcctttgtccagaaatttgtacgaaaagaaaagaaccacaatgtaatggtatagtgaacactgaacaaggattgcactggacaactttccatg

SEQ ID NO: 100433 - DNA, 563 bp, Oryza sativa
  Clone ID: PAT_MRT4530_9814C.1
cgcacacctccgctcgtaccccgccttctcctccggcgtgtaagagagcagaggacgtagtagagaaggctattgcaattgctactgaaacgggttttactataagaccctttactaaaattgctgcggccactgatacccctaccaagagtggttacttaatgggttcctcaaacatatcatgtgataatgtatctgcatcaggatctgggaacaaggtcacagtggactacaaagtaaagcttatgggaaaggtcatagtcccgcactgttttgaacaccattaagaaacctatatagatacatacattgtaaatgccggtgtaaatctcggattgtaattcccatttggataatgctctacatgattctgcaaatattcatctgaaaaagtatatcaagaagaagattactttgtaggatagaaccagatggagaactaattcgttgagacatacattctgacatgtattgcggattgtataaatgatagcgacatggataaataaatgtactaagaactttattatatgggtctttggatacttttgctgataataaaa

SEQ ID NO: 100434 - DNA, 636 bp, Oryza sativa
  Clone ID: PAT_MRT4530_98150C.1
atggcgccccctcggcccgcttcaccacagagcttgccgcccgtggctgccacccgatcccgcggtcgcccgtacgagggctggactctcaaggagctgattggggaggtgcgccgtctacgacgagccgcctcctcggcgccgccccggccggcgggcgtcctcgacctcgaccagggggacgcgcgcgcctcggacacggtcgccccctcgccgccctcaccgtgtgaatcccaggagcaaccccaccatcttggcaaggtgcgtaaaatcgtgaatgtagcacacgatattgtggttaacttctgcaatgccattagagcgcccgaagcgttcaaattagtggctgctgctgagaatgtgaaaccacatctgttgaagatagatcatgatgacaaccttctgtttctacaatttaaggctgcactggagagggaacagcaggttcacaatgttaaccatgagattgctatatctcttgacaagtacaccaattgcccactgtccgggacggagattgcagagttaactcagccattgagaagggaatactattctgaaatggttaataggaaccttgcatgtaaaaacttctccatccatttgttagcacttagcataagtctacattattag

SEQ ID NO: 100435 - DNA, 602 bp, Oryza sativa
  Clone ID: PAT_MRT4530_98151C.1
cttaaaagcgcgccccccttttttttttttttttgggggcggacgcgtgggttatttttttttttttttttttttttatagggagtaccaattcagcagctttctgcctaggattggttacaaataaaattgcaatatatgtcaacatcgtgtagttaatcacgaaacgttaatcatttctccattgagtggcaaaaaggtaatcctagatatacaagcaagattaggttttgggaccctctatccatttgcctgtcaggcacgtccaaagctgtccgaattccaaataatccatttgccttttcctctcttctattgagaaagatcaaccaatccaattgtcacaagacatgcccagtgacctaagtcataattttgggtgttccactaacatcatgaagcgcgtcatcatctttcttcgcccattttcccccttttctgaagtgtattcttgagaatcaaggacgtgtaatattgggatgaagccttaagagatgaccaatcacttatcttgcaatctctggatcctctgagcttcttctttgattgaaaaaagggtggtcttgatctcattacaaatccttcctttcagtagcctcact

SEQ ID NO: 100436 - DNA, 512 bp, Oryza sativa
  Clone ID: PAT_MRT4530_98152C.1
tatttcgccctccccggccgtccccgtcgatatcacccgagccctaactcccgactccttcctcgccgcgccgccatggcgccccctcggcccgcttcaccacagagcttgccgcccgtggctgccacccgatcccgcggtcgcccgtacgagggctggactctcaaggagctgattggggaggtgcgccgtctacgacgagccgcctcctcggcgccgccccggccggcgggcgtcctcgacctcgaccagggggacgcgcgcgcctcggacacggtcgccccctcgccgccctcaccgtgtgaatcccaggagcaaccccaccatcttggcacgaggctggaggatgtgcttattttcctacgggatgtcgccttccaggtcatcaagaacggtcgacaagacgaggtgcgttaaatcgtgaatgtagcacacgatattgtggttaacctctgcaatgccattagagcgcccgaagccgtcaaaatagtggctgctgctgagaatgtgaa

SEQ ID NO: 100437 - DNA, 398 bp, Oryza sativa
  Clone ID: PAT_MRT4530_98153C.1
ttaactgaccaatctttaccacgtcgcagttttttacgtgggcatttcttaagcaccttaaaaacaaaacaagcgactttgcaagggcataatgccgtgcgtccgccttgggtaaatttagctaattttttaactaaatgtaccgcttgcgataactgtataacaatctgtgaaacacaaattattgtacgaggtgcgggtggttatcctgaagtagatttcagcaaaggcgaatgtaccttttgtgaaaaatgtgtgcaaagttgtcaagcgggcgtttttctcgccaccagtgaagttgcttggcaacacaaagtcgcagtgcaggaatgttgtttattacaacatcgtatagcgtgtcgttcttgtggcgatagttgcgaaagtcgtgctattcg

SEQ ID NO: 100438 - DNA, 250 bp, Oryza sativa
  Clone ID: PAT_MRT4530_98154C.1
ttttccatctcacagacgacgacgtcgacgacctgaacccagcagaaatcagttcagagatgcatactggtcgtcaggatttggagcagggcgcgagaaattacggagctgagggaggcgagagaccgtggcgccgcaccaccgctcgggcttgtgacgagggcgccgcgccgtgtggcggaaggcacgcgcgcggcagtgacaaactgacaacgacgagggcggcgcggcctggcgggaatcgcgaccg

SEQ ID NO: 100439 - DNA, 449 bp, Oryza sativa
  unsure (1)..(449): unsure at all n locations
  Clone ID: PAT_MRT4530_98155C.1
ccngggtgcaggattcggnacgagctcgtgccgaattcggcacgaatngaagggggcgcnccgcggttgggtttccncccctccntnnntcttnccngcttctnctncgggtcccanncgaaacngaagtngaaccncctgccnaattcnggaataanaaattngccacccggncgggttcnnggggntngcccggtccntctggggtatnattttncncccccnntanttnaaccggcggnttttcnggnggnaaattcaaccgggcggtcagtttnggcccntcctcnntagaaantttcntnatctagggccccctnctnnttggtaatgnattncccggggcnactttgtgtntgggttctccaagggtttccaaaagggcttttcaaaataacggggggggggccaaattttttttcntggttcccaaaggggaaagggttctg

SEQ ID NO: 100440 - DNA, 720 bp, Oryza sativa
  Clone ID: PAT_MRT4530_98156C.1
ccccgttcgtccccttgacctcgagttcgaccgccgcgcgccgatctccaatcccgcgcgagcagcgggcgtctgtgcttccgcgcggaatcctcccgcgccggtgaccatccgtacgaaatcgcacgtccttctcatccctaggcacgcttttcggtcacctcgaatttgcgttaaccctggcttctcttgtagaatctggaagctttttctatatgcctttaccatactagtaacaacagacactttgttccctcacaaaattcatagctagtgctggcttactgcaagacgtacccatattatgagattgtttccaaaaatccaaattactgtgattgcaataatgtaaataaggagccatatcagaaattttcatcgaaactgactggccatttcggacgcgaattcgagggcctatagctgcttctgccttgcaacggggaggagcatacgattgattggaaattgatgtggttgcgagaacgtaaatgagtaaccatgtgggaagtttttactgaaaatgtttgagcataagtatattttggctgcgtggtgtctcttggtggcagtcttgagcttatctgcagtagcttatcctttgaagctgaattgttgtcaatatgttaagataccagctgattaatttgttgttgtcaaaacctgctttggtccattcacaccatgtgctttaaccttttatctcataggttttactga

SEQ ID NO: 100441 - DNA, 1161 bp, Oryza sativa
  Clone ID: PAT_MRT4530_98157C.1
atgcccatggaaatcgtcaccaggcgggacaaggaggggctgcggtgcaatggcgccgacggcgagaagctcccgcagctgctcgactcgccgctccccacgccgcgccggtcgtgcgcttcggcggacgcggccagcgtgcggtgccgccgcgaagcctccccgctgcgcacgcaggtgccgttttcctgggagagctcccctggggtgcccaagaggagcagcgcgtgcatgcacatggcgcaggagatcatgccgccgccgaagccgccgcctgggcgctggaagcagtgccccggcagcaactggtgcggctacggcaactcgaccgccgcgagcagcgacgacgacgatgcgtcgttctccgacgccctggacagggtctccacgcccgatcagcgggtcggctcgttcgaccggatcacgtccaagcgcttcgaggacatcttcctcggccgcgccacgagcttcgtcaatgaccggtcctcccgccgtgcaccagcggaagcctccctcgccacgccgtcctcgtcctcgggcagaggcccgaaacactggcggcgacgcaccacgcgccgcgatcacgacgggcagcagccgacggccaggcaaagcaacgaccaccccgtccaggtgcagcttttgccgcgcatcaacatcaacggccgcgacgagcagatgtcaccgagagcctgcgggctcatggtgttcttcccctggagcgccaagcccgccgtttgcgggttcaggagcccgccggcgcagtacgcgccgtcccctctcgccggcgccagcaacccttcgtcctcacagagccgcaggttcgtcaccctacgcgacgcaatgcaggaggagaacaagaccggcagcggcggccgagacttgccgcggccgcgtggcgagaagaggagccgcgaggaatggcaggccgcaagccgtggatggggcgtgtcgtcgctgctcgacgcgagcaagaagtactgcaccgacgcacggaaggctctgagcaagctgtccatcgggttaggaacggacagcggcagtggcagtggcagcccgagagttggcagcagggagaggaagtgcggcaagcaggacccctcgtcgacgatgccggccatggccaccaagctgacgcagctcaggactagcagaaactaa

SEQ ID NO: 100442 - DNA, 768 bp, Oryza sativa
  Clone ID: PAT_MRT4530_98158C.1
atgacgatgacgatgaccagcggcggccggcgacttgcaatcgagaggcgggcaggtggcgcgggccgcgggggcacgcggcacggggcaagggtgcagggcagcaggccagcggcgcgtcgggatctgggtgaggtgtcgatatcgatgattctcaagttcgaaattatttttaggttacataacaaaatagctttcatacttgaatttggagtgaatgtgactataggaatgagggcctcgggactgcaagatccggtggcgctggtgagcatcggcgggtggagccccaaccagggcacgccacagctagccatcatcctcaacccttccttgcgccgcagatgtggcctttgccctgggtggccatattgggcggcggcaatgggattgagcgacctcactttaagtacagaactggagccaatgggattgagctctactgaacaaggcaagttaggcaccctcactggcagtagacaagtggagccaagggggaagagcatgggtactgcaattgacggtgagcccactgcaattgatctctttaatgagttgcattgcagcaaaactaaaggttttagtgaacctgtgaagaaagctatagttggcgcttttggtggccggagttttttttgcgttggttgctggaaaacaggattttttggcactagttgctggcagctggcaggatgcaggccggaagtgcggtggctgcttggtggaatttttttcctggctgctggcaagatgaacgccgaaacttag

SEQ ID NO: 100443 - DNA, 321 bp, Oryza sativa
  Clone ID: PAT_MRT4530_98159C.1
atggctaggacggcggcgaggtacggctggaggcagcaaatggcagtgatagctcaggtgcacggtggaagaggagttccggtggtgggcgcagcggagagaccggaattgggggcgaccgtggggcggcaaggcgccgcatggcgcggttgggggcggctggaggtaggagatggccccgataggtggggcccacctgtcggcggctcgaggagaggagggaggaggggggaggcgagctgggctggcggcctaagaaaggagaggggaggaggcggaagggccaggaagggaaaggggaggcttgggccgagcccatga

SEQ ID NO: 100444 - DNA, 1097 bp, Oryza sativa
  Clone ID: PAT_MRT4530_9815C.1
tcgagaagccacaaaccccagcgcgatccgaggtagaagaagaagaagaagaagaagaagaagaggcgatcgagagatggagagcgccatgttcgggctggagacgccgctgatgacggcgctgcagcacctgctcgacatccccgacggcgagggcggcgccgccggggaagcagggcgcgaccggtggcccgacgcgtgcttacgtccgcaacgcccgccccatggcggcgacccccgccgacgtagatcgagaagccacaaaccccagcgcgatccgaggtagaagaagaagaagaagaagaagaagaagaggcgatcgagagatggagagcgccatgttcgggctggagacgccgctgatgacggcgctgcagcacctgctcgacatccccgacggcgagggcggcgccgccgggaagcagggcgcgaccggtggcccgacgcgtgcgtacgtgcgcgacgcccgcgccatggcggcgacccccgccgacgtgaaggatctgcccggggcgtacgcgttcgtggtggacatgcctgggctcaagtcctccgacatcaaggtgcaggtggaggaggagaggctgctggtgatcagcggggagcggcggcgcggcggcggggaggaggagaaggaggagtcgtgcaagtacctgcggatggagcggcggatgggcaagttcatgcgcaagttcgtgctccccgacaacgccgacgtcgacaagatctccgccgtgtgccaggacggcgtgctcaccgtcaccgtcgagaagctcccgccgccggagcccaagaagcccaagaccatcgaggtcaaggtcgcgtgatgagattccgcatctctctgcatctgcgtcgctgcgtggatcaaagaatcgaagcttgagttgagtgagttgtgactagtagtatgagtagagtgttcatctttatcgtttgctacgtgagaatgtgaggacatggtggtctgtatgccgtatgcgatgtgatgatgatggatggtttgatgtttggtaatggaaatggggatgttctgctgcttatctgaataaatatactctgcatcttttgaaaaaaaaaaaaaaaaaaaaaaaaaa

SEQ ID NO: 100445 - DNA, 963 bp, Oryza sativa
  Clone ID: PAT_MRT4530_98160C.1
atgacgacgatgatgatgaccagcggcggccggcgacttgcaatcgcgaggcgggcaggtggcgtggggccgcgggggcgcgccggcgcggggcaggggtgcatggcaacgggccagcgacacgtcggcgcctcggcacaggagctgtacgccgtcgcggcggccagcgagtcggcgaccagcactggaccagcaatggttgcgccggaatgccaaccaaagaatgtgactacaggaatgagggcctcgggactgcaagatcaggtggcgctagtgagcatcggcgggtggagccctaaccagggcgtgccgcagccggccatcatcctcaacccttccttctcgcgccacagacggggcctttgccctgggcggccatattgggcggcggcaatgggattgagcaaccgcactttaagcaccctcactggcagtagacaagtggagccaagggggaagaccatgggcactgcaattgacagtgagcccactgcaattgatctctttaaggagttgcattgcagcaaaactaaatgttttagtgaacctgtgaagaaagctatactcgctgccaagacaaccaatgtgatgaaagagatacaagttgaactagatgcaaagaagctagagtctgcagtacttcaggaggagcttgaaagattgaaggcacaggagaactatcgtcactgcatcaatgacgatgtcctctggtggtcacagaagctgaagcccaaaattcctgtagtggccgttgcccgaataattgctcgcgttgaggtggaagaagaagctccaggtgtgacctgcggcctggaacttggacgactcgatgtcgtatttgctgccgtggtgagatttcttgatcgcgttgcgtactttgatcttgagaaggttgcaaccggtggcggccgccgacgtagtggtggccgtcgacgcggtgacgacgtccttcgtcggcgatga

SEQ ID NO: 100446 - DNA, 885 bp, Oryza sativa
  Clone ID: PAT_MRT4530_98161C.1
atggcgatggtggctgcaacaatgacgacgacggcgacagctgcgacggtagctgcgacgacgacgagcgtcggcgcctcggcacaggagctgtacgccgtcacggcggccagcgagtcggcgactaggagcactggaccagcaatggttgcgccggaatgccaaccaaagaatgtgactacaggaatgagggcctcgggactgcaagatcaggtggcgctggtgagcatcggcgggtggacccctaaccagggcgtgctgcagccggccatcatcgtcaacccttccttctcgcgccacagacggggcctttgccctgggcggccatattgggcggcgtcaatgcaattgagcaaccgcactttaagtacagaactgaagccaatggaattgagcactactgaacaaggcaatagacaagtgcagctaagggggaagagcatgggcactgcaattgacagtgagcccactgcaattgatctctttaaggagttgcattgcagcaaaactaaaggttttagtgaacctgtgaagaaagctatagaggatatgcatgcacaggaaatcctcacttcaccatcagtagaagatgggcagcaagctaagacttctattgaagatgtttccaaactcgctgccaagacaaccaatgtgatgaaagagatacaagttgaactagatgcaaagaagttagagtctgcagtacttcaggaggagcttgaaagattgaaggcacaagcactggagaactatcgtcactgtatcaatgacgatgtcctttggtggtcacagaagctggttagcgactcaccttctgtgatgacaaccattttgtcactgcgggtagtcagtgacaggaaacaggctgttatcttcataatgtaa

SEQ ID NO: 100447 - DNA, 225 bp, Oryza sativa
  Clone ID: PAT_MRT4530_98162C.1
atgtcgtcatcgccgacgaaggacgtcgtcaccgcgtcgacggccaccactacgtcggcggccgccaccggttgcaaccttctcaagatcaaagtacgcaacgcgatcaagaaatctcaccacggcagcaaatacgacatcgagtcgtccaagttccaggccgcaggtcacacctggagcttctccggctgcggcacgccctggttagggctccacccgccgatg

SEQ ID NO: 100448 - DNA, 1127 bp, Oryza sativa
  Clone ID: PAT_MRT4530_98163C.1
gcatacaactagcttaaggaggactgatctgaccctgtccaaatgccatcatatgtcgaaggaggccctgatgatgaagtgagggcttcccgggcatgcatatcctcctagcaatcaaagcaaggtttcagttttgtattattatataaataaaggttcattgcataagttacttaataaaagaaggaaagaagatgtaatagttcagtacttactatagctttcttcacaggttcactaaaacctttagttttgctgcaatgcaactccttaaagagatcaattgcagtgggctcactgtcaattgaaatgcccatgctcttcccccttggctccacttgtctacttccagtgagggtgcctaacttgccttgttcagtagtgctcaattccattggcttcagttctgtacttaaagtgtggttgctcaatcccattgccgccgcccaatatggccgcccagggcaaaggccccgtctgtggcgcgagaaggaagggttcaggatgatggctggctgcggcacgccctggttagggctccacccgccgatgctcaccagcgccaccggatcttgcagtcccgaggccctcattcctgtaggcacattccagatcccgacggcgccgctggcctgctgcccctgcacccttgccccgtgccgcgtgcccccgcggcccgcgccacctgcccgcctctcgattgcaaagtcgccggccgccgctggtcaatcgtcatagtcatcgtcgcagctagcgtcgccgctgtcgtcgccgtcgttgcagccactgtagctgtcgtcagccagcagccagccgccaccgtagccgctcgctcccgcctacctaagcccgccgccgccgctccggagggcggaggtgggtggatccgtgtgttgccggtgctcccgctcacgccaggccgctcccgagtacggaggccactggattcatgcgccgccgtcactcccgaggacgggaggcggcgaatccgctcgccaccgtccttccctggccgggggagcgacacggggaaaggcgaagaggtggctgggggcggcccgatggattgaggaggagagggatgttggcggtgggggaatggatggtggcgccggcggccctcgtgc

SEQ ID NO: 100449 - DNA, 1723 bp, Oryza sativa
  Clone ID: PAT_MRT4530_98164C.1
tttttttttttgcataattatactataatcacattccagccataattaattttctagcccatacaaaagcaagtttcagaatacagtttccaacatgttccatacaaaagaacgaaacatgaatacaaaatgttccatccaccatccaactacacaagtcccagccgactacgaagttcctacaggaagtgtcaagttcctgcaccaaaaaaattccacctagcagccactactaagtttcggcgttcatcttgccagcagccaggaaaaaaattccaccaagcagccaccgcacttccggcctgcatcctgccagctgccagcaactagtgccaaaaaatcctgttttccagcaaccaacgcaaaaaaaactccggccaccaaaagcgccaacctgcaagcaaccagtagctagcaccaagttctagcagccacatacaccatacaatagcagccacatacaccaagttctgaagtaccaaaagcgatcacagcctcgaagttcaactacactaacacgagccatcaaattccaagctcagccacctcattcctgagcatacaactagcttagggaggactgatctgaccctgtccaaatgccatcatttgtcgaaggaggccctgatgatgaagtgagggcttcccgggcatgcatatcctctatagctttcttcacaggttcactaaaacctttagttttgctgcaatgcaactcattaaagagatcaattgcagtgggctcaccgtcaattgcagtacccatgctcttcccccttggctccacttgtctactgccagtgagggtgcctaaccttgttcagtagagctcaatcccattggctccagttctgtacttaaagtgaggtcgctcaatcccattgccgccacccaatatggccacccagggcaaaggccccatctgcggcgcaagaaggaagggttgaggatgatggccagctgcggcgcgccctggttagggctccacccgccgatgctcaccagtgccaccggatcttgcagtcccgaggccctcattcctgtagtcacattccagatcccgacgcgccgctggcctgctgccctgcacccctgccccgcgccggcgcgcccccgcggccccacgccacctgcccgcctcgcgattgcaagtcgccggccgccgctggtcatcatcatcgtcgtcatcgcagctaccgtcgcagctgtcgccgtcgtcgtcgtcgttgcagccaccatcgccgtcgttgccgcagccgccgccaccgtagccgctcgctcccgccttcctaagccctccgccactgctccggagggcggaggcgggcggatctgcgtgctaccggcgctcccgctcacgccaggccgctcccgaggacggaggccgctggattcatgcgccgccgtcgctcctgaggatgggaggtggcagatttgcacgccaccgtccttccctgggtgggggagtgaggcggggaagggcgaagagacaaaacgccgcaggggcaacgacgcctctccgacgtccttcgcgtcggctagaacaacgctgccgccgccctcaccatcgatccgctgcctcggaaaaatccacccgagcactgctgtcgtcgacgccgctcactgccagatcgagagcctcatcgccggacctctccacgtcgcctcatccccaactagccacatgtcgaaacatgaattcggcaataataaaagggggtag

SEQ ID NO: 100450 - DNA, 1884 bp, Oryza sativa
  Clone ID: PAT_MRT4530_98165C.1
aaaaaaatttgggagaccacccacaaatcgctcgtcggcgagcgaatccaaaccaaatccttgttctagtcttgtatcacccgcatctgcgcgtccctctgcggcggcggcggcggcgacggcggcgatggggctggagatggaggggatggcggcggcgatcggcgtgtcggtgcccgtgctccgcttcctgctctgcttcgcggccaccatcccgacgggcctcatgtggcgggcggtgcccggcgccgcggggcggcacctctacgcggggctcaccggcgccgcgctttcctacctctcgttcggggccacatccaacctcctcttcgtcgtgcccatggcgttcgggtacctcgccatgctcctctgccgccggctcgcggggctcgtcaccttcctcggcgccttcggcttcctcatcgcatgtcacatgtactacatgagtggagatgcatggaaggagggtggcattgatgcaacaggtgctttaatggttttaacattgaaaatcatttcatgtgcaataaactacagtgacggtatgttgaaggaagagggtttgcgtgatgcccagaaaaagtatcgtttggctaaacttccttctttgatcgaatattttggctactgcctctgctgtggcagccattttgctgggccagtatatgagatgaaagattatcttgaatatactgaacggaaaggattatgggccagcccaactccttcaccactattgcctactttgcgtgctctagttcaagctggcgcatgtatggggttatatttgtatctatcacctcaatttccactttcacggtttagcgagcccttatattatgagtggggtttctggcaccggctcttctatcagtacatgtcaggctttactgctcgttggaaatactactttatatggtcactttcagaagctgcaatcattatatctggtctgggttttagcggctggtctgattcatctcccccgaaagccaaatgggatcgtgcaaaaaatgttgatgttttaggtgtcgaattagctacaagtgcagttcagttgccgcttatgtggaacattcaagtgagcacatggctgcgatactatgtttatgagaggttagttcagaaaggaaagaaacctggtttcctccagttgctgggtacacagacagtcagtgctgtctggcatggtctttatcccggatatatcatattctttgttcaatcagcattgatgataaatggttcaaaagtcatatacagatggcaacaagcagtcagcaatccagtcttccacgctatcctggtttttgtaaatttttcatacaccttgatggtccttaactactcatgtattgggttccaggtactgagcttcaaggaaaccctagcatcctaccagagcgtatattatatcggcacaattgttcccattgtagttgtcttgctgggttatgttatcaagccagccaggccagtgaagccaaaggctcggaaggcagaatgagcaacaagttgacctggtcaagtggtcattacatataggagcgacgaagaacatttaatgacgataatgacgaactagtgtccagctattctactgtggaatttcgcaggagaatgtgatgactcacctcttaaagttctgaactcccttgtgattgatcaaacattaaaacgtggcactcccgttggatttttcttctatgttatgactactactacaactacataggatatcggccttgcgccttcggttgttgagttctcttctgaccgactgtcattcaaagcgatgtattttttatcaccttccctggcctggagccaaatggaggtgtgaatgggcatcatttcttggttcacaaaaaaaaaaaaaaaaaa

SEQ ID NO: 100451 - DNA, 360 bp, Oryza sativa
  unsure (1)..(360): unsure at all n locations
  Clone ID: PAT_MRT4530_98166C.1
actaaaggggaataagncttgctgggcgctggaaggaacaaacagcctctggagcataagcttaagcagaaggagccgaagtagctgcagcactatcagaagaaggggaacaatccgaacccgttctccatcgaatcaaccggtcttcggctccgtccgggcacaggctggtggtgctgtgccagccgtcagggcgggacatctccgtgcggtactagctgggcggggagctcgggcgccgcgagttttgggtaacctacctctgcacggagcgagagacgggggacgtctacgcgctgcttgtgctttctcaataagaaactccgtaccgtcgtggacatcgatgacgtgcgcggggag

SEQ ID NO: 100452 - DNA, 1453 bp, Oryza sativa
  unsure (1)..(1453): unsure at all n locations
  Clone ID: PAT_MRT4530_98167C.1
atggggaacgcgttccggtgcatgtcgcgcaaggagcaccgcggcggcggcggcgcggcggtgtcgcggagcaagcggatggggagcgcgcggtcggggcgcggcggtggcggcgggaagctgacgcccgcggaggaggagctcctgcaccggcaggcgctggccatggccatccaccagcacctcgacgccggcggctccatgtcgcgccgcatcgacgccggcggctccatgtcccgccgcatcggccctggctccaccagctcacgccgccgcggcgacctcccggactccgtcaccggtgccaagcccgtccaaatcgttttagagaacttagaaaccaagaaaattgttcttgttcatggagaagggtttggtgcttggtgttggtacaagaccatttctctcttggaggaagctggtcttgatcctattgccttagatctcacaggttctggtatagacaatgctgacacaaacagcatagctacattagcagattactccaagcccttaatcgactacctcaataaacttcctgagaatgagaaggttattttggtcggccatagttgtggaggtgcaagtgtgtcatatgcgttagaacaatgccccaaaaagatatcaaaggctatatttcttaccgctacaatggtaaaagatggccagaggccctttgacgtgttctctgaggaactcgcatctgcagatgttttcttgcaagaatcacagcttttaatttacggaaatggtaaggacaagcctcctactgggctcatgtttgacaaacagcagatcaaggggctatatttcaacaccagtccttccaaggataccgtgctggctgcagtgtccatgaggcccatccctctagccccaatcatggagaagctctccctcaccccagaaaactatggcaccgtcccacgctacttcatccagacgctcgatgatcgaatgctctcgcctgatgtccaggagaagctggtcagggagaacccgcccgacgggatcttcaagataaagggtggcgaccattgccccttcttctcgaagccgcaatccctcaacaagatcttgcttgagatcgctcagattcaagctccgacggcgctgctcccaggcaaggcgaagacggaggcgatagaggcaacagaggctaagacagaagaagagaaaactgagaaattatcatgactttgtattgtgtatgtacatgtaagggtagtagcacataggttgcaaacaggaggaaataccaggatcaattgaaaccagtcggctgccagaataataatgtaccagtaggaagacgaaaaaatgttgttcttttttcttcttttgtgatcaagtatagagaatgagcctatgagagatcttcagtcagatatatgtttaaccttgtgaattacaggttcttcagtctgaacattttcatcttgcnnaaaaaaaa

SEQ ID NO: 100453 - DNA, 237 bp, Oryza sativa
  Clone ID: PAT_MRT4530_98168C.1
atggcttcgtcagattgggagatgaatccacatgtacttcatccacacatggacatgccttttgtaatggataatggcatatcttttgaagaaggaggtaccacggtcggcgtgatcttcgcctcgaactccgtgcaggcggcggcgccgacgctgagaaccctcccgccggcatctgggccgcgcctccattctcccgcgcaagctcgctccggcgaactctgtgttcctcactag

SEQ ID NO: 100454 - DNA, 1248 bp, Oryza sativa
  Clone ID: PAT_MRT4530_98169C.1
atgcagaaacctggaattccaggttgtggtgttctcatgttgtgccttgcatggaaactcctgaaaaatctttcagtttaccagtgcttccgacatctcaacaaggtgctcacgccaacattttccggtccagacttgcaagttcccaacatatctgtcatggacttcccacctggtaaattgttactagtaaacattcttgcctttctattcatcgagagactgcttttacaggacaagaagctttctactagtttctatatacagctgaacatgtggacgcctaaaagaaacaagctcaaaatctgtggatggatcatggatatgagcaaaaatcttgaagagaccctcttggtgaatgaacgtaacatggataagaacagtttgaaaggtgcgattgatcatgaggcatgcagctcagtagtgggccggacagcccaaaccatgcacaactgcaagagctccatggatttggtgctcgtcccatgcgggctggcgatcatggtcggctaccacctcatgctcctccaccggattctccgccacccgcacaccaccgtgatcggctacgagaatcacaacaagctcgcctgggtggagcgcatgctgcaggcggcggcgccggaggagtcggcgctggcgctgggcgtgatctcggacaacatctcggcggcgacgacgctggcgtcgctgtgcatcgcgctgggctcgctgatcggcgcgtgggtgagcagctcgccggcgccgggcgccgcgggcgtcgtcgtcctcggctacggcgacggcagccacgcgacggcgacggtgaagtgcgtcgcgctcctcgcctgcttcctcgcctccttcacctgcttcatccagtcggcgcggtacttcgtgcacgcgagcttcctcatgagcgcgctcgccggcgacgcggcgccgccggtgggcgacgcgcagcgcgccgtggtccgcggcggcaacttctgggcggcggggctccgcgcgctctacctcgccacggcgctgctcatgtgggtgttcggccccgtcccgatgctcgcctgctccgtgctcaccgtcgccgcgctccaccgcctcgacgccaactccatgccgctgcaccaccaccggttcacggcgaggagcacggacgcgtcgccggcgacggcgccggtggccgccgcgagatcagccgtggcaaggggaggcagagcaggcaatggcaacacggtggcgttctccacggctacatttctttgctga

SEQ ID NO: 100455 - DNA, 246 bp, Oryza sativa
  Clone ID: PAT_MRT4530_9816C.1
atggcgctccccctcctcctccaccaccgctcccccctctcccaccagcgcgacgcgtggagaggacgggagagggagaacctgtcccccgccgccaacgactcagacggtggccacatcaacctcttctctgcccgcggcggctccggcggtgttgccgacttcgcggcgctcgcctccgccgacggtgggaggggcaccgccagggagtgggagcctcccgcgaaccctaaactgatattatga

SEQ ID NO: 100456 - DNA, 5943 bp, Oryza sativa
  Clone ID: PAT_MRT4530_98170C.1
atggatgaatcacgaaaaagagccgcatctactgcaaatgctaatagttcatcccttggtgtagattttggcagtcattttctttcatcttggaaattaccaaaatcaggaaatgacacgattgactttggcgttgagtctttgccgaagtatagcaagaatttcagctttgacaacctgaatgattttgggcctgagggagcctttgacaaattgtcgtcatttaaaatgggcatgtctgatctagatttctctggtcctttcaaaaaaaaggtgaagcccaacgactctaatggcaacgatcttactgaagggttaaaagggactgagaaggacaacttatccttttcctttgatttcaatgagctgggcaagttcaatcttgatgctaacttgggaatggcgaagaatggtatttgtaaatttgtagaaaaggtctaccctgtctcttcagagtgtgacaaggatccaagaaaaggtctttcagttaagggctctgatgttctgggaggtaacattagtaaggaacaaaagcaaacacatgatgcttgtactctgaggcctactcatttgggaagctttagccctgcaagaatggaccaaaataaagtagatttgctctcaactgatacacatgaagagaaatctaatgagacacacccatcaagagcagctgttaacaagccttctcagaatcttccttgcagttctacacctggtgaagatcctacacacgtgactacaacagcagttgctgagaactgtagagaagctcctttggtggaacttagtaaagttcatatatcaagggggaataatgatagtgggcaatcagttagttcacaattcatgaacaccagcaccacgtgcccctccatctcaagaaaattgacggcccaatcagattcccaaaatgaccagaatgagattgtgggggaaagtgcatgtcttaatgcacaaagtcctgataaccaaaggtttagaggaacttcaatgaagcttctgaagaaaacatcatgtgaaacaaagaaggctgaaaaggggacttcaggtccaaagagtctctcttcatcaatgcagagggatatgagaaatgtcaaacccgcatcattgaatgaagcagggagtttgtctcttccgccccagtcttcaattgttaaagcaagcaggcctcctcaactaacttctgaaacaaccttaaatcaattaagtagtgccaataacatggtaaaaaagatgaatacacattctactgagttgaaaagggaaagcacacaagctaatgcaagatctgaaaggcctaaaattgcttcgtcaaaaacattctgcaagccagcattacatgagctgttgaccacctccatgaatgccaaagatcataagaattccaaacttagtacagcagaatgctctatatttaccgtattttatccccttgatccttccactgcattgatggttaacaagcttccttttcccagacttgagtctcctagcacaggcaatgtttctacactgaatgctcctagcagcccagcacatagcaatggacataagaccgttgcgagtcggtcactcttgggaagtaccaatgtttttgatgcaggaaaaggcactcctaaagctgacaatagaccactttctcaactgaaagcagcaaaaattactaaagcaggcaccataagttcaaagtctgacttgcttctggagaaggatatgatggaaacgagcgggaggaagggttcccctgtaacaacatccaataacccaaagtcctatggtgaaggaaaatatgtgttgcctagcccatccatgatgcaaaagactcctaaggaatcagcttcagatccaaaagctcctgctatgctgaagcacatcatgaaatctccagctattccaggaagtggaactccaaaagcacgcatggataatgccattgcttcagcaatatcatgtgagatgggggaaatttctgaactagagttgcctgcgctgttagaaaatgatgtaaatgtacaaaaagctgaggcttgtagaaaggagcttgaagataaatttgctagcaatctgagatccaagaaggttttattcgaggatattagtgccattgatgctgtgctagacctttatagtgtgatcaactaccataaggattatggcaccatctcttgttctatttccccattggccattcccatgtctcctatacatcatttggatgttccttgcatgcaccctttatcactttatcagactactttattttcttgtttaagatggaaaagcattaatgtgagactaaaatggagtgactgtgcttcacccaggaagaacaccggtactgtaaatgcaatttgctacacacctgttattctgggaagtatgcggaatttgtacttaggaattggggatgactccactggaccaagagcagagaaaaagaaacacggttcaaggggggcatgtgcgcatactttagttcgtaattgtgtggatattgctcgtagcgtcgtgaactgtgtccttgtggaccgaacgactagagtaccccttgttgttgatccctggtgctctatagtctgtcctgggcaaaatgcgattgaagaagtgctattgcatacggttttatgccatggacaaaaattactcagtaatgtggtaggcgatgtacccgtcgacagcaaggcgtctgtgttgactttatcaatctataggatggatttgccggcccagtcttcgaagatactcataggggtagagtttgcgtgcgttcataggggtgagtgtgcgtgcgtttggaagattttagggcgtgctgaagaagctgacaggatgatggatttagaagagaagatgaagatcgttgctgctaatactggaatcgacctggtctcactcctgcggcggcggcagcggcgctgtcgattcaccggcgacggagctgcgacagccaacgagattggattgtctagggtttggattttgggggttatggctccatctgagtgcccgccggggtcacatgttgattggtcattgatcatcaaggtcacaagttggccacaagacatcactgataatactagtgtgcaaatgactatttttatgtttgatcgtcatactgcgtttagtataaacgttagaatccccccatatgatgctaagatggatgatgggtcagagctgccaatggaggggcaagagcactcatggtgggtgaatggtgtagttagcatggaccgtatggttgaggatttaaagagccaagtcatctggggtagtaggcagaaacctattttctatggaactgaccataggacatgtgaaactattgagatttcaagcaatttggtgctcatttctcaattcattgatagatttgataccaaggtgatgaacttgcttgttaatataatggacaaatcagacactttagatggctccaatactgctatagctgctattgattctggctctgtagtgaatgatgatcctcctgctcctgctactcatgctgctggtccttacaatgttgttgctcctggtgctgtcggtgcttataatgttgatgctcctagtgttgttgctcatggtggtattgattgggatgaactaaacatccagccattgacagttgaaggtggatcctgtcatgttacatttgatgaggatgagatgtttgacatgctgggactaggtggttctgatattggagcagatgaggcaacaactagtcagtttccaccagttgacctagagcaaggaatgacagaagcagctattcctgtgaatgatgatgtgggtgttgagccaaacagggactgggacagagatgacccaatcatgaatgtagacactatttacccaaaatggctgtcaggcaatatgccatcaatgaagaatttgagcttggcactgagaagtctgaccctaccaggtttaggggattctgtacagcagatggtgcaaataaatgcaggaaagcatgattgttcctctactagcagggttcttggaagaatggcatcacaagcttgggtagcagatagagctgctgcaattatgaggaagaagccaaattgtggggccaaggagctaaagaccatattagaggagcggtacaaggctgagatagagttgaggtgtcctggcagtcgagttgaaattggtaccaaggaagtaaatggtcaagttcactttgagaggttcttttgttgctttgagccttgcatcacaggtttcttgttaggatgcagaaaataccttagcattgattctacggccctcaatgggaagtggaatggccacttggcagcatcaaatgccttagatgggcataattggatgtacccaatggcatttgggttctttgatgcagaaaccactgataactggacttggttcatggagcaacttgcagtgtgtattggacatgtggaagacctggcaatatgtacagatgcttgcaagggcctagaaaatgtagttgagagggtttttcctaactgtgaggagagggagtgctttaggcacttgatggaaaacttgacaaagaggaaaactggtacagtttatggtaacttgtggccagctgctagagcttttaggtctgagatctatgactatcacatggataaggttttatcagctgatcctgatgttggtgattggttatacaaacatcataaaattctgtgggcaaggagcaagttctcaccaaagatcaaatgtgacttcatcactaataatgtggctgagtcatggaatgcatggatcaaagaattcaaggaactgcaagttgatgccctagcagatgcaatcagagagaagacagcagccttgtgggctaagagaaggaagattggagaaaaactagaaggcagaaacattttacctgcaattgtcacacaactaaaggcagcaactagaggtttagccaacatgagagtcatgaagggagcggatgatacagctgaagtgactgagctccataatagtgttgaagtctataggcatgttgtgtatcttgaccaacagaaatgcacatgtagggagtggcagttaacagggaagccattctctcatgctcttgcagctatctccaaacaaaggaatccaatcatggatgattttgttgatcccgttttctctgttagttgctttagggctgcatatgaaggtgtcatcccctgcataactgacaagtcccaatggccaacagcgaacaaagattttaagttgcagccaccagtgcccaagcctagaactgttcctaggcaaaggaaaaacatgattccttcttgtctggagaaggggaaaggaaagatcagaaggcaggtgaattgcccaagatgtggtgggctagggcatagacagagcagccaaaagtgtcctcttaatgggaccaaaaagaggaagaggaaggcaaagaatattgctacaaaagctaggaaaaagaaaactgctaaggaaattgttgaaactccaacaagatcaaaggttgctagagttcaattagttgatagccctgctcgagtcactaggagtcaaacaaggacaactggaacaccaactattgctagagaaggatgctcacaagattcacctggaccagtgacaaggaggcgcttggctatgactgaagcaacaccatcacagccactaccaccaaccaagaagaaattgactccaaagaaaaaacagaactgatgttgcctttttgcttttgttacatgaaactggactcaagaaagatggggttatttatgtatttaatggcagcaaagaccaatgttaaggccagccatgcttgctactagacgtgctatgtagaaatgcagaaaacaatatttgaagcctatactattttagttctaagaaatgttccgttgaattgcgttatatacttgttattatggtgcaatgtggctgatatattttgtc

SEQ ID NO: 100457 - DNA, 760 bp, Oryza sativa
  unsure (1)..(760): unsure at all n locations
  Clone ID: PAT_MRT4530_98171C.1
ccacgcgtccggtttgacacattctgtccatcgtgttgcaatcatgccagagaaagggagcaagatcgaatcaagataagagtagaagagaagaacagcaagattcagcaactaaaaattagctatagagctaagctagctaggtagaggttaattgatatataggttgagaaattgagagacagaaattgaggtagtcagttcatgatgcttgttgacaagagctccatggatttggtgctcgtcccatgcgggctggcgatcatggtcggctaccacctcatgctcctccaccggattctccgccacccgcacaccaccgtgatcggctacgagaatcacaacaagctcgcctgggtggagcgcatgctgcaggttcatcatcttgttcgatcaattcaatttgtttgttcaagaactgatcaatggtgacgaaagattctagtggtttcttgcaggcggcggcgccggaggagtcggcgctggcgctgggcgtgatctcggacaacatctcggcggcgacgacgctggcgtcgctgtgcatcgcgctgggctcgctgatcggcgcgtgggtgagcagctcgccggcgccgggcgccgcgggcgtcgtcgtcctcggctacggcgacggcagccacgcgacggcgacggtgaagtgcgtcgcgctcctcgcctgcttcctcgnctncttcacctgcttcatccagtcggcggcggtacttcgtgcacgcgagcttcctcatgagcgcgctcgccggcg

SEQ ID NO: 100458 - DNA, 1726 bp, Oryza sativa
  Clone ID: PAT_MRT4530_98172C.1
atgcccggcgggccctcccgcgccgccgatgcggacgacgacgacgacgacgagctctcgcgcctcctctccctggccgaggccgacctcgaggccggccgcctccgcgccgcgcacaagcacgcccgccgcgccgcccgcctcgacccggactccacccgcgcctcgctcctcctcaccgccgtctccgtcctcgccgccgacgactcctcccaccgcgccaccctcctcctccccgactccccccactcccaggcctcgcccctctcaccctccgccctccgccgccactacaaatccctctccgaatccctccgctccgccccgccctcctcttcccccgccgtctcctccgccgtcaaggaggcgctccgccgcgccgccgacgcctacgccgcgctcgccaaccaggccgccgcccccgtcccgcccaccttctggacggcctgcgccggctgccgcctcctccatgagttcgaccgcaagtacgtcggattccgcctcatgtgcccctcctgccgccgcaccttcctcgcctccgaagtgccccctccgccggaggctgaggcggaggcggagccagacccgctgccgccggctaagaagaagcccaaaacccagaagcgtgagatgacgctcgccgagatgcagctccagctctccaagaaaagagcaaccaacaactcatccagactcgacgaggatgacgacgatgacaatgacgatgacgatgacgatgatgagggagaggagcagcagcagaacaacgactctgagatgatggatgtggaggactcagacttctacaacttcgacgccgaccgctgcgagaagtgcttcaagagaggccaggtgtgggcattgtacggtgatgatgacggtatgcctcgtcactatgcgctggtggagatgattacaccagggggccgattccgtgcacagataaggtggcttgatctccagccagatggaggggaggggacgccatgtggggagttcaaggtcgggagaacggttaccgtgcattcagtgaacatcttctcgcatcaggtcgcctatgagagggtggcgagggaggtgtaccggatttaccccaagaagggctcggtttgggcgctccatggcggaaaggatgccgattcggggaggccaaagtatgagtttgtggtgttcctcagtgggtacagtgacctttatggtgccagcttcggctacctggagaaggtggaaggtttcaggagcatctttacccgccaggatgtcggtcgcgatgctgtccagacccttcacaagggagatatggggaaactctcgcatcagattccggcgaggagagcgcccaagggtgaaggctcaaccctgcctcctactgattgctgggagcttgaccctgcatcattgccttctgagttgctgcatgacaatcagcagaaatagccgatgtggtaacttcgaggaagtatcttagctgataggattgttcatactgtagaatttgtcggaggtcataggtctgtggtggtctgcctagtgaaatgatccggtgatgcatttgcttcacctgctttggatgtatgttcctccatgcttatggctcctcgtccaggtagagatttagatagcgggatacttgtacctgatgctgtgttcaattccaccatcaacaactccagtgcatgaaaggaatcatcttttggtatgatggtaaaaaaaaaaaaaaaaaaaa

SEQ ID NO: 100459 - DNA, 327 bp, Oryza sativa
  Clone ID: PAT_MRT4530_98173C.1
ggccaatcttataaaactgattaaccccatgttccggcctaaataaaatggaaaggattccatgatacatactcagctaacagtaccccacaatggaaacaattttcatatcctggcaaaggaacccccaggggcaaaaattgacccaaattttcatatgccccacacaaaaaacggacttttcctggatttatttgccttcctcccccaaattaagacaagaaatgaaccgattttgcatcaaacttgtgggggaccccccattggtgaattcattaaaaccaaccaaattgcgtgtgctgttggaccaaatcccaccctttaggc

SEQ ID NO: 100460 - DNA, 790 bp, Oryza sativa
  Clone ID: PAT_MRT4530_98174C.1
catctggaaattcaaaacaaatgcttgttgagtaaatggttatttaagttaataaatgaggaaggagtttggcaagacttgttgaagagaaaatatctttataataagtctataacccaagttgataggaaacatggtgatttcatttttggtccggtctaatgaaagttaaggagactttcttgaatatgggttcttggattctgaataatggggaacaaataagattttgggaagataaatggttagttaatttgccttttaaagataagtatccttccttgtataccattgtccgaaggaaatgttcttcaattgctagtgttatgaattctgttcctcttaatgtgtattttagaagagcattagtgggtcagaatcttgtttcttggcatgatttgtgtgcttctattgttcatatccaattgaatcactcatctggttgttttaaatggaactttaatcagaatggtatgttcacggtaaggtcaatgtatcttgctttaattaataatggctatattgagaaaaataagataatttggaagctcaagatgctgcttaagattgagatctttatgtggtatttgcttaaaggtgtcgtgttaactaaagataatttggcaagacggaattggaatggttgtttgagatgttgtttctgcatgaaaattaaatctatccaacatctttttattgattgtcattatgcaaagtttttatggagagcagttcaattctcttttggttaccttcctagtagcataacccacatttttgatggttggct

SEQ ID NO: 100461 - DNA, 465 bp, Oryza sativa
  Clone ID: PAT_MRT4530_98175C.1
atgtccgcggaccgggcttcaatcccaggggccatcgctgtctgggagacggcaagactgaaagacaggggaggtggaccactgtcgcggtcgtccgcgcgcgatgtcgcggcccgcattgtcgcggtcttcgtcgtcgtgctcgtctcgccgccagccccgaccgcggtcagcgtcgggatgatcgttgttgtactttcctttgcggtcgcgacgtctggcatcatcgcgcctgtcatccctgtcgccgtgtcgcccgtcaaggtcgtggcgggcatcgtcgcgcctatcatccctaatgtcgcgtcgtccgccgaggtcgccgcggcgccggccatcttccctcgtcgtcttactgccctggtcatggggatccctggccagggcgccagtgttgtcgtcaacgtcctccgcccgaccgcgccggaaggtgtaggtctgcggaggtggcggatgatggggtaa

SEQ ID NO: 100462 - DNA, 3179 bp, Oryza sativa
  Clone ID: PAT_MRT4530_98176C.1
tcacctcctatacagagctcccaagaaaatagctaccaagagcagcagtagcatcatgatcatagcagggttcctttttggcctatccaagtcatatccccttatcttcagcaaaccggatgatttgcaggtctcctttattgcattcacacgtttccgtgtaagcgacgcatttggatcattatcatcaatcttttctgcaagcagtgaagagaattcatagaaagcagtgtacacatcagccatagaatttgtttcattgattattcgtgcagtcagccctatgagagtgcaagaatgctgaaaaataaactctctttgcttacatataaaataagttgccgtttcagtagaagaaagcagactagactggggtattgcacaaaaacggagaatagtaatatcctttagagcagacatataccgaaggcaatcttcagtatgtattaaaccattagtcaccatctcattcaagcattttactgccttcactgaattattttcgtatttgagatcctcaagtttgtcaacatatttactccatatttctcgtggccagaacatgcgtgattttggtatctcatttatgtcctccaggtaatcccgagtaatattgactttctgcaaaaataaacccattgaattagaaagcgattcgggagcaagatcttctaacccagcagcatgaaagagccttgaaagtccaatgccgactagccctgccacatagtgacagtactcatcataatcatcaacagtttcaaccacacagaggccgacgtaaatacaataagacacaaatgctatttgcatggctgtaggcttaggaatactgcatactaggtgattaggctgaagccatgcttttgccagcaaactggtattcatatgtaaatggccaggagcacaagccaaaataacagataacaactccttgcatataaactttgccattcctgcacccattctcctggtaatttcttcaattgcctcttggtatcctgaaccaagctccaagaaagctgtcaaaacatagtggaatttatccatcagaatcttgcagtcctttgttccacatgagaaatgccaatcccggttatagatatgacggtggaattcctgaagaatgggcaccttaatctcagtagggatgctagtatcatcttcgacggtgtcgagcgcccgaagcacgaggtagaagacgcacacggcattgcggaggtcggggccgagctgctggatgacgatggcgaagctgcgggagacgcggtgcagcatggagtaggcgaaggcccagtgctcgtcgtcgtcggtggcggcggcgacctccctccgcagccgccacgccgccgcccgcagcctcaccagcgcctccgcctccggtcccagcaacgcccccaccacccccatcgcctcgccgccgccgccgccgccgccgatgacgactcggatggctgcttcttcttctagcggcttcgagcgcgtcggcttggggttttctacaaaacattttctcctggtttccctcgcgacctcacctcagcgcatccgccacactcgccccgcgccagcgtcggcacgagactgccgccgccgccgccaggaggccgccgtcctggcgtgtgcgcggcgcgtgtcggagccgatgccgacgccatcactggcgctccctcccctctcccccggcccccgccggcggagccggccgtgagcaccgtgtgcactggcgccggcgttctctcccccctttattctctccccaccccatccgctggcaacagggcttgcggcggcggcggatccgtccgcacacgggcgcaacgccaccgccacccgtcagagcaagaggggagaggctagccgcgtgaaggaaggaaggatggggaggggcagtggtggtgatgccgccgccgccaccccggccacggccttcccatcgactccgtccatcctcccccctctgcggctgtgtgccatcccccccccacccaccgccgtgcaccatccccccgccgttgttgcctccccctatcgtcacaacgctgggtgccgccctcctcgctggcagatccgtcctccgttggcggtggcgtgcggcgaggcgtcctctttgctcgacgcatggtgccccctccgcacagccgactggcgcagccgccatcaccgcccaccgcgccgccacctttcatctttttgtatatcataaactagctccggggggacggtgaccacttcttcctcctctgtcacaagatctggttccaccatgcatacgctctccatactcagcgccggccaccgaaccgggtcctggaccaactattgtgacctctttgtcgacctcaggatggagcggcggattctggcggcgtggctgtagggggagaggccgctagattgggcatagaggcggcggtgcttgtcggaccaggcagcgccggccttgttgccggcgacgacgtcggcgaaggacttgtgcatgtggaggaagaggaggagggtctgggcctcctcgctgagatgcgacccgcggcggcggcgctggccggtggagccggaggacggcggcaggaagcggcagatgtagcccaccttcgtctcctccgccatcctgcaaatgcagccacgccacgccacggttccggaagccgtggagccagaggaaggtgaggaggcggcggtggcggaggcgcgtgacgcagcggtactccggcggggcggcggcggcggcgaggttaccggagcagcccgagacccctcctctctcctcttctcttctgtactgcacggcggagttggggaattgcggtgcggggagtaataactcgcatcgcttatgtattcggcagcgggacccacgcgacgccctcccctctccccgccctccccagtcctctccccgcccccaaaccatttccaacttccaaagccgcctcctccctctcctctcccaacccaaatcattcgtgcgattccgcggcctcgttggattgacgcggcaactaactccaccaccaccaccaccacctcccccaccaccggcggcggcggcggcggcggcgacgaggaggccccattgcggcggcgccgtggggggaggaggagggggcgggggcggtggcggaggaggaggaggaggaggaggcgatggcggggtgcagctcgccgacaagctcaag

SEQ ID NO: 100463 - DNA, 333 bp, Oryza sativa
  Clone ID: PAT_MRT4530_98177C.1
atggctctgcccacgctgtgcaagatgttcgtcggtggcattggcccttacaccggcgatgaggacctccgccgccatttccagctgttcgggtacgtggccagcgtccacatgcccatcgatcgccacaccggccggcaccacggcttcgcgtttatccagttcacttgcctcgaacacctcatcaatgcactcgcctatcgccacaccatccacggccatacgttgggcacccgattaatagaaccaaggctcagtcgcggcgtaacaagatacaccactgtcttcggcaaccacatttaccggatcggacacaactgtaccttctgctaa

SEQ ID NO: 100464 - DNA, 1696 bp, Oryza sativa
  Clone ID: PAT_MRT4530_98178C.1
ccggccgggacagcctctctctatttttcctttttctgtccatggcggcagcaggggcaatgcccggtggccttctcctcacgttcctcctccttgctgtcgtcgcttccggcgcctacaatggcgccggcgagccgccggtcagccggagaagcttccccaaggggttcatcttcgggacagcctcgtcgtcgtatcagtacgagggtggcgcagcggagggcggcagaggaccaagcatctgggacaccttcacacatcagcacccagagaaaatcgccgacagaagcaacggggatgtggcttcggattcctaccatctctacaaggaagatgtgcgcctcatgaaggatatgggaatggatgcatacaggttctccatctcatggacaagaatccttccaaatggaagtctgaggggtggagtcaacaaagaaggcataaagtactacaataatttgatcaatgagctattatcgaaaggggtgcaaccgtttattacccttttccactgggactcacctcaggcgttggaagataaatataatggatttcttagccctaatatcataaatgactttaaggactatgctgaaatctgcttcaaggagtttggtgacagagtgaaaaattggatcaccttcaatgagccttggactttctgctctaatggctatgcaactggcctgtttgcaccaggccgttgttcgccctgggagaagggaaattgcagtgttggagattcaggaagggagccttacactgcatgccatcatcaactacttgcccacgcggaaactgttcggttgtacaaagcgaaatatcaggccttacaaaaagggaagattggaataactctggtctcgcactggtttgttcccttctcccgctccaaatccaacgatgatgctgcaaagcgtgctatagacttcatgtttggatggtttatggatcccctcattagaggcgactaccccctaagcatgagaggattggttgggaatcgcttgccacagttcactaaagaacagtctaagttggtcaagggtgcatttgactttattggacttaactactacactgcgaactatgctgataaccttcctccatcaaatggccttaacaacagctataccaccgattctcgagctaatcttaccggtgtacgaaatggcatccccataggaccgcaggctgcttcaccttggctttacgtctaccctcaaggcttccgtgacttgctactttatgttaaggagaactatggcaatcctaccgtctacatcactgaaaatggcgttgatgaattcaacaataagaccttaccactccaagaagccttgaaggatgacgctaggatagaatactaccacaagcacctcctttccctgctaagtgctataagggatggagcaaacgtgaagggatactttgcatggtcgctgcttgataacttcgagtggtcgaacggctacacagttcgatttgggataaacttcgtagattacaatgacggaaggaagagataccccaagaactctgcccattggttcaagaagttcctcctgaaatgataaaaaagcaccattgcactcattgcttttctcattgaataataaaagagtatatgttttgcgtgaatttggtacaagagatggaagtaatccagttaaataataaatccctctcttactgc

SEQ ID NO: 100465 - DNA, 1306 bp, Oryza sativa
  Clone ID: PAT_MRT4530_98179C.1
tatcttaccttcaatgcagtacctgaactgccttcagagaagtacaccctgttttcttggttctccaaagactgcctccttcgctgtgaactgtggtggccctctcacctcaggctcagataatttgcggtatcaaagtgatgaagtcaatcttggagatgcatcatattatattacaggagaaccaacatggggtgttagcactgttggaaggttcatggatgcatcaaatggaggttacacaatccgcagctcgcgccagtttcagaacacattagattcagaaatgttccaaaatacaaggacgtcagcatcatctttaagatactacggtattggacttgagaatggaaactatacagtcactcttcaatttgcagagtttgggtttgaagacacacagtcttggaaaagcctagggaagagggtttttgatatatatctccagggtgaacgtaaggagcagaattttgacatcaggaaggcagcaggtgataaatcttacactgttgttaagaggtcatataaagttcctgtgaccaaaaacttcgttgagattcatctattctgggctggcaagggtacttgctgcattcctactcaagacaattatgggccctctatctcggctctgagtttaatccctgcagatttcaccccgacggttagtactagcatttcaccagaaggaaacaataatactagtaaagcaggtgtgagtactagtaaagcaggtgtaattgttggagttgtagttggtgtaacaattttaggtttgatagcacttgctgcaattttgatatggaggcagaacaggagaaagagaaagttatcattggagcaacaagagttgtacagtattgttggaagacccaatgtaatcagttatggtgagctaaggtccgcaactgaaaattttagttccagcaaccttcttggtgaaggaggatacggggcagtctataagggtaagttaactgatggaagggtagtggcagtgaagcagctatctcaaacatctcatcaagggaaagtgcaatttgcagctgaaatacaaactatatcccgagtgcaacaccgtaatcttgtgaagttgtatggttgttgccttgaaagcaataacccacttttggtttatgagtacatggataatggaagccttgataaagcactgtttggaactgggaagttgaacatagattggccagcacgctttgggatatgcttaggcattgcaagaggtctggcctatcttcatgaagagtccagtatccgtgttgtgcacagggacatcaaggccagtaat

SEQ ID NO: 100466 - DNA, 261 bp, Oryza sativa
  Clone ID: PAT_MRT4530_9817C.1
atggcgttgccgtgccgcaacgctcgcccctgcccctccttgcaccgccgctgccggtggagggccgctagagctcctccgcaaaccccctgtccaccgccgtgccggcctcgcgccgtaccggctgcgctcggccgagcccagccgtgccctgggtgctgcctcccgttcggctggagcttccaggaggtgaaggttgatcaagattatatcaagaataagaattatcctgagcaggcaagtcatcaccccatcccttga

SEQ ID NO: 100467 - DNA, 1060 bp, Oryza sativa
  Clone ID: PAT_MRT4530_98180C.1
caaggcgatgaattctcggtctgatctttgtattatttgaacgatatactcttatatttatactcaaaattgataatataaagttgtcacgcactcatgccaccatgacatttcaattataccctcttttgtctgcaactgaaaattttagttccagcaaccgccttggtgaaggaggatatgggacagtttataagggcaagttaactgatggaagggtagtggcagtgaagcagctatctcaaacatctcatcaagggaaaaaacaatttgcgacggagatagaaactatatcccgagtgcaacatcgtaatctcgtgaagttgtatggttgctgccttgaaggcaataatccactgctggtttatgagtacatggaaaacggaagccttgataaagcattgtttggtacgagcaatttcagtttgatagattggccagcacgctttgggatatgcttaggcattgcaagaggtctggcctatcttcatgaagagtccagtatccgtgttgtgcacagggacatcaaggccagtaatgtcttacttgacgcttatctcaatcctaagatctcagattttgggctagctaaactttatgatgacaagaagacgcatgttagcacaaaagttgctgttttatctagtggttatcttgcacctgagtatgctatgagaggtcgtttgaccgagaaagttgatgtctttgcatttggcgtggtcttattggagactttagctggccgaccaaactatgatgatgctcttgaagaagacaagatttatattttcgaatgggcctgggagctgtacgagaacaactaccctctgggcgtcgtagacccaaggctcacagaatacgacggtgaggaggcgctccgggccatccgcgtcgccctcctctgcacccagggctcacctcaccagcggccgtccatgtcgagggtcgtaacgatgctcgccggcgacgtcgaggtgcccgaggtggtgacgaagccgagctacatcaacttgagaatggaaactatacagtcactcttcaatttgctgagtttgggatc

SEQ ID NO: 100468 - DNA, 708 bp, Oryza sativa
  Clone ID: PAT_MRT4530_98181C.1
atggcggcggcgaggcgcgccgctggcctcctccctctcctcctctcctcgccgtcgcgagctcgcctaccgcaccgccaagcgcttgccctgacccctcctctgcttcgcccccaccgcctctactcccactcccccaagccctcgtcgtccgccgcgttttccgccttcgcctccgcctcgaatggcgcgcctgcggggagagcccgggagctgcacctctacaacaccaagtcgcggaggaaggagctcttccagccccgggtgcccggcggggaggtcggcatgtacgtctgcggcgtcaccccctacgacgacagccacatcggccacgcccgcgcctacgtcgccttcgacgtcctctacaggtacttgcgttatttggaccataaagtgcgctatgttcggaattttactgacattgatgacaagataattgcaagagcaaatcaattgggagaagatccttttagcttaagcaaaaggtactctgatgacttcctatcagacatggctaatcttcattgtttaccaccatctgtggagcctcgcgtttcagaccacattgatcagattataaacatgattaaacaggcagtgaaagttccttattttgactactactatctagaaagagatgattcatcacacaccattaaatcgatacctgataatgggttggtttctttcattggtaatgcatattag

SEQ ID NO: 100469 - DNA, 2029 bp, Oryza sativa
  Clone ID: PAT_MRT4530_98182C.1
atggcgtcgccggccgtcgcgtccccgagccggacccccagcaggggcccccccgccgccgccgccgacaccaccgcgccctccccggcttccccgccgcggcggctcgcttcggcgccgcccgcggtggacgcgtcatcgccggagtccgcgcggtccggggagctcgccgccacgccagacccctcgagcccgttgctcgcgagcaggagcgaggagtacaggcttttgtttcgcctgccacccgacgaggttcttgtgcaagattttaattgtgcgctccaagaaaatattcttcttcagggtcatatgtatttatttctacaccatatatgcttctactctaacatttttggatatgagaccaagaaaactattccgttgcaggaagtgactgatgtacgtaaagcaaaaacagctgctatttttcataatgccatcgaaattattgccggtacaaaaaggcacttctttggatctttcttgtcacgcgatgaagcttttcgcattatagtagagggctgggaacagcatgtcagtgatgctagattgctccttgaacgccaggatgcaaagtcaggaaacagcagtgatgaaaatggttatgttttgttggaaggagcaaaggaaactaaacaagatgatgattcatcaccattagacagatctgttaatggtacagctgtcacaagtggtagtaatgatagtggtgactcggacgtcaatatttccaagagatcttcagaagtgctagaaaatgaaagtgaagacaaatgtactgctgctactgcacttaatccattcatcttggggccatttgatgatgaagctcctaatgttcccgaaccctttgcgttgatcaccgagtcaaagtttcaggtgcctgtggaggttctctttaatatgttactgtcagatagttcttttggttttttggatgatttccacaaaaaatgtggtgacaaagatgaacagggaggacttataagggatgtttcattcttgcatccaattaaaatttatcttggtgcaaaatttgggtcttgccaggaggttcagaaacttcgtgtgtacaaaaacaggcatctcatgattcagacatctcagcaaattggtgatgcgccatatggggaccattttactgttgaggggatctgggatgttgaacaagacagcctggatgaaagcagttgctacctcagggtatatattaatgtagccttctcaaagaaaaccatatttagagggaagattgatcaatcaacaaaagatgaatgccgtgatgtttttgggctatgggtcaagctcggtcatgatcttttgaagcaggatagcagctgtcattcgagaggaccttccagctcaactaatgttgatgatccatcagggactactctcagtagtgagaatcctttggaaaacacagatccaggctcgagttctgcacctgatgaacctgttgtaaccatcatagttctactactcagatcccccaaggtgtatatggttaaccaagagacctccccaagcggcttctcctatagcaaagagagcatagagtgggtacagaagagattaaacctattaggcgaggagatgcggatggcggagagtcacctggagatgatgcaacatgagtttgcctggctcaagtctcatctggaaaggctgcagagactgaggagcagcagctcatgagtcatggacccggcaaatagtgagtactttacacaaagctgagggcaaagtacgtaccttagtttggttatttcttgttgttcgttgtatttaatagtacagtgatattgcaagcaatatcgatcctgtgggtgtggatatgttacgatcgagggcacacgtacgatacagtgatagactggtagagtgcaccatcatggtggtgtagtaagtaaatacatgatgaaactacagaacgttgtggaaaaatgtccacttgcaacgacaatgtatgcggtaaacttgcaaaggtatagattcagaatctgtgaaagtggaagatgtacatttt

SEQ ID NO: 100470 - DNA, 510 bp, Oryza sativa
  Clone ID: PAT_MRT4530_98183C.1
tatatatttgttttcttttgagcataatacttatacaaaaaatgaagaggatatgttttactaaaagatatatgaatacgtctaatagatctactcgataaacaatcaaaaatgcctatgcgatgatagaatagtgttaacagaaaacacaataaataataagaaaatgggggaagagcaagagatcagtgaagtagattattagtaaaggtgagaaaaaggtgggttatttattcaagttcgatcaagatttttccatcttcaactgtttcgccttctttgataccgacgtatttgataacacccattcgaccagctgttaatttattttgcattttcatggcttcaacaacgcaaacttcttgtccttcggcgacacgttgtccaactttaacactaactgatttaacaataccaggcataggcgaaatgagaacagaggctaaatcgatttgtttcttggctggcatcaatggcatatatttagcaaccgtttccggcaaaacacga

SEQ ID NO: 100471 - DNA, 426 bp, Oryza sativa
  Clone ID: PAT_MRT4530_98184C.1
atggcacggtcctcggccgcggcagccttgtcagacccggggagcggcggcgaggacgacgaggagggccgcctctcccgttgctggcatccaccgccgcccttctctctccctctctcccgtcgtggatctgggcctcccgcggcgccggcggtggtgggcaaggcgccgacagaggaggccgggaaaggtgcgcgaggcggcgagcacgtgcgtctcaagccgtctccgctcgtcgccggctggtggccgatggctgccgcggcgcacggcgatcggatccggtcgtcgccgtcgcggatccattgcatggaaaatatttgcacaaatatacctcctccgcacaacggggacgcgcgggaccgaggcggtgccgctttcccattccacgtgaccagccactacaagaaatgtgatcttctgtga

SEQ ID NO: 100472 - DNA, 614 bp, Oryza sativa
  Clone ID: PAT_MRT4530_98185C.1
atgaattactccgccttggggtacggctgctgcaccacgtatcaccaaggcggcgtcgtgttcgccgacctgtaccagacgttcgtcgccagggtgctcgtcgacgacgccggcggcggcggccgagtagtggaatccaggacaagaagatggccgcctgattatggcttcctgtacaagcggctgctatcgacgtacaccttcgagtttcggggcaagctgatgtccgcctgcgtcgagattccatggcagagcagcgcctaccagatcgacgccgccgcgctgtcggtgtccctgtacacgctggggacggcggcggcggccggcgacggcgacgagctggcgcatctgtgggtgagggcggcggacggcgggaggctgctgggtgagcacgcgctgttcctggggtgcccgaccagcttcgccgtcgacgccgccaggttcggcgccggcggcgaggtgagcggcggatgcgcctactttgtcatttggacaatgccggatgtgtgccacgtgtacaagtactccttccacgacgatgcggcgacgccaatggcagagctgccattcgaatggaccttcatgatcaagagaacactgtggttcctgcccca

SEQ ID NO: 100473 - DNA, 231 bp, Oryza sativa
  Clone ID: PAT_MRT4530_98186C.1
cttgccctccagcagattccattacattattattattcattaatgacacctcaaaatacatcgcttgtcgtgttaatcatattacaaaggggaaggttcgccgtcatcgtcgatgagtccaagctcgtcccgcggctcggctgtacgggcgccacccccgttgaggtggaccccttcggctgcgaccacactttgggccttgtcccgcagggcgtcgactgattgcctggc

SEQ ID NO: 100474 - DNA, 1158 bp, Oryza sativa
  Clone ID: PAT_MRT4530_98187C.1
attggagtacaggttaaaaggaatggcgtcttttcttaattcacttaatttacaggttaaaacatataggttctgaagtacaggtctgtaagacatcttggcaaactggttgtaatggctgtcgatatcaccataaaccgtatttggaaagagactcatggtagccaggatattcgtattcagggaagggttaaacaccattccatctacgacttggatggctagaccatatcgtggggatgcctgattggcgaccagccgcgcgaggctgcaaatagcgctttggacctcaaaattgattggagatacagaatagatggatgggaaagtctgagtggcaggtagatcttgtggaatcttggatgtttggccatcttgatcaataagttgcacgttgctgaatgatgcagcttttggattatttggaagatacccacttcccattggagccaaatgggtcgttcgagccaccgcataaccagcgaccttcatgtaattagctttgttacgtagggtggtgaataaggatgcaggaaaacgcccaattaggtatggttctgagtcccatccgcagtgtagtaaccaatctccggcaccatccttgaaaattttgaagatgataatatgttttattcctccaggctctgagactgtatcaatggcaactcctggaactatacttatacctgcttcaggtacataaccagggcagtctaaattgtagcagcctgtcttccgatatccatcaatcgtccagcggacaaagaaatgagcgtgtgcatcaccatttaaccttggataaacatgccatccgataacaagtgcattggtactggattgatcatctcccttgttggcaattgaaaccaaaattccactattttgctctccatctaaggaaagaccatatacatcagtagttacttctattccgtaatagtattgtgagttcatctcgtatcctgcattaaagacataataggctccttcatcgggttgctgagttttggtagatttgttcacgatcgcagcggacgacggatccacatgaagtaaaggtaaaccattgtccttcaaataattaacctgacttccggctatgtagtgcgcagacattagggtgcacaatagcgtaatgaagagactaacttcacccat

SEQ ID NO: 100475 - DNA, 250 bp, Oryza sativa
  unsure (1)..(250): unsure at all n locations
  Clone ID: PAT_MRT4530_98188C.1
gttttggccaaaagaaaattgattgatgaaaagttgagattttgggtgcttgggcacgtgccttattttcntgtccttttttcttttttgtttgttgatacacactaaaggattttaaacattgtttggtttgtgttaggagctattgatgtactacagcaacttgtgcccctatattttgcccatgttatctgtgctgtgagctttgactcaatagagacagtttgtgtcgaaaaaaaaaaaaaaaaaa

SEQ ID NO: 100476 - DNA, 328 bp, Oryza sativa
  unsure (1)..(328): unsure at all n locations
  Clone ID: PAT_MRT4530_98189C.1
ctctctggtggtatcacctcggttgttgccccctcgcttttgcctttcacggggtgtaacttcacgatgagtgttcactgctnntcgtacttaanttatggagtatgatattgatgagtgctgcctgctggctagcctgctacccgcctgctgccaggctgtgtataatgttctccactgaagaggtttgtagcttcgacactaccacgtatattagctctaccacactctttttgtttgacgtataaaaatgctgtagnaccattctagagcattgatgtacataaacacagggtaatttttttcccaaaaaaaaaaaaaaaaaaaa

SEQ ID NO: 100477 - DNA, 3822 bp, Oryza sativa
  Clone ID: PAT_MRT4530_9818C.1
atggtggtcgggccactgctgtccatggtgaaggacaaggcctccagctacctcctggagcagtacaaggtcatggagggcatggaggagcagcatgagattctcaaacgcaagctgccggccatcctcgacgtcatcgccgatgccgaggagcaggcggcaaaacacagggaaggggtgaaagcatggcttgaggcgctccggaaggtggcctatcaggccaatgatgtcttcgacgagttcaagtacgaggccctccgccgcaaagccaaggccaaggggcactacaagaagctcggcagcattgttgttataaagctcattcctactcacaaccgtattctgtttcgttataggatgggcaacaagctcaggatgatcctgaatgccattgaagtcctaattgcagagatgaatgcctttaggtttaagttccgaccagagccaccaatgtcctccatcaaatggagaaagacggattctaaaatctccaacctttctatggacattgccaacaagtcaagaaagaaagacaaagaggagattgtcaatcgattgcttgctcaagccagcaatggggatctcactgttattcccattgtaggaatgggggggatgggcaagaccaccttagcgcagctcgtttacaatgaccctgaaattcagaagcattttcagttgctgctctggttgtgtgtctctgacaacttcgatgtggattcgctggcaaaaagaatagttgaagcagctcccaaagaaatgaataagaagaatgataatggaggggccaaaaagttaccacaggatgaacttaaagaagttgtgagtgggcagaggtacctcctcattttggatgatgtctggaaccgtgatgccagtaagtgggaagcactcaagtacaaccttaagcatggtggcagcggtagctcagttttgacaacaactcgtgatcaagcagttgctcaactaatggctccagctcaagaagtttatgatctcaagaacctgaatgaaagcttcattgaggaaattatcaagagaagtgctttcaattcagaacaagaaaggcctcctcctgagctactcgaaatggttggtgatattgccaagaaatgttctggttcccctttagctgcaacagcattgggctctacactgcgtacgaagaccaccaagaaagaatgggacgctatattgagcagaagcacaatttgcgatgaggaaaatggaattttaccaatactcaaactcagttacaattgcttgccatcatatatgcggcaatgtttttccttctgtgctatttttcccaaggatcatgagatcgacgtggaaatgctgatccagttatggatggccaatggttttatcccggagaaacaaggagagtgccctgaaatcattggtaaaagaattttcagtgagttggtgtcaaggtcattttttcaggatgtgaaggggatcccatttgagttccatgatataaagtgctctaagattacttgtaagatccatgaccttatgcatgatgttgcacaatcttccatgggaaaagaatgcgctactatagctacagaacttagtaaaagtgatgattttccttattccgctcgccacttgtttttctcaggtgtcattttcctaaagaaagtatatccaggtatccaaacattgatatgttcctcgcaagaagaattgatacgttcctcgcgagaaatatcaaaatacagttcattgcgagctttaaagatggggggagattcattcctgaaaccaaaatatcttcatcacctgaggtatcttgatttgtcatacagtaaaattgaagcacttcctgaagacataagcatcctatatcatctgcaaacattgaacctttccatttgtgactgtctttgtcaactcccaaacggaatgaagtacatgaccgccctccgtcacttgtacactcacggatgttggaggttaaaaagcatgcctccggacctcggacacctcacttgcctacagacgcttacatgttttgtagccggttcttgctctggctgcagtgatttgggagagctgcggcagttggaccttggtggtcgactagagctaagaaaactggaaaatgtgacaaaagctgatgcaaaagcagcaaatctcggaaagaaggaaaaactgaccgaattgagcttaagatggactggtcagaagtacaaggaggcacagagtaataatcataaagaggtgctggaaggtctcacgcctcacgaggggctcaaggttctgagtatacttcactgtgggagcagtacatgtccaacatggatgaataaactgcgggacatggtgaagcttgtgttagatggttgcaaaaatctcgagaagcttcctccactgtggcagctgccagctctagaagttctttgccttgaaggactggatggtttaaattgcttgttcaactgtgacatatacacctcctttacattttgcagactgaaggagcttaccttggccagtatgagaaattttgagacatggtgggacacaaatgaggtaaaaggagaagagctgatatttcctgaggttgaaaagctgataatcaaaagttgtcctaggctaactgccttaccaaaagcgtcaaatgtgatttcagaattgtctggcggagttagcaccgtgtgtcattctgcatttccagcattgaaggaaatggaattatatggtttggatatctttcagaaatgggaggcagtcgatggaactccaagggaggaggtaacatttcctcagctttacaaattagatattagacggtgcccagagttgactactctacctgaagcaccaaagctgagagacttaaacatatatgaagtcaatcagcaaatatccctacaggcagccagcagatatattacttcattgtccagtctccacctgcatttgtcaactgatgacacagaaacagcaccggtggccaagcaacaagattcgagtgaattggtgattgaggatgagaaatggaatcataaatctcccctggaacttatggacttaactggctgcaaccttttattctcttacccaagtgcgttggctctgtggacatgttttgttcagctcctagatctgaatatttgggaagtcgatgcgcttgtcgactggccagaagaggtgttccagggcttggtttccttgaggaagttacatattcttcaatgcaagaatctgacaggactcacacaagctcgtgggcaatctacactagcaccaagtgaactcctgccacgtttggagtccctgcagatacgccgttgttattcttttgtagaggtccccaacctaccgacgtctctcaagctattacaaattacggactgccatgacctgaggtccatcatattcaatcagcagcaggatacgacgatgttggttctccatcttcctccgtccatcaagaaattggatattgtacgctgtgaaaaacttcagtcactctcaggaaagctggatgccgttcgagcattaaatatcagctattgcgggagcttgaaatcactggaatcttgcttaggagagctcccgtcgctgcaacacctcagacttgttaattgcccaggcctggtatccttgccgaaggggcctcaagcatactcatctcttacatctcttgaaattcgttattgttctggtataaatttgcttccaccgagcctgcagcaacgtctggatgacatcgagaataaagaactagatgcctgctatgaaggtaatcttcagtttcttaaccgtgtacgatttagtggtaaaagtttcgagcgtggtgtctag

SEQ ID NO: 100478 - DNA, 669 bp, Oryza sativa
  Clone ID: PAT_MRT4530_98190C.1
atggaggactgggtcgttctcagcgacagcgacggcgacagcgtggagctccacgacggcagcgacgtcggcggctccgacagcgagagcggcttcgcggcgttctcgggaaagcttccgagctcgtcgcagcttcttctcacgctccggtgctcgacgcagccgaagaggacaaggaggacattacccgaggtgtctccggcgatcgccggaggtgagcacgagaacgccgagatatctgacgtggcagagagaaacaatgaccacgtcgactccaacatcgccgccgccgaggacacgaccttctccggcgaggaggacttggatgatgagaccaacgatgacattgaatgctttgatgaggaggacggaatctgtgagaaccccgatgatgaaatctttgacgacgaggaagaattggatgatgatgatgagagcctcgacgacgatgacattgaatgctatgatgtagaggacaagatctgcgaggagaacccagatgatgaaatcttcgatgatgaggaagaaatcgactgtgaggaggacctggatgatgatgatgatgattgtgagagcctcgacgacgataacattgaatgctttgatgcagaagacataatctgtttggaaacccggacgatgaaatctagtaccaatatagccatgtaa

SEQ ID NO: 100479 - DNA, 1040 bp, Oryza sativa
  Clone ID: PAT_MRT4530_98191C.1
ccggccgggataaatcgcagcgttccccgtccctctctctcctttcctcctccctccgccgccgccgccgccgcctccgcctcctctttgtttctcctcttaggggctagggcttggctttcgagaggcagcaccgccgccggggcaatcgagcaggcggaggggaggagctaatcaaatcaagtcaaatcgaatcaaatcaaattcaaattcaaattcgactagggcagcaggaggaggatggtttccctgtcgacgtggtttcgctacgccgcgcacaagttcgagtactccatctccctctcatggaagaagtataacgttggccagatcaacagcacccagttaaccgatgccgtctggaagaacttcttccaaggcaagctcacctacatgcattggaacaaggggggagaagccatggcccccatcgaatctactacgggaggaaccctccttgttagaaagctcgtcaatttgtctccaacacaagtctttgttggtgatgttgtcttactaaaagacccagagaaatctgatgatttaatcgttcgacgattggctgccctagaaggttatgagatggtctctaatgatgagaaggatgagccgtttgtacttgacaaggatcaatgctgggttctggcagacaaccaatcactaaagccaaaggaagctagggatagccgcttgtttggaccagtccctatgactgatatccttggcagagtgatatactctttaagaacggctgtcgaccatggcccagtggagaacagccgaatggccatgaaccaggattcaccagttctggcagtagagcttgatgtggaagagatggcgaagaataataaagtgtagataattagtgcttttgacgtgctgtggtgtaacttttcccttcgatggattttgttattcgagagattagttgcttcaagtagaacattattctgaacttgttcactatttactcgtggagaagtcaataatcataagaataaccatacgggttgctaaattttgatcaaaaaaaaaaa

SEQ ID NO: 100480 - DNA, 2022 bp, Oryza sativa
  Clone ID: PAT_MRT4530_98192C.1
atggaggactgggtcgtcctcagcggcagcgacggcggcgacagcgtggagctccacgacggcagcgacgttggtggctccgacaccgagagcagcttcgcggtcgtgcaggtccgcggtcgtgccgctgacacgccggcgatcgccgtggaggccgtgccgtcgcaaccttcgccttcgccgccggggttctttaagaccgtctcatacggccaggcgttctcgggaatagcttccgagcacgtcgcagcttcttctcacgctccggtgctcgacgcggcagaggaggacattgccgaggtgtctccggtgatcgtcggaggtgagcacgagaacgccgagatatctgacgtggtagagagcaacaatgaccacgtcgactccaacatcgacgccgccaccgaggtcacgaccttctccggcgaggaggacttggatgatgagaccgacggtgacattgaatgttttgatgaggaggacggaatctgcgaggagaaccccgatgatgaaatcttcgacgacgaagaggaggagagcgatcccgaggaggaggacatcggaagctctgacttggagactgattccgatgagtatatagaaagcaccgacgaggagagcgattacgaggaggaggataccactgacttggaaagcgattctgacgaagatactgaaagcactgaatcttcccatgacgaggacgacctagatgatgatgatgaaagcctcgacgacgatggctctgaatgctttgatgaagaggacaaaatcggcacggagaacccggacgatgaatccgtggacaccggaagctctgacgaggaggagagcgacgacgaggaggacagctattctgatgaggagattgacgacgaggaggagagcgattgtgacgaggagatcgatgaggaggaggaggaggagcatggtggtaataagtacgacgccattgacaacgaaagcttcggtgaggaggagagctgcatggagcagagtgatgctgaagaggagtggccggagttcaccggtgtccctgtcagctacaacgacatcgacaccgactctgacatggagatcgacggcggcaagtacgacgacattgacagtgagagcttgtatgaggaggagagcgtctccgacgagcagagtgatgatgaggaggagcccgaggagttcgccggtggcggctacgatggcatcgactacgaaagccttaacggcgacgacttcgaggagtacctgcaggttctcgccgatggtggcattgacaatgaaagctttggtgaggaggaaagcgtcttggacgatgaggtcctggatttcttccatggcttgaacgatgagttcctggatttcttctatggcgacacgctctacgactatgaaactgaaagctcctgcgacgaggagtgcgagcacgtgtgcgtctgtggccgctgcatggagctcatcgacggcgaggagttctatcagctgatcaccggagacgagttcgatggcacgcagctcggagaggagatcggtggagacgcaagcggcgccgacgaggaggagccctctgacgccggtgagagcgaccacgacactgctcccgacgccggcgatggcgaggcgcacggcgacagcgccgacatggcaggcgggaatagcgcggcggcggcggccgagccggcgtccacgtcgtcgcagttccagcaggcgatgcaacaagcggcggctcggaaccaggctgcagcggcgatggtgagggcggccgacgcgatcgattcgtacatgcaggccgccgccggcgggctggcggcgcaggacgtggaggcgctgtcgcagggagccacgggcctgcgcgccatggcggccgcgcccagcttcgccgttggcgttgacgttagcgcgagcaacacggcggcggcggccttcctccctgatacgctcgcactccaagacggggtggtttcgcttgcagtcttctacctgctctttggtgtcgtgtaccttcttctgcgaatctgcgcattgaattag

SEQ ID NO: 100481 - DNA, 2172 bp, Oryza sativa
  Clone ID: PAT_MRT4530_98193C.1
atggaggactgggtcgttctcagcgacagcgacggcgacagcgtggagctccacgacggcagcgacgtccgcggccgtgccgctgcggtcgtcggcgccgacacgccggcggcgctgccgcacacgacgatcgccgtggaggccgtgccactgcaaccttcgccttcgccgccggggttctttaagaccgtctcgtaccgccaggcgttctcgggaatagcttccgagctcgtcgcagcttcttctcacgctccggtgctcgacgcagccgaagaggacgaggaggacattaccgaggtgtctccggcgatcgccggaggtgagcacgagaacgccgagatatctgacgtggcagagagcaacaatgaccacgtcgactccaacatcgccgccgccgaggacacgaccttctccggcgaggaggacttggatgatgagaccgacggtgacattgaatgttttgatgaggacgacggaatctgcgaggagaaccccgatgacgaaatcttcgacgacgatgaggaggagagcgatcccgaggaggacgacactggaagctctgacttggagaccgattccgatgagtatacagaaagcacggacgaggagagcgattacgaggaggaggataccactgacttggagagcgattctgacgaagatactgaaagcactgacgaggagagcgattacgaggaggagatcgatgatgaggagattgacgatgaatctgttgaggaggacattaacctggatgatgagctcatgggtttcgctagtggcctgttcggtgacgatgacactgaatcttcccatgacgaggaggacctagatgatgatgatgatgagagcctcgacgacgatggctctgaatgctttgatgaagaggacataatctgcgcggagaacctggacgatgaaatcttcgacgatgaatacgtggacaccggaagctctgacgaggaggagagcgacgacgaggaggacagctattctgacgaggagattgacgacgaggaggagagcgattgtgacgaggagatcgatgaggaggaggaggaggagcacggtggtaataagtacgacgccattgacaacgaaagcttcggtgaggaggagagcgtctgcatggagcagagctatgctgaagaggagtggccggagttcaccggtgtccctgtaagttacgacgacatcgacaccgactctgacatggagatcgacggcggcaagtacgacgacattgacagtgagagcttgtatgaggaggagagcgtctccgacgagcagagtgatgatgaggaggagcccgaggagttcgccggtggcggctacgatgacatcgactacgaaagccttaacggcgacgacttcgaggagtacctgcaggttctcgccgatggtggcattgacaatgaaaactttggtgaggaggaaagcgtcttggacgatgaggtcatggatttcttccatggcttgagcgatgagttcctggatttcttctatggcgacacgctctacgacgatgaaactgaaagctccagcgacgaggagtgcgagcacgtatgcgtctgtggccgctgcatggagctcatcgacggcgaggagttctatcagctcaccggagacgagttcgatgccacgcagctcggagaggagatcggtggcgacgcaagcggcgttgacggggaggagccctctgacgccggtgagagcgaccacgacactgctcccgacgccggcgatggcgaggcgcacggcaacagcgccgacatggcaggcgagaatagcgcggcggcgacggccgagccggcgtccacgccgtcgcagttccggcaggcgatgcaacaagcggcggcgcgggaccaggctgcagaggcgatggtgagggcggccgacgtgatcgattcgtacatgcgggccgccgccggcgggctggcggcgcacgacgtggaggcgctgtcgcagggagccacgagcctgcgcgccatggcggccgcgcccagcttcgccgttggcgttgacgttagcgcgagcaacgcggcggcggcgactgcggcggccttcctccctgatacgctcgcacgccaagacggggtggtttcgcttgcagtcttctacctgctctttggtgtcgtgtaccttcttctgcgaatctgcgcattgaattag

SEQ ID NO: 100482 - DNA, 735 bp, Oryza sativa
  Clone ID: PAT_MRT4530_98194C.1
atgccgattgctagagggcgtccacccgtcttcaaggcgccgtcagccaatgaggcagagagggagagagttgatgttgtctccatcatgggcaccgcgccattgtcgttggctggtggcccttggtccaccgccattgggcctgcacgaggcgccccaggcgagaccgcgcacagccgaggtagactgttcctttgcgatagcccaatatgcgagggtggcccaagtacaggggcggcccaacaggtggcccgaggagtgaagatggcccagagagcagagccaacccaaggagagagaacggcccatcagatggagatggccgagaagagccagcggctcagcaggtggaggcggcccaaggagaggtggaggctgagggagtggggaagctgcttctcgaagcccggtctcgactcacatgggatccggtgtggcactagacacaatggtcggtgccacatgtcggctcgccattgcctcctcatggggaagaccctggtcaaaagaaggaaatggaaaaacctcccatttttagcaccaggcaagccgccggcgagggcgaatctagagcacagagaagccgagtgcacacttaatttacacaaggcactcaggggttgtagctgttgggcatttgggcagttcgggctgcacgtaagcaatttggccttcatgagctgcctgcagcctgcaggctgctgggtagctgaagttggttataagactttctag

SEQ ID NO: 100483 - DNA, 186 bp, Oryza sativa
  Clone ID: PAT_MRT4530_98195C.1
atggatgggttggaactgggaggaagacgacgacgacgacggctcaagctgttggttgtagatggggggcgttttggaggattgagatcttctgtagccgtcgacttcaccatgccattatcactgatatcagcgagggtgcgggaggaggcgcccgccccggccgccgccgcgcgcgcggcgtga

SEQ ID NO: 100484 - DNA, 270 bp, Oryza sativa
  Clone ID: PAT_MRT4530_98196C.1
atgtacaaattccatgaatggttcatggaaatgagcgccaagggtaaagagatgttcagagcgaggatcagaaaccccgacttcttgcaaggagaagaagttctgtgcatccatttcaagaatgggctttacgatactgggttcatcgaccctcagaaaatcaacaccgaaatgatcgacaagtacgagaaagacatagaggacaatctcgtccatctcctgacgcagcagcatttcaagacgttcatactactgtcgaacaacacatag

SEQ ID NO: 100485 - DNA, 671 bp, Oryza sativa
  Clone ID: PAT_MRT4530_98197C.1
ttttttttttttttttgaaaagagattaatcacataaatgcttaaatgaaaaaattgtatatacatgtataccatgaaaaatgaatgtaacgttggtcctgaaaaaatgatggtaaatgtcgatagtgtacataattgaccactgaaaacgggatcctgtcagattggaatgaagtacttgctctccatatgtgccaccgcctccttgtcctcccacagcagtttcttccaccaatcagatgaaccacaaatttgcttcagtttaccacagttgtgagtgctgcacaggggatgcgtctcaaatttgggcagtcttccactcgaagagtctcaaggcagggaaaatctcttggcgtgcaaatgcttctcagcttcttcacatcagtcagcacaattgatctcaactttgggaagtcaggttgcctcgttgcgccattggttgattctccattgacgctttggtaatcatcattccactcattgcgtgaactctcagccattgcatgatcgtcttgttcttcagaataataacccgtgcatttttatgttgtgttccatattgctgctcttcagtactgttagcttcttcaacaatagtcagcatctcatcacaatggattatgacaagcctctcaagcagttcaagtcttcggaccatgtgatgtcacact

SEQ ID NO: 100486 - DNA, 432 bp, Oryza sativa
  Clone ID: PAT_MRT4530_98198C.1
atggccgccgccagatctagagccccttggcttgatctggcagtagtaagagcaggatgggcgtggggtggcacggaggtcgatgcagcacgtggaggtgcggtcggcgaaggcaggaggctatcacggtgcgtggatgcatcgtcttccttcctgggggcgctgtcgagtcgtccccttcctctggtggggctgccgggtgaaaaccctgtcttagttttccctaagacctcgacggatggcggtagcagtgtcatcgttgctcttctacctggagacgtcgtcaaggaagtcccctcgccaaatcttctctcaaacagttggtgcaggctcactctagattcatcctcttgtgacagtgctctagcttttgtgctgtcggtgtgttgtggtggtggtggaatattttctttcctggctactaccttctag

SEQ ID NO: 100487 - DNA, 333 bp, Oryza sativa
  Clone ID: PAT_MRT4530_98199C.1
atggccccggctccaagtgcagcactcggctctacgcatctccgcattccttatctgccgggaggcatcgggcgagcgaggaacctagcgatagaccctgaagatgggaacgaggacaggcagggcgagtggccggtcgcggtggacggcggaggtggcggggtcggtatcttggcgagcgactactcgcggtgggcagcaacggggagggggaggggagtcggcgtatgggcgatcggcctgtcgcggcagacgctggcagtgacccctccagggtggcgcgtggcgagcggctggcggcctccccatggcggcgtgcagcggggcggctag

SEQ ID NO: 100488 - DNA, 363 bp, Oryza sativa
  unsure (1)..(363): unsure at all n locations
  Clone ID: PAT_MRT4530_9819C.1
gcaaagataattttacggtttggatatcaaggagcgctggagtgcananaacggcctggataaagcctcaaaaacggcagccaagtcatttcactaccagcagggtgggcttcctcaactatttgccactggatcctcctaagctaatagcctaataacccttgagccttctgagctccatgttaacacaaccctacaacctggcgtccaggtaactcatcaggatgtcttcattcatatctcacaccaagactttggtgtttggtccggtgcagcaaggcaacaaatggggtggatctcttcttatgtcgtttggtcagctgttgttagcagaattcgacgggtttgcagcggctggcttct

SEQ ID NO: 100489 - DNA, 696 bp, Oryza sativa
  Clone ID: PAT_MRT4530_981C.1
atgggtagaaggaggcggcagcgcgcggcctcagaccagcgccgcgagtgcgcgccggaggcaccgcagccggccgtgacgtcgccgtcgacagaggtggccacggtcgcgccaccgactgactcgggctggatcacgacagctgttgagagaatgatgagtttcttcggtggtggccacgcccggcgttcgtcagaggtggcacctacaccagcccatggcaagggcaccacaacgggtcgaacaggcttagcccatggcaaggccggaggcaagggcgccacaacgaatcgaacaggcaaccaagcctggattcaccttcctcaaaagaagcatacccctccagctccaccacaagctccacctcaacctcaggcgcagcgccaacatcgagtggtgaacggggaggaggttccatttgaggtggaagaccagtatattcattactgtagagaatctcgtaccattgttcataaaactatctgtcacatctgcttctttcaagaacaaaacttcactgggagcaacagggtttcaggcagccagatgttgcttcactgccacatgaagcacagcaagtttcctcttgttccatgtgaggccgaggactgccgcatctatgttactacggctcgtgatcttcagttgcacaactacttttgtcacacattgccagctggttggtgggaagagtga

SEQ ID NO: 100490 - DNA, 785 bp, Oryza sativa
  unsure (1)..(785): unsure at all n locations
  Clone ID: PAT_MRT4530_98200C.1
ccggccgggagccggcctgcctaccccatacttaactcacacgcgcacgttcgcctccggaaccctaacaccctcgccgccgccgacccattcgccgccgccgccgccgccggaaaaccatgggtatcgacctcgtcgccggcggccggaacaagaagaccaagcgcacggcgcccaggtccgaggatgtctacctcaagctcatcgtcaagctctaccgcttcctggtgcggaggaccaagagccacttcaacgccgtgatcctgaagcggctcttcatgagcaagaccaaccgcccgccgctctcgatgcgccgtctcgtcaggttcatggaggggaagggggaccagatcgccgtgatcgtgggcaccgtcacagatgacaagaggatctatgaggtgccggcgatgaaggtggctgctctcaggttcaccgagaccgcgagagcacggatcatcaatgccggtggcgagtgcctcacgttcgaccagctcgctctccgcgccccgcttggccagaacacggtccctcctgaggggtcccaagaacgctagggaagctgttaagcactttggccctgctccaggagttccccacagcaacactaagccatatgttcgctcaaagggaaggaaatttgagaaggcaagaggaagaaggaacagcaagggcttcaaggtataangtgtggcagctttggcaccattacacccaactgctcatatcagttagacatcactggtttggatgccagacttgcactgttgttttggatgctagactta

SEQ ID NO: 100491 - DNA, 260 bp, Oryza sativa
  Clone ID: PAT_MRT4530_98201C.1
aatagcatgaaaagcaagggaaaagcaagccaaaccaagcaaacgtacataaggattaagagcagacaaaacacaagatacactagcaagataaacaaacttgaatgagcagcaagtaacacagggcgcacaaagcgaacatatgagcccgacaagcgcgccaagctagacaagtacggatcatagagcatgaacatggagaaccaggccaaaccttgaacacagtgtacatcgcagggctcacaatgcccgcaatgacc

SEQ ID NO: 100492 - DNA, 840 bp, Oryza sativa
  Clone ID: PAT_MRT4530_98202C.1
gaagtgcaaaggaggtaaacaatttaattgttcctgtgaagtcagtaacacaatattttgacatctaaaacagtgtaagtctagcatccaaaacaacagtgcaagtctggcatccaaaacagtgatgtctaactgatatgagcagtttggtgtaatggtgccaaagctgccacaacttataccttgaagcccttgctgttccttcttcctcttgccttctcaaatttccttccctttgagcgaacatatggcttagtgttgctgtggggaactcctggagcagggccaaagtgcttaacagcttccctagcgttcttgggacccctcaggaggaccgtgttctggccaagcggggcgcggagagcgagctggtcgaacgtgaggcactcgccaccggcattgatgatccgtgctctcgcggtctcggtgaacctgagagcagccaccttcatcgccggcacctcatagatcctcttgtcatctgtgacggtgcccacgatcacggcgatctggtcccccgaaatggcatggcgatcaggtaccttcccctccatgaacctgacgagacggcgcatcgagagcggcgggcggttggtcttgctcatgaagagccgcttcaggatcacggcgttgaagtggctcttggtcctccgcaccaggaagcggtagagcttgacgatgagcttgaggtagacatcctcggacctgggcgccgtgcgcttggtcttcttgttccggccgccggcgacgaggtcgatacccatggttttccggcggcggcggcggcggcgaatgggtcggcggcggcgagggtgttagggttttttctgcccgccggcc

SEQ ID NO: 100493 - DNA, 483 bp, Oryza sativa
  Clone ID: PAT_MRT4530_98203C.1
aaaaaaaaaactgaaattggccccccttttatttaaaaggggggcacaaaaaacccaccccatttggggtagttaatgcaaagttcccgttagagtcctagttttgacaagcaagttcatggggagggggctttgttgtttaacaggttggttgaaaaaaaagaaacaaaccttttttttttaaagctttcgagggcccccttgatgctcgggggcgggggagtcatttccaggcccaagctttttattttttcctttgacacccggaaaatgggcactgggggcttgccatccgcacacttggtgggcagaggaatatggggaaacatcccacaaaggatttggacgagctttgagaagggcgcaatttttataaccatgcaaaattttccattgggtgaaggacacttttttgcagggatatgggccggggcaaaatccttaaggtttttcccgccaaaggtgaaattaggatttgggggg

SEQ ID NO: 100494 - DNA, 249 bp, Oryza sativa
  Clone ID: PAT_MRT4530_98204C.1
gaccaaaaggggtaaaatgatagagaggggtttttgatattcagtaagggaagcccaaaaaccccggggtccggaaccagatgggggcaaaaacatttttggacaaaaaaagggaggcaataaaggtaaagacaggtcaaggtacccaaaaaaaagatagagccagtctacacacaaagccacgaagggacactttaagaggaggaattaaagccttacttcgacaacaaaaagaaaaacaattatacc

SEQ ID NO: 100495 - DNA, 1826 bp, Oryza sativa
  Clone ID: PAT_MRT4530_98205C.1
atattataatatcatccgatttttttatataattttataattttgtttataaaatttatcttcatctttttttttttttttttttttttttcaaatgaaatatccttgctcatcctgcagccttaattatatatattacatatggtacatacactgggaagaaaaataaaaaaaaataactccttgattaattcccccatttggttcacgcacaccacccaacccaaaagcggccacgaacacaacaagatacattttgctactgctcctccgacctccaatcgttcgatccgagcccatgcacgcgcccgatcgatgcaacagctagcgatcaaacacgaagcgcgcatgcaagcgaaacccaactctgtgtgtcagatccatggcgagcgagagcggggttgattgctcataggccgagggcgccgagcggcgtcttgccctggccggcctcgaagtagaagatgagcatggcgagcatggcgaggcgggcgtgcttgatctcggcgagcttgagccggtcgagcttgtcggtgtccgggatgtagacgccgtccctggtctcgccgccgaggccgagcgggtcgaagaacttgccgccggggtagccctgctcgccggtggcgttggagaagttctcggcggtgcgcgaccacggcgtggcccactccaccgcctgcgagtccgggttgaagaagtcgacccaccgcttggactctacccagcccatgagcagcagctgcgtcccgaggagggagccgaaggagaagggcgcgatggcctccggctgcgcgccggcctcgaaccacggcacgccgctccacgcctgcccgacgaagatccccagcaccgccgccatcgcccaccgcccgtggatcagctccgcctccctgtaccacttgaggaacgccgggtccttgcccagccccagcgggtcgaagccgaagtcaccggggagcgagccatcgagccacggcgggttgatgaactcggcgtcgctcttgaaggccgggatccacgacttcttggccgacacgacgagcgcgcggcgcggcgcgggcttggcgcccgcgacgccgacggcattggcgagcgcgcgcttcgccccgaggaagggcgtcttgagcacggccgcggacgcggtggcggaggtggaggcgagcgccatggtcgtcgtcgtcgtaggggggctctctcttccggtggcggacggtggggccggcagagcggcttttggtgctgaatatacaccagcccatggtccaggagccaaagctgttatacttccaacattcactattgtaccttgttccctttctatcatttggggaataacagcatgaatcagcctcattgctccatagacattggtgtcgaacacctgctggaactcttccatgggcacctcggcgagcggcgcgacgaggtggaccccggcgttgttgacgagcacgtcgacgcggccgagctcccggacggcgtcggccacggcagcgcgcgcgctctcgtcggagcgcacgtcgagctccagcagcaggtaccgcgggtccccctccagcccgcgcatggaggcgcgcgaccgcgccgtggccacgacggcgcacccggccgccgcgaacgcccgcgccatcgcgtgcccgatcccgccctccgagcagcccgtcaccagcaccacggggcggcgggcgccgccgccgccgccgccgccccgccccgcctccttgtccccttcggtcgccgtcttccccatccacgcgtgagccgagccggcacggtggcacgatgtgatccagaaccttgggaggctggatggtggacagctgaag

SEQ ID NO: 100496 - DNA, 436 bp, Oryza sativa
  Clone ID: PAT_MRT4530_98206C.1
gtgtgtttctagctggggggggtctttataccacttattattctctttctctgcctatttcagtatacgctctcgctaaagttacaattgcatcttctaagagggtttgacgaattgacacaccgagtacgtatacatatcccaatcacgtgtatctatgtatgtagggttgtatgtatgtatgaatgtatcgcgccccgccgcctgatctatcaattgaggccgctggtgaacggcacgccggtctgcggcagccataagtcgccgagcaccatgttgcccacggtgaagttgccggcgtcggcggtgctgttgagcacggggtaccccggccaggtcaccctcctggtggtgtccgccccggcgccggagctgttgtactcggcgttatagaacgtgctgagcgcgtattcacccgtcccacggtatccacccc

SEQ ID NO: 100497 - DNA, 1314 bp, Oryza sativa
  unsure (1)..(1314): unsure at all n locations
  Clone ID: PAT_MRT4530_98207C.1
ctagcatttcatgacaatcttatagaagtaatctctaaaccatagtggtgcatagtacaacaagcttagaatagcactgaactggccgtaagcaaaccaggctggaggattcttcttaagaaccaaagcaacaaccctttttgcgaggtcttctgctggagtagaaccaggaccctgggaagcatcagtcctggctctgagggattcctcgaattttttgtagtacttccagtcacgtatttgaacatacttggatgtagagttacttcccagattcgactttgtccctccaggtgcaacaatcataacattaattccgaaactttttagctccagtcttagcgtatcgctcaatgcatgaagagcggcttttgatgctgaatatacaccagcccatggtccaggagccaaagctgttatacttccaacattcactattgtaccttgttccctttctatcatttggggaataacagcatgaatcagcctcattgctccatagacattggtgtcgaacacctgctggaactcttccatgggcacctcggcgagcggcgcgacgaggtggaccccggcgttgttgacgagcacgtcgacgcggccgagctcccggacggcgtcggccacggcagcgcgcgcgctctcgtcggagcagcacgtcgagctccagcagcaggtaccacagggtccccacaacaagcaccgcgcatggaggcagcagcagacacgcacacagtggcaaacgacaggcagcaaccacaggccagccagcagaacagcacacagcagccaatcgcgtgcccagatccacagccactcagagcaagcccagtcaccaagcaaccacggggcggcagggcagcacagcacagcacaccagcacaccagccccgcacaagcactcatntgcccgacgaagatccccagcaccgccgccatcgcccaccgcccgtggatcagctccgcctccctgtaccacttgaggaacgccgggtccttgccaagccccagcgggtcgaagccgaagtcaccggggagcgagccatcgagccacggcgggttgatgaactcggcgtcgctcttgaaggccgggatccacgacttcttggccgacacgacgagcgcgcggcgcggcgcgggcttggcgcccgcgacgccgacggcattggcgagcgcgcgcttcgccccgaggaagggcgtcttgagctcgcccgcccactgccctggcggaggtggaggcgagcgccatggtcgtcgtcgtcgtaggggggctctctcttccggtggcggacggtgtgacgcgtgggccgaccc

SEQ ID NO: 100498 - DNA, 390 bp, Oryza sativa
  Clone ID: PAT_MRT4530_98208C.1
ggccccccaaaatatgccattttttatgtctcatgaaagggatcccggggtttaagtttcggggcaaagagggctcccaaaacgacattttatttttgaaccccacataacaggggttttttgacaataatacccaaaatcttaattccagaacttaagggaatctactaaaacttcatcaatcataaattcactggggcacaccaagccccttggagaaattctcaaactttgggtggccactggcaaaaatcatggttttgtaccatgcctttccaggagccttggttttagaagacccccccgggctgagcttggtcctttgggaggcgagcttttaaggcctgggcttgacacccgcagcctaagtgagaggtgccattttgggcc

SEQ ID NO: 100499 - DNA, 455 bp, Oryza sativa
  Clone ID: PAT_MRT4530_98209C.1
aaactgaactgcttgcagctttatcaaatatcaatgttacgggacgcagggagtcctatggatatggagaactttctatggagaaggcaccatgaacggttatttgatcctaggacagaattaaacaaattctccgctctcaaaatcaggggatatattttatgtgcatcattacgaatccatgatctaaaactgttatctacctgaccatacctttgctggcaatattgactgaaacttctggacttgaacatggtaccacgattgtatgtcttaggatagattttacaaggggcactgaatattatagatccgtaatgacttgatcacataatcagctggagccgtattttgacacaaataaacttgctgtggagtatctggagatcactgatgtgagcttcttgctatgacaatatgtagaaaaccatataaatttcctcgggattttaatc

SEQ ID NO: 100500 - DNA, 1662 bp, Oryza sativa
  Clone ID: PAT_MRT4530_9820C.1
ctaggcttgatgacgcggaggcgaggacgaagacgaggacggggctgcagcggctcgcttgacgaacgcggacgacggacgagaacggctcgacggagggacgaacgccacgacgaccgggaacgacgagaggacgacgacgacgacgacgaccgggaccggcgaggaggcgacgaggacagccggcagcggctgcacggggacgaggacggcgtggaacacgccgcagcgatgatgatgacggaggcggcgccgcgagacgatgagccgggcgaccgacgggacgtcgacgacgagaacgatcggagacgacgatgatggaccgcggaggggtttggatggaggggaaacgatgccgaggacaaccttgccggtcaccgtgccgagggaggggacggcagcgccggctgacgcacgggcatggcgaaaggggcagccggaggagatgccgccgaggaggaaggagaagccggcgcgggcgccggtgttccggcgaagttcgggcgaggaggatgtgatgccggggatgagagcggcgtcgtggagccgaggaaggtggtggcgacgttgaccggcgctcaggcagggagttagaggcggctggaggcggccggcgcggaggaaaaagaagggcgacggcgggaacgcgcctccgggggtctccgcgggaaacggagggcaggccggggtggaggaggtggcggcgacgctggaggaggtgacggcgcgaccggacgacgctccggcgaggagggagaggcggcggcttgccttcgccgccgccgactggtgtttccgcctgcacggctggcctttatgccgccgttgttgggcgtctacgtcttcaccgaccggctgcctcgtccgccgccgactggtgtttccgcctgctcgctggtctattatgccgccgttgtagggcgtcgaccggcttgccttcgccgccgccgactggtgtttccgcctgcacggctggcctttatgccgccgttgttgggcgtctacgtcttcaccggccggcttgccttcgccgccgccgactggtgtttccgcctgcacggctggcctattatgccgccgttgttgggcgtctacgtcttcaccgaccggccgcctcatccgccgccgactggtatctccgcctacacggctggcctattatgctgccgttgttgggcgtcaacgacttcactgtcggcttgcctccatcgccgccgactggtgacctcgcctatacggttgccgccctctctccccgccggaatcgagctcgcgccgtcactctctctctccgccgtcgccgccgagctccggtccgccgccgttgtcgccccggaccacctcccacctcggcgccgcctccttcggcttcgccgcatcctcgccgacctcgtccacctctccgtttcggtcgccgaccgccggagcaccgtcgaccccaaccaccctagccgcgctgccgccttcctccgctccggtcgccgtttccgtcgtcgccgtcgacccggggtgagccgtggaccgccgcttcgtttccccctttccctcccctctctcgggcgccgctccgccgttcctatggccgccgccggcgaccataggggcgcgggcgtgccgcctcccgccggccgcaccggtgtggccgcctccgggcacgcctag

SEQ ID NO: 100501 - DNA, 402 bp, Oryza sativa
  Clone ID: PAT_MRT4530_98210C.1
atgtacctctgcctcagcgagctccgcgtcgtggtggcgtccacccccgacgccgccagggaggtgctcaagacgcacgacgccgccatgagcactgccgtgagcgccaacttcggcgacggggccgatgaccgacctggcgctgcgcgccatcatgggggagcactgcacgccgtccggaccgccgccacatccgcggtgcgcgacgtgaagctgctgagcgccaagctgtacgacatggtgggccgcgccatcgagcaacaccaggagcatgccgacgacggcggcacgcatggcaatagggagtgcctgttgagtactcttctgaggatcccgaaggaaggtgacaacaacgatgatggcggcgatctcaccatggcaaacgtcaaagccgtcattctt

SEQ ID NO: 100502 - DNA, 235 bp, Oryza sativa
  Clone ID: PAT_MRT4530_98211C.1
aaagcaaccaaatttatttgggggggtgggaacaaaaaaaaggtcatggccccccctacctggatatcaacaattaatttatcgcccccccaatattcaaaaaaccggggaacatttcatcaagtaatacccctgaaaatgcattacccccccaaaaaaaaaagggtaaccccccacaaaaaaaatttggcctgacaaacaaaaaaatagcttccaaacgggaagcccccccaaa

SEQ ID NO: 100503 - DNA, 247 bp, Oryza sativa
  Clone ID: PAT_MRT4530_98212C.1
cactagggtagagggacacccgcagaggccgggccggaagaaccggggcgacccacgacgccggcgccgatgtttttggccgcagaagaggcgggcactcccaggagggactttgagcccaaggaaacggcttgagaccaccacgccgagctcggaaaccagaccgttgatttcaacgaccacaagcactcccccggatggaaccgtcactcttcaggcatggcgggaatggcaccccgagggcgcc

SEQ ID NO: 100504 - DNA, 555 bp, Oryza sativa
  Clone ID: PAT_MRT4530_98213C.1
atgccgctcaagaactctggccacttcctcaaccaacgctcccacaagccatccttgctccctacccctgaggaggaagccgcccttgccgcatccgccactggtgggccctccttcgtgctccacacatccatcgcccccaacaacccctcctcccaaattacttatggcctcaccatacaccacgccgtgacagaatcggagaagacagtggcttcctcagccgcgatagagccgaagaagatgtcgcatgctcctatagttgatgcccacatcgaagacacccagatccgcgatgtcgtccctgttcgcccctacgccaccatctccacccctccactaccgccgatgccccgcccacgcttctgcatggaggaggaccggctgcccctattgtcctccgctcctgccccgtcccccactacctccatcctcgctacaccgaggaaatgcaacaaccagccatgcgtcactgccctggagggggattgggaagaaatgagtaaaagatcaaacggcaagacgtcgcccagtgagttcccaagcgtgcggtga

SEQ ID NO: 100505 - DNA, 463 bp, Oryza sativa
  Clone ID: PAT_MRT4530_98214C.1
tgtctgaacattacgacatcctacttgagtgattggagagacgatcgagataccctgcaaaacgggctatttatgccctgaggggttacttgtacgtgagcaaataaatcggtttgtaagtactctgcatcagtaaaatgaacattgacgcctacgttcaatagatagactgccagtcacctgctaggaacaacatgattctagctgttattcatcctaacctggttcctttagatctccattaacatgatcacatccgcattattgatctccattgtcgcgtccgcccataaaagcatacctattacttgccaggctctgaagagtgcaagcttcagagagtttactacctccctgagttcttgatcggaaggactaccgtcataacctgctggtagctttttaggttgtagatgcccttctgcctgccctcgcccctgagatactgtcccaccaccaggat

SEQ ID NO: 100506 - DNA, 3369 bp, Oryza sativa
  Clone ID: PAT_MRT4530_98215C.1
atggcaaccataacaatagtgcgcatcacgataggggaggagaaaaagatatgtcggttcctaaaggttaaggccgcgcatgtaaaggcaaaggggagaaacgattgtggctcatggagaaagagcgggtctcgagtggatccacccatggttcttccccagcaaaacgcgggattgatggaggccgatggctctgcgagctttatacgcaagctgcagctcagcgtttctgatggccttcctcatgcggcgcctgttccagaactgagtacgcaagagcatgaattggttaaaagtgttttccaagtgctccaaggctttgacacggtcttgctctactgggataagactgcacctggatactgtgagaaagcaggggtctatgtttcgcacctgtcgcagacgagcctcagagctgtgctcaagccttttctgtttgctgcgacatggttgaagcaggtggagctctttgttgggaggaggctccgcaaagcagctctgaaggaggaagagcagttgtttctttcagttgacaggactataactctgctgggattgactgattctatgtcaagtttatgttctggagcagaacatttgtatcaagttgtgcaaggagctgtgcctgatgccttttggaattctggcgcacagatagcatctagtgaagtggcggttcatgctgtaaaccatctttttaagaagttaaatgaagtctgtcttgtggaagatggcgagggtgaaccttatcatatgctgcttgtgatattcgctgaaaccttgttaccatatctccagtgtcttgattcctggctctatgatggtattcttgatgacccttatgaagagatgttcttttacgcgaacaaagcagttacaatagatcaaccagcattctgggaaatgagttatatgctcagagtacgaggaccacgaactgatagctcatcaacattagctgacaatgaatctatcaggaaaaaggaattaatcaaccaggaagcaactgctgcagcagctctcttgaaatctagcaatcaaggttgcgcggacatattatgcccagtgttcttgaaagatattgcaagagccattttatctgctgggaaatcatttcagcttgttcagcatgttcaagagacacatcggattcaaactcgtgaagtcgtacatgagtttaatgttgatcagcatggcaattacattagtcaacagaagtttcggcctgatacctcaagtataagaattcaagataagcgtgaagatattattgaagaatctgcaggccagtttggaaataatgcttgcaaaatgggtttcttaaccttgtctgagagtttcttgatatgcctatctggtctgttggaaaatggtgaccatgttgatgattacttaagaaagttgtgtgctgatcatgctccagttaacaaatcaattgtgcacagtaagagtaatgtacaagaaacagaagaggtatgtggagaaaacagctctgagaagacttggttaaagctcctaagagatgctacatcaggtagggactatgacggcatggagaaaactttagcaaaaaatgctgttatgagggatccaacatttgtccctggagatcatcaagatgtatcttccactgcagtagaaagccatttcaacctatcttgctatgaaaaccctggcatcactgcttgtcaagaaatactagagaggaacaaaaactcctggagcgacttaaatatctctaaaagtttccatcttcctccactgaatgatgagaacatacggaagtctatatttggtgatagagactcttcagggactagccctggtgataccctatctacaacatatttccccagactagacggaactgattacaagtttggttttcagtttgatgattcagaatatatccgccaagaggatgacaggagaaccttggagtctctctatacattcccgactcttctgccatgtgtaaatgaaaatgtcccgctgtcagagatcttacctttgcagaaagatagcacacttgcctcaagagctttgaagtttattcagagcatgagtttgagagatcctcttcaaccagttggtatcatccaagaatgcctttctaaatgtataaagagacaggttgatcacattggcaagcaaatcttgtcaaagctaatgggtgactggagattaatggacgaactctttgttttacgtgctatttatttgctagggtcaggtgacatgctgcagcagtttctggtaacaatttttgacaagctcgataaaggaaatccctgggatgatgattttgagttgaatactttgctacaggaatccataagaaactcagctgacaaaatgctcctgactgcgccagattctttggttgtctcgttagcaaagcatgatacgcgcaacgatgaagaaactacatcaatttctaggaaaggtcgtgcacaaggttttggcattgaggcacttgatgtgcttaattttacatataaggtgtcttggcctcttgatctgattgtcaatacggaggcactgaagaagtataaccaggtcatggcattcttactaaaggtcaagcgtgcaaagtttattttggacaaaactcgaaagtggatgtggaagggcggaggtagcactacgcataattttaagcaacatttaatagttgagcagaagctccttcattttgttgatgcatttcatcaatatgtcatggatcgggtataccatagtgcgtggactgagctttgtgatggcatggcatccgccactacactggatgaagtcatggaagttcatgaagcatacctctcttctattcagcgacaatgctttgtggcctctgataagttgtgggccctcatagccagtcgagttaagaccattcttggattggcacttgacttccacaacatagaacagactcttggtactggatggaactgctccagccgtcaaggcaagatatcctatctttcaagctcaatgttggtcacttcccccatctggcggatctcgttacgagaatcaattacaaccactattacatgtctgacagcggaagcttctctgccatccctggatctcggccacggtaccggtagctcgaggtactttttgatggagcggagcaaatcttcctttttcctttttgttggaccggtagctcgaggtcacccggagtgcatggtgactggcagggccagcgtggagtcagacgtgtacagcttcggcgtcgcgctcctcgagctcgcctgcggcaggtgcctggtgatgacgcggccggacgggagcgccgtgcacctggcgcagcgggtgcgggagctgcacaacacattgagtttcattcgcgtcctttaa

SEQ ID NO: 100507 - DNA, 180 bp, Oryza sativa
  Clone ID: PAT_MRT4530_98216C.1
ggagttgggaaggaggtcagtgcccaccccctgggagcgcctttcccggcaacatacccgctctccgcctccgcggttacgtgatcaccgcgcctgcccgggccacggtccgctcctcccggagatggccaatggcgcggtgctcgccgcagatgctcagccgccgtcacatgccgtcag

SEQ ID NO: 100508 - DNA, 3424 bp, Oryza sativa
  Clone ID: PAT_MRT4530_98217C.1
atggcaaccataacaatagtgcgcatcacgataggggaggagaaaaagatatgtcggttcctaaaggttaaggccgcgcatgtaaaggcaaaggggagaaacgattgtggctcatggagaaagagcgggtctcgagtggatccacccatggttcttccccagcaaaacgcgggattgatggaggccgatggctctgcgagctttatacgcaagctgcagctcagcgtttctgatggccttcctcatgcggcgcctgttccagaactgagtacgcaagagcatgaattggttaaaagtgtcttccaagtgctccaaggctttgacacggtcttgctctactgggacaagactgcgccgggatactgggagaaagcacgggtctatgtttcgcacctgtcgcagacgagcctcagagctgtgctcaagccttttctgtttgctgcaacatgcttgaagcaggtggagctctttgttgggaggaggctccgcaaagcagctctgaaggaggaagagcagttgtttctttcagttgacaggactataactctgctgggattgactgattctatgtcaaggtgatgttctggagatatcagcacctctgtgtcaagttgtgcaaggagctgtgcctgatgccttttggaattctggcgcacagatagcatctagtgaagtggcggttcatgctgtaaaccatctttttaagaagttaaatgaagtctgtcttgtggaagatggcgagggtgaaccttatcatatgctgcttgtgatattcgctgaaaccttgttaccatatctccagtgtcttgattcctggctctatgatggtattcttgatgacccttatgaagagatgttcttttacgcgaacaaagcagttacaatagatcaaccagcattctgggaaatgagttatatgctcagagtacgaggaccacgaactgatagctcatcaacattagctgacaatgaatctatcaggaaaaaggaattaatcaaccaggaagcaactgctgcagcagctctcttgaaatctagcaatcaaggttgcgcggatatattatgcccagtgttcttgaaagatattgcaagagccattttatctgctgggaaatcatttcagcttgttcagcatgttcaagagacacatcggattcaaactcgtgaagtcatacatgagtttaatattgatcagcatggcaattacattagtcaacagaagtttcggcctgatacctcaagtataagaattcaagataagcgtgaagatattattgaagaatctgcaggccagtttggaaataatgcttgcaaaatggatttcttaaccttgtctgagagtttcttgatatgcctatctggtctgttggaaaatggtgaccatgttgatgattacttaagaaagttgtgtgctgatcatgctccagttaacaaatcaattgtgcacagtaagagtaatgtacaagaaacagaagaggtatgtggagaaaacagctctgagaagacttggttaaagctcctaagagatgctacatcaggaagggactatgacggcatggagaaaactttagcaaaaaatgctgttatgagggatccaacatttgtccctggagatcatcaagatgtatcttccactgaagtagaaagctatttcaacctatcttgctatgaaaacccaggcatcactgcttgtcaagaaatgctagagaggaacaaaaactcctggagcgacttaaatatctctaaaagtttccatcttcctccactgaatgatgagaacatacggaagtctatatttggtgatagagactcttcagggaccatccctggtgataccctatctacaacatatttccccagactagacggaactgattacaagtttggttttcagtttgatgattcagaatatatccgccaagaggatgacaggagaaccttggaggctctctatacattcccgactcttctgccatgtgtaaatgaaaatgtcccgctgtcagagatcttacctttgcagaaagatagcacacttgcctcaagagctttgaagtttattcagagcatgagtttgagagatcctcttcaaccagttggtatcatccaagaatgcctttctaaatgtataaagagacaggttgatcacattggcaagcaaatcttgtcaaagctaatgggtgactggagattaatggacgaactctttgttttacgtgctatttatttgctagggtcaggtgacatgctgcagcagtttctggtaacaatttttgacaagctcgataaaggaaatccctgggatgatgattttgagttgaatactttgctacaggaatccataagaaactcagctgacaaaatgctcctgactgcgccagattctttggttgtctcgttagcaaagcatgatacgcgcaacgatgaagaaactacatcaatttctaggaaaggtcgtgcacaaggttttggcattgaggcacttgatgtgcttaattttacatataaggtgtcttggcctcttgatctgattgtcaatacggaggcactgaagaagtataaccaggtcatggcattcttactaaaggtcaagcgtgcaaagtttattttggacgaaactcgaaagtggatgtggaagggcggaggcagcactatgcataattttaagcaacatttaatagttgagcagaagctccttcattttgttgatgcatttcatcaatatgtcatggatcgggtataccatagtgcgtggactgagctttgtgatggcatggcatccgccactacactggatgaagtcatggaagttcatgaagcatacctctcttctattcagcgacaatgctttgtggcctctgataagttgtgggccctcatagccagtcgagttaagaccattcttggattggcacttgacttccacaacatagaacagactcttggtactggtggaactgctccagccgtcaaggcaagatgtgagatggaagtggatcgcatcgagaagcaatttgacgagtgcgttgtatttctcctgcggatcctatctttcaagctcaatgttggtcacttcccccatctggcggatctcgttacgagaatcaattacaaccactattacatgtctgacagcggaagcttctctgccatccctggatctcggccacgctcgaggtactttttgatggagcggagcaaatcttcctttttcctttttgttggaccggtagctcgaggtcacccggagtgcatggtgactggcagggccagcgtggagtcagacgtgtacagcttcggcgtcgcgctcctcgagctcgcctgcggcaggtgcctggtgatgacgcggccggacgggagcgccgtgcacctggcgcagcgggtgcgggagctgcacaacacattgagtttcattcgcgtcctttaa

SEQ ID NO: 100509 - DNA, 866 bp, Oryza sativa
  Clone ID: PAT_MRT4530_98218C.1
atgcagattaatattgtgcggacccccagatcgagcccgatcgcaccatgcgcacccatcgaccctgagagctcgtttcccatcgttgaatccaatctccaaagctctggcgctgaactctacgtggtggatgaggacaactctgtttcttcattcgtcgaccggcggactcccgagagcatccgtgagatcgatctccttcccgacgacgctgtcgccgacctccgcaccatcgcgtcccgcatggctgcaagccggctgtcggctcctccctctgtcggctcgacgtcgagtggctcagcatcagcaacaaacagcgcctcgagtgaaaggccctcgaggccaagatatgccgctggatccgcgcagccgatgcattcacaatggcatggatctgcggtgacttcgcaaggaagaagatgcgagaagaaggaagaagtcggaaaaagggatgagatggatgaaaaacataacgacagtgacatggtccggagttggcggccgcgcgcggccctgtcggcgacgagctggttgtcgcactcgagctgcaccttctccctccgccgggcgccccacgccagcattgccctgacccggacatggagcaggcgacaactctggatcagcgccctcgtctccgtctccgacgacgacgacgacgcagccgccggtccacgacgggaggaagagggcttgacggcgccgcccccgaagccaccgtcgccgtcgaccacctcgtccagcgtcctcttcctccccctcctcgtcatcgtctcggcgtcgtccatcccggccgattccaaccgcggcgtgcagcaggacgacgacagcagcagcagagccggctcgtctgcctccctccgcat

SEQ ID NO: 100510 - DNA, 375 bp, Oryza sativa
  Clone ID: PAT_MRT4530_98219C.1
aaaaaaaaacaaaacatgggcccctaaaccaatgctcaacattcaagacaggtgggatttttttcaatatgggggcttgatccacaggtacctttcaacccttgaacaaaaaaaaatgggaaaaaaaaggcggcccgattgaaattcccccttggggaatcccggacccttggtttgaaaaacaataaaaccggtttttcaagaagcccccttccccggcagagatagatcccccgccggtttaaagagcaacaaaactcgggaagaaactccccaggaacaaaaacccatccctttggataagggatgcaaaacaaactggatccctcccggacataaaaaacccaacctgggccgaccataggaaacccgggg

SEQ ID NO: 100511 - DNA, 2067 bp, Oryza sativa
  Clone ID: PAT_MRT4530_9821C.1
atggtggtcgggccactgctgtccatggtgaaggacaaggcctccagctacctcctggagcagtacaaggtcatggagggcatggaggagcagcatgagattctcaaacgcaagctgccggccatcctcgacgtcatcgccgatgccgaggagcaggcggcaaaacacagggaaggggtgaaagcatggcttgaggcgctccggaaggtggcctatcaggccaatgatgtcttcgacgagttcaagtacgaggccctccgccgcaaagccaagggccactacaagaagctcggcagcatggatgtaataaagctcattcctactcacaaccgttttgcgttccgtcgcaggatgggcgacaagctcatcaagattgtgaatgaaatggaagtcttaattgcagagatgaatgcctttagatcaagatctgaagacaaacagaagattatcaatacattgcttgctcaagtcagcaatagggatctcaccgttcttcccattgtaggtatgggtgggatgggcaagaccaccttagtgcagctcatttacaatgaccctgaaatccagaagcattttcagttgctgctctgggtgtgcgtctctgacaagtttgatgtggatttgctggctaaaggcatagttgaagcagctcgcaaagagaagaatgagaatgtaatggctaaaaactcaccgcaggatgcactcaaagaagttctgagcgggcagaggtacctcctcgtattggatgacgtctggaaccgtgaggccagtaagtgggaattgctgaagtcctaccttcagcatggtggcagcggtagctcagtgttgacaacaactcgtgatcaagcagttgctcaagtgatggctccagctcaaaaagcttatgatctcaagagactgaatgaaagcttcatagaggaaattatcaagacaagtgctttcagttcagaacaagaaaggcctcctgagctactcaaaatggttggtgacattgccaagagatgttctggttctcctttagccgcaacagcattgggctctacactgcgcacgaagaccaccgagaaagaatgggagtctgtattaagtagaagcatgatttgcgatgaggaaaatggaattttaccaatactcaagctcagttacaattgtttgccatcatatatgcggcagtgctttgctttctgtgcaatttttcccaaggattatgagattgacgtggaaatgctaatccagttatggatggccaatggttttatcccagagcaacaaggagaatgccctgaaatcattggtaaaagaattttcagtgagttggtgtcaaggtcattttttgaggatgtgaaggggatcccatttgagttccatcatataaaggactctaagattacatgtaagatccatgaccttatgcatgatgtggcacaatcttccatgggaaaagaatgtgctgctatagctacaaaacttagtaaaagtgaggattttccttcttccgctcgccatctgtttttgtcaggttatagagcagaagctattctgaatacttccctagagaaaggacatccaggtatccaaacattgatatgttcctcgcaaaaagaagaaacatttatatgtgatagatctgtaaatgaagatttgcagaatttatcaaaatacaggtcagtgcgagcattaaagatctggggacgttcatttctgaaaccaaaatatcttcatcacctgaggtatcttgatctctcagaaagtaaaattaaagcacttcctgaagacataagcatactatatcatctgcaaacattgaacctttgccgctgttactgtcttcgtggacttccaaagggaatgagtgatttgggagagctgcggcagttggaccttggtggtcaactagagctatcacaactagagaatgtgacaaaagcagatgcgaaagcagcaaatctcaggaagaagaaaaaactgaccaaattgagcttagattggtcaccaaatcattccaaggaggcacagaataatcataaagaggtgctggaaggcctcacgcctaacgaggggctcaag

SEQ ID NO: 100512 - DNA, 1419 bp, Oryza sativa
  Clone ID: PAT_MRT4530_98220C.1
tttttttttttttttttttttttttttttttttaacataagcaagcaaggtatccataagaccataataagtagtagttgtttgattgcatacaaaattctgaaataaataatacttccatgcaaagtcttttatcacggcataagtagccgatgttacattgcctcaggggcttctgaacttctcctaaatgagacatgacaatatcaggaatatttgacaacgttaggaagcatttatccaagtactttcctagatgatacctatatgacacatgacaatcttcaaatgccagccctctgttaggtcgtatttagccgacttctttcacttccatgaacatctcaagccataggcctccactctacagatcttgccaccattggcgtccccaggatagcaatcggttcatcaatatcagcctctttggtagcgtctccagggctagcactctcttcatcaaaggcagcatcacttgtctctccagagcaggcactcttttcatagtcaagatcagcactggcgtctccagtcttgtcatcaagaagacccacatcatatgcctcaccatcagcttcagggctagcactcctctcattagcatacgtctcaagcaaactaacccaagatgtaagatctagataattcttcttcctagtctcccttgagttaaaccaactagggaaggggtaaagcagcttcttatcaagattagtggaatcgaagatcttcttggaaatgcatacgagctcttcagcttcttcccatagagcttgctggttgtagatctgagacctgatgtcagatatattcttgtaaaaatcatgaagaatcaggtttgtctcatccaacagagcagaaccagtgatagttggtaaagggtaatccagctgctccaggaactgccgcccgatgggctcggctgtagggttcaccgccggatggctcacgcggaacaacccttggatggggcgagggcggcgtcggccaccgttggggcggggacggcggccccagatcgcgcgcgggcgatacagaagatgatacgtctgatccagttcatcatcccctctcctcacagaccaatagcagcttcaatcttcatccatggccagccatcttagagttcatcttgcccctgattcattgtcctccatggccatcttagccctcacaagcttctaatatagagctaggtgaagggaaggaggacagatctgaactttggtgttggaggggctttgaagctgggaagaacaagatccatggagttgatagttgataactagcatctatggctttctggggagaggaggaagaacaagaagacatggtgtgttgatttgtggatatggggacttggaaggaagggtggattggggctggatctaggaagcagcttccattgaggatacctag

SEQ ID NO: 100513 - DNA, 1760 bp, Oryza sativa
  Clone ID: PAT_MRT4530_98221C.1
atggccgcgcccgcgcccacagcttcgccgccgccgccgcccgccatgtccggcctcctctccttcgcctcgtcccgcccctaccctcccctccccgcgcccagacccgccgccgccgcccccaggccgcgcctccgcatagcgggttccgccgccgcggcccccaacgccgtgtcccaccgggcatcctcctccttctcctccggagaccgcctccgctcgctcgtccgccgcggggagctcgacgaggcgctccgcctcgtcgggtccgcgcggaggcccgacgcgggcacctgcgccgcgctcatcaagaagctcagcgcgtcggggcgcaccgcggaggcccgccgcgtgctggccgcgtgcggccccgacgtcatggcgtacaacgccatggtggccgggtactgcggcgcggggcagctcgacgccgcgcggcggctcgtcgcggagatgcccgtggagcccgacgcctacacctacaacacgctcatccgaggcctctgcggacgcggccggaccgcgaacgcgctggcggtgctcgacgaaatgctccgccggcgatgtgtgccggacgtggtcacctacaccatcctcctcgaggccacgtgcaagaggagcgggtacaagcaggccatgaagcttctcgacgagatgcgagataaggggtgcaccccggacattgtcacctacaacgtcgttgtcaatggaatctgccaagaaggacgggttgacgatgccattgagttcttgaagaacctcccgtcatatggctgtgaaccaaacacagttagctataacattgtgttgaagggcctgtgtaccgcggagcgatgggaggatgccgaggagctcatgggcgagatgggccagaagggttgccctccaaatgtggtaacttttaacatgctcatcagtttcttatgccggaaaggattggttgagccagcactggaagtccttgagcagatccccaagtacggttgcacacctaattcgttgagttacaacccgcttctccacgcattctgcaagcaaaaaaagatggataaagcgatggcgtttttggatttgatggtgtccagaggctgttatccagacatcgtttcatacaacactctacttactgcactctgccgcagtggtgaggttgacgtcgctgttgaattgcttcatcaactcaaggacaagggctgcgctcctgtcttgataagttataacacggtcattgatgggcttacgaaggctgggaagacaaaggaagcactagagctgctcaatgagatggtcagcaaagggctccaaccagatattatcacatactcgacaatagctgctggtctttgtagagaagatagaattgaagatgcaattagggcatttggtaaagtgcaagatatgggcataaggcccaacactgtgttgtacaatgcgataattcttgggctttgcaaaaggcgtgaaacacacagtgccattgatcttttcgcttacatgatagggaatggctgcatgccgaatgaatcaacttacaccatattgattgaaggcttggcttatgagggattgatcaaggaggcacgggatttgctggatgaattatgttcgagagcaggagaggagattttactggatgttcacctaattgatgttgctttcttgacaacattcttgccgtgctcaaatgctaatggaggtccttttctcagattgccaccagaaggctcaccagtatatgatgccctcctgtagaagaaatt

SEQ ID NO: 100514 - DNA, 250 bp, Oryza sativa
  Clone ID: PAT_MRT4530_98222C.1
gtggtccggctctattttacgcgtgtgaaattgggaagcccaccaaaagaatattttgtccaaattgaaactgggcagtgaaatccttatggggtaccttgcaccccttggcacccgggtggcccatcttcaattgggctcaatatcaattgggaattcctccatccctgaacacttccatcacctccatccaaattaccaggccccaaataataggtttcaaccgtccccctcccaaaaaaaggcaaaa

SEQ ID NO: 100515 - DNA, 1812 bp, Oryza sativa
  Clone ID: PAT_MRT4530_98223C.1
ggaaaaaaacctgtcaatgcgacaggtaaaaagttcaaaatatactaataatcgcgaccaaattttcaatttgtaggtcaaatacagggggccccaatggggttgtccgcagcaatcgccaaacaaatagcaagcatgactggcttttgaatgagctgagatgcatttttcaaaagcaaactgcatctttgccagcaacatcaaaagacagctcacgcttcgtatcagacccgaatttgaaggttggggctgcttcttctgcactgtgggaactgctcggcaagtcaaaggagaaaacaagtttaccggtagtgcttgatgaaccaaaggtaaacttgggtatatctgcaccgtcagctgacgggatacttggtggctgtgacagagtcggagtaggtggtggctcaggaagagacattgaggtttttggaacaggaaatgtgaaggccaaaccattgcctgtgcttttatccaagacctgagcagctgatgtggttgccgagtcagattctgaagtatgttgtgaagagggcattgacttggtcccactattctctatctttggactagattccacagcattggagctgcttggaggagccagaaccttatttgcatctgaaatttcctgttgagcactaccactatcgttgatgctgctatgtctatgactatcagtagcaggcccattatgctggatgttggtgacaacagaggaagtagttctctttgctgaagtccaccttagctctagtggctttgctgtaggagaaggaatagttctctctagatgctggagtattttgtgagctgttttgcttgacttgggatgaacagataaagccgcagatttggaatggggcatattgtctaccattgaaacaaacccgagcgatgaaccactttcagtggtgccttcgccatgatgtccttgaagggcggatccatcattcttcttagaagcagaacatttctttgcaaataagggagtagttgcaccaacagtatctccatatgcttctttggaatatgttgttgacggttgcgccccaagaacagcaccaagaggtgctgttttatcctcaaatattgccttacttccaacagggaaaggagatgaaaattgtggctttccagatgagttattataggcatcacgggatcctgtgtacttgttagatcttgggaaaactgagccaatataagttgtgcgagaggaagttggaggcagagttcttcctttattgctctgtggtgtaagataattcggatagtttcggacaacagatcctggccagcatacaggagaatctgtagctattttagggaaaacctttgaggatgaattctctacctcaactccatgactcaaagctctgaatttcctcttttgagactcttgtacagatgctgaggtctgtgcttccatataggcttttgcaagttcaattggtgatgaggcaacatcaagcacatttgatggtacaaagacttcagtcccacaaggtgatcgaacatcaatctcttttgcaggagtggaccatctgtctgaaaacggaatggcttcgaaacctttagtggaagaccttggaactctctgatattcattaaaatgatcaggagtccttgagcgcataatctctataaggcgttctgtttcatccctgtaagagcaacatgatgcacatttaacttcctggagcaggctggctttattatccagggctgtagaattggtgttccattctatagaatgcctatgtgtttcattggttacttccagcgattcacgccaggccatttgattatcgt

SEQ ID NO: 100516 - DNA, 2976 bp, Oryza sativa
  Clone ID: PAT_MRT4530_98224C.1
atgcgccgcctcccgcccctggccccgtccgccacctcctccgccgccgccgctccatccacctccaccccggacgtcgtcgcggagctcggccgcatcctctccacccgtcgctggaacaagggccgcgcgtacaagcgcctcgccccctccgtcaccgccgcgcacgtcgccgacctcttccgcgcggactccacagcccccgagcccgccaccgccctcgccttcttcgagtggctcgcccgccgcgatgggttccgccacaccgccgactcccacgcggcgctcctccacctcctgtcgcgccgacgcgcccccgcgcagtacgagaggctcgtcgtgtccatgctcaattgctccgacaccgcggaggacatgcgcgtctcggccgacgccattcaggcaatccgtcgaacgggtagcgcgcgccttgcgctgtccccgaagtgctacaacttcgcccttcgatcgctggcgcggttcgacatgacggagtatatggggagggtgtactcgcagcttgttcaggatggtctgttgccggacacagtgacgtacaataccatgattaagtcatactgcaaggaaggtgatctcaccaccgcgcaccggtatttcaggctgttgctggagggtgggttggaaccagagacgttcacatgtaatgcattggtgttgggttactgccgaacgggtgaattgaggaaggcttgctggctattcctgatgatgccgctgatgggttgccagagaaatgagtactcctacaccattttaattcaggggctctgtgatgctaaatgtgtaaggaaggcacttgtgctgttcttgatgatgaagagagatggctgctctccaaatgtgcgcgcttttacattcttgatcagcggactttgcaagtcaggtagggttggcgatgccaggttgttgtttgatgcaatgccccagaatggtgttgttccaagtgttatgacatacaatgcaatgattgttgggtactctaagttaggtaggatgaatgatgcattgaagattaaggagctgatggaaaaaaatggctgccacccagatgattggacatacaacactttgatttatggcctatgtgaccaaaagacagaagaagctgaagaattgctgaataatgctgttaaggaaggttttacacctacagttgttacattcactaacttgatcaatgggtattgcatggctgaaaaatttgatgatgcactcaggatgaagaataagatgatgtcaagcaagtgtaaacttgatttacaagtttttggaaagctgataaatagcctcattaagaaggataggctaaaagaggctaaagaactgttgaacgaaatttctgcaaatggtttagtcccaaatgtcatcacctacacatctataattgatgggtattgcaagagtgggaaggttgatattgcgctagaggtcttgaagatgatggaacgtgatggttgccagccaaatgcctggacctacaattctctgatgtatgggttagttaaggataagaaactacataaggcaatggctctattaactaagatgcaaaaagacgggataattcctaatgttatcacctacaccactttacttcaaggtcagtgcgatgaacatgatttcgataatgctttcaggttatttgaaatgatggagcagaatggtttgaagcctgatgagcatgcatatgctgtgttaactgatgcactgtgtaaagctggaagagctgaagaagcttattcatttattgttagaaaaggagtagctctaacaaaggtatactatactactttaattgatggtttcagtaaggcaggcaatactgactttgctgcgacccttatagagaggatgattgatgagggttgcacaccagattcatacacgtacagtgtactgctgcatgctttatgcaaacaaaaaaggctgaatgaagctctgccaatactggatcagatgtctctcaggggaataaagtgtaccatttttgcctacacaatactaattgatgaaatgctcagggaaggaaagcatgaccatgctaaaaggatgtacaatgaaatgacttcatcaggacataagcctagtgctaccacatatactgtattcattaactcatactgcaaggaaggtcgactggaggatgctgaggatttaatcttgaaaatggaaagagaaggtgttgcccctgatgtggtgacctacaacatactcattgatggctgtgggcatatggggtatatagatcgtgcattttctactctgaagcgcatggtgggtgcatcatgtgagccaaattactggacctattgtcttttgctcaagcatcttctaaagggcaatctggcttatgttcgttctgtagatacttctggcatgtggaacttgatagagttggatattacctggcaacttcttgaaaggatggtgaagcatggactaaatcccaccgtaacgacatacagttctctcattgcaggattctgcaaagctggacgtcttgaagaagcatgccttcttctagatcatatgtgcggaaaaggtctatctcccaatgaagacatatacacattgcttatcaagtgctgttgcgataccaagttctttgaaaaggctttgtcgtttgttagcatcatgtcagaatgtggctttcaacctcaactcgagtcctacaggcttcttgtggtaggcctttgtaatgaaggagactttgagaaggttaaatctctgttctgtgacttgcttgaactgggctataatcatgatgaggttgcatggaaaattctaaatgatggtttgctcaaagctggctatgttgatatatgtttccagatgctgtccattatggagaaaagatactgttgcattagttctcaaacatatgcattggtgacaaataaaatgcatgaagtatccagtagccttgttagtgaagtcagagaagaagctaggtga

SEQ ID NO: 100517 - DNA, 657 bp, Oryza sativa
  Clone ID: PAT_MRT4530_98225C.1
acacaacatatgaaattaatatgcttaaggcactcgtgtgaaagcaagtcacatgaataaaaaaacatcttttttttgcactactcctgcacaacttttcccgaagaggtataaaaacagctcttcaccggtataataccacgacatcgtcgcaaactaatctaatgtgtatgggaagtagtgggccttttctttctcctatccggaactaactatcgacaatcttaataaaactaattgaaaaagaaaatttacacggatgcattacaacaattcgaacctaacaaggaagctgcatctgacaactgggctcgatatgatacatatgacaatttcagcaaaacttcatgggaaattcatgttgaatcttcctgcgggcaaaacattgatgcttgcatgaacgcatttttctggtgatcaggtaatccaatccttagcaacaatcatgtcctgattcgacaggagtttagccttcaggtgtttcagtggaactagactttcccttgcttttctctagccaaccaaggcccctagaaagcaagcccaatctcctgttaggtgcatcctggttaggatcttgatttggcttcccagactgaggggcagcacgaggtgaacttggattgaaggactggttggccttaaactgccctgcct

SEQ ID NO: 100518 - DNA, 259 bp, Oryza sativa
  Clone ID: PAT_MRT4530_98226C.1
aggcacgaggcggggttctagagccgaaacctaggatggagcctcagcagagcatagagtgcccttgaaagcgcactactcacccgccaatcacctctaacgtcatagctcagttggcgaggcaggggctggagccggctattactcggagcatgctattacccggataataaccggatacggagacgcgccataccgtcgcattaatgggcgcagtccgcgcccgtgtctcctttgattttacccatagctcttaagg

SEQ ID NO: 100519 - DNA, 414 bp, Oryza sativa
  Clone ID: PAT_MRT4530_98227C.1
atggcggcctcgatctcctctcgcgcctccgccgtcgagaaggcgcgcatgtgggggcaccccgggaaggggcggccgccgctgaagaggagggagcgccggcgtcgcgtgcgctggggcggtggtggcgcggaggagtattcgccgtggaatcccatcaacaaccacgggcatcatacgcttggaaggagttgttcgtcgctgggtgggcggatgctgttcgtcacgcgaggctgctccagatcgtacgaggcgaacaagtatccaggctgccgccgccgaagccgaggagcggcgatgccactgctggccatgcagagacagcggcaagtggcttgcggctgccggggacctggacaagttcttgccggagcaaggccccgtgaaatactcaccgccggcttggtttctcca

SEQ ID NO: 100520 - DNA, 5466 bp, Oryza sativa
  Clone ID: PAT_MRT4530_98228C.1
atggaggaggtggaggtcggtttgctggagggagggatcgggtggctggtgcagaccatcctggagaacctggacaccgataagctgggtgagtggattcgtcaggttgggctcaccgatgacaccgagaagctcaggtcagagatcgagagggtggaggtggtgacggctgccgtgaaggggagggcgatcgggaacaggtcgcttgcccgatcgctcagccgtctcagggagctgctctacgacgccgacgacgcgatcgacgagctcgactactacaggctccaacagcaggttcaaggagatgcatggcaaggtggcactggaagtttagatgaacctgaagcagagcaagcagagagaccgagtatcaacgctgctattgcgattagcagtggtagcaaaaagcggtccaaggcatgggggcactttgatatcactgaagaagaaaatggaaagcctgtgaaggcaaggtgtattcactgtcacacggtggtcaagtgcggttctgaaaaagggacatcagttttgcataatcacctcaagagtggcagctgtaacaagaagcgtgaggcaactgatcagcagccaaacccgtcatcaagtactgctgatactgcagcaaatagcactcttgttgaactcggcggttcaggttcagacatcagaaaaaagatgaggattaatggtgagtcaacacacaacgatgcaccttatgcacacccttggaaaaaggctgaatgttccacaaggatacagcaaataactcgtgagttacaagatgcacggggggctgtgagtgaaattcttaagctacatggaccgtgctctgttggaaattcaaaccatcgtacgagtacaaccacaactctctgcagaagaacgtcaagtcttaatccacacaaaatatatggaagagacgcagagaagaacaccatcatgaagattattacagatgacagttatgacggagtaactgtagtccctattgtgggcatcggaggagttgggaagacagctctcgctcaacttgtatacaacgaaccaacggtgaaacgtgactttgagcggatatgggtttgggtgtctgataactatgatgaattgaggatcacaatggagattctagattttgtctctcaagaaagacacgaagaatctccctgtagaaaagaaatacggaaaggagtaagtagctttgcaaagcttcaggagattttgaatgggtatatggacatccagtcgaaaaagtttttgcttgttttagatgacgtatgggacagcatggatgattacagatggaatattttgttggatccattgaaatcaaatcatccaaaaggtaatatgatccttgtgacaactagacttttgtctctcgcacagaggataggcacagtcaaaccaatcgagttaggtgctttgtcaaaagaggatttttggttgtattttaaaacatgtacatttggtgatgagaattacaaagcacatccaagtttgaacatcattgggcagaagatagctgacaagttaaagggcaatccattagcagcaaaagcaacagcgctgctattaagagaaaaacttactgttgatcattggagcaacattctgatgaacgaagattggaaatccctgcatttcagtagaggcatcatgcctgctttgaagcttagctatgatcagctgccttaccatttacaacagtgtttgttgtattgttccatattccctagtagttatcgctttgtcagcaaggagttgatctgtatttggatttctcaaggctttgtgcattgcaactcttcaagtaagagactggaggagatagggtgggactacctaactgatttggtgaactctggcttctttcagaaagttgatcatacacactatatcatgtgtggccttatgcatgattttgcaaggatggtttcaaggactgagtacgcaactatagataatctacagagcaacaaaatactgccaactatacgtcatttgtcaatactaaacaattctgcacactatgaagatcctagtaacgacaaggttgaaggaagaattagaaatgcagttaaagcaatgaaacatttgaggactttggtgctaattgggaaacatagctctttattcttccaatccttcaaagatgtagtccagaagggacatcatttacgtctgttgcaaatctctgaaacatgtacttatgttgaccccttgctttgcaatctggtgaatccagcccatattcgctatatgaagcttcacaaaagagctttgcctcaatctttcagcaagttttaccatcttcaagtattagatgttggctcaaaatctgatctgattatacctaatggtgtggatgatctagttagtctgcagcatcttgtagcagcagagaaagcatgctcgtccatcactagcatcagcaaaatgacctctcttcaggaactacataactttggtgttcaaaattctagcggctgggagatagcacaactccagtccatgaaccagcttgtacagctcggtgtgtctcaacttgaaaatgtcacaactagagctgaggcttgtggtgcaaaactaagagacaaacagaacttagaaaagctgcgcctttcgtggactaatttacataaattgggtcatttggggactaacgtgccatgggatgaacgtgaaaatgcaagagcagtgcttgagggtcttgaaccacatacaaatcttaagcacctagagatatattcgtacaatggtgctacccctccaacatggcttgccacttcacttacctctttacagactctccgtctagagtgttgtggacaatggaaaatgattccatcactggaacgtcttccctttcttaaaaagatgaagttggagagtatgcagaaaataatagaaatgacagttccttcgctggaggagctgatgttaattgacatgccaaatttggagagatgctcctgcacttccatgagggacttaaactgcagtttaagggttctgaaggttaaaaagtgccctgtgctgaaggtctttccattgttcgaggactgccaaaaatttgaaattgagcggaaatcatggttgtcccaccttagcaagcttactatccatgattgtcctcatttgcatgtgcacaatcctcttccaccttctactattgttttggaattatccatcgccaaagtttcaacacttccaacgttgaaggggtcatccaatggaacattaacaatttggcttcccaatgatgatgatgttcctgataagctgataacgttggatgataacattatgtcgttccataacctgagtttcctaactggattggaaatatatggtttccaaaatccgacgtctatttcattccatggtttgaggcaactcagatgtttgaagactttaaaaatatacgactgcccaaaacttctcccttcaaatgttccatcagagcttaccggtgaatatatgtcaggagaaaatcacagcgcccttccatctctcgtacgtctccatattgagaagtgtggaataatgaggaagtggctgtctctgttgttgcaacatgtgcaggccctacaggaactgagtttagataactgcaagcagataacagggctatcgttaggacaggaagaaaacaatcaaccaaatcttatgtcagctatggaggatccatcattaggatatccaggtgaagataaacttatgcgccttccattaaatctcctctcctctctgaaaaaggtatctattacattgtgcaatgatataacattctacggcagcaaggaagatttcgctggatttacctcccttgaggagttagtgatttcacgatgcctcaagctggtgtcgttcttggcgcataacgacggaaatgatgaacagtcgaatggaagatggctcctaccgctatcacttggaaaacttgagattaaacatgttgattccctaaaaacgctgcagctctgctttccaggaaacctcacccgcctgaaaacactagtagtgttgggaaaccaaagtttaacatctctgcagctccattcctgcacagcactccaagagttgataattcaaagatgtgaatcacttaattctctggaaggtttgcaattgctcggcaatctcagggggctgctggcacacagatgcctcagcggccatggagaagatggaaggtgtatccttccgcaatcacttgagaaactttacatctgggagtactctcaagagaggctgcagctctgctttccaggaaacctcacccgccagaaaatactaggagtgttgggaagccaaagtttaacatctctgcagctccattcctgcacagcactccaagagttgatgattcgaagctgtgaatcgcttaattctctggaaggcttgcaatggctcggcaacctcagggtgctgcgggcacacagatgcctcagtggttatggagaatatggaaggtgtacccttccgcaatcacttgaggaactttacatccatgagtattctcaagaaactctgcagccctgcttttcagggaacctcactctcctgagaaaattacaagtaaaggggaactcaaatttagtgtctctgcagctccattcttgcacatcactccaagagttgataattgaaagctgtaagtcaattaattcgctggaaggcttgcaatcgcttggcaacctcaggttgttgcgggcattcagatgcctcagtggttatggagaatatggaaggtgtatccttccgcaatcacttgaggaacttttcatcagtgagtattctctagaaactctgcagccctgcttcctgacgaatctcacctgcttaaaacaattagaggtatcaggcaccacaagtttaaaatctctagaactgcaatcatgcactgcactcgaacatttgaagattcaaggttgtgcgtcgcttgctacattggaggggttgcaattcctccacgccctcaggcatatggaagtattcagatgccctggcttgcctccatatttggggagttcgtcagagcagggctatgagctatgcccacgactggaaaggctcgacatcgatgacccctctatccttaccacgtcgttctgcaagcacctcacctccctccaacgcctagagcttaactatcgcggaagtgaagtggcaagactaacggatgagcaagagagagcgcttcagctcctattgtccctgcaagagctccggtttaagtcttgctacgatctcgtagatcttcctgcggggctccacagccttccctccctcaagaggttggagatctggtggtgcaggagcatcgcgaggctgccagagatgggcctcccaccttcgttggaagaactggttatcgtagattgcagtgacgagctagctcatcagtgcagaactctagcaagcaagctgaatgtcaaaattaatggggaatatgtgaactga

SEQ ID NO: 100521 - DNA, 888 bp, Oryza sativa
  Clone ID: PAT_MRT4530_98229C.1
attccctcctcctcctcgccgtcgtcgcaggccggcggtgcggcgggcaggcctgcggcgggcatcaagggcaatccattaagcaatcaatcaactcccaagaaatttaaagaacttcgaataaaaaggatcatggctgccgctgaattgtcgatcaagctcgtgattgataccaaagctcacaaagtctgctttgccgaagctggcagtgacttcgtcgagttcctctccagcctcctttgtctccctgtaagcaatatcatcaacctgcttaccaaggaacatatggttggaagcattgcaaatgtgtttgacagcgtggagaagctggacgccgatcatgtaatctcaaacgaaagcaaggagccttaccttaagccaatggttgcccctggagcgctctgtcctttgcagcagctgatagatgcacagctagacaccgataccagcttcttcacatgtgaagggaaattgaaccattaccacggcattcgtgttgcttgtggatattttacggttatgaaaggcagcatttgccctaagtgcggctacgcaatggagaaggcaatggcacatgtcaaagccactgggtttgtggttgggacagccaggtacactgtcaaggatgatctctcaattgttccagcatccagcgtgtcaaccatcagcttgcttgcacaatgcggtgtcaaggacttgagcacgctgcaggaaaggaccgtgaagattggcaaggaagaggcactggagatactccttgcatccctgaggactaagaccgtgctgactgatgtatttctcctgaagaaaaaattttaccaggcatcgcatctgagaaattggaaagttccgtacaagttacagaccttcattgtgagcatggagtag

SEQ ID NO: 100522 - DNA, 545 bp, Oryza sativa
  unsure (1)..(545): unsure at all n locations
  Clone ID: PAT_MRT4530_9822C.1
cactaagggaacaaagcttgcggccgcgactacaccatcaccttctgccccgtcgccaccccaaggtccgtactaatttcacttcatacgtcaaccccaacctaaccactattagtactaattactccagcttgcttcaattaacgcttgctttcgcgtgacgttattagctcggttaagtcataaagcgtttgtgatttgcatgcaccactgcacaagtaggtgagtgagcatgcgtcggctcggggacacgataattaatcggagatacttacacggnaaatgggttctgctactagtagcattttgggttggctggtgcattagtgaccgagcaatgagtacgccatatcaccttatctcatatcaaaatgtatgcaaggaaaatgtgtgcgagtgcggtgtcccgaaatgtcacgcttctaaaaatgaaaaaagaaagattatatggggacagtgatagtgagatgtttggaagataatatacgatgtgatgattagcctggagttagtatatggaaggcgcatgattcagccctcgtgcc

SEQ ID NO: 100523 - DNA, 354 bp, Oryza sativa
  unsure (1)..(354): unsure at all n locations
  Clone ID: PAT_MRT4530_98230C.1
ccgtgaagttggcaaggaagaggcactggagnactccttgcatccctgaggactaagaccgtgctgactgatgtatttctcctgaagaaaaaagttagttgcaagagggaggctgctacttagttagtatgatacatgtatgatacatgagcagttttaccaggcatcgcatctgagaaattggaaagttccgtacaagttacagaccttcattgtgagcatggagtaggtttccatttgtcttaaagggaaagcatcactttgtattgctcatttttagattagtcttaaatacacttggaatagtttttttttaatagaaatgttacaacccagccaaaaaaaaaaaaaaaa

SEQ ID NO: 100524 - DNA, 147 bp, Oryza sativa
  Clone ID: PAT_MRT4530_98231C.1
cccacgcgatcgcccacgcgtccgcccacgcgttcgcggacgggtgggtgtagagtcaatgtcccgcggattcccgagcagcttgtcgaaacccttctggtcttgatttcggcgatcgcggagcccaacccgcaagtggagagggag

SEQ ID NO: 100525 - DNA, 490 bp, Oryza sativa
  unsure (1)..(490): unsure at all n locations
  Clone ID: PAT_MRT4530_98232C.1
acggttaatttngggatgnggggnaacatttanaagggananttgacctgataaccccaagttgaaattaacctcactaagggacaaaggtgggttccaccgcggnggcggccgntttagaaatagnggatcccccgggtgcaggaantnggcacgnggtaatttgggtcggggtaatgcgctgaggatngattttgcattgggaaaatcattnatcattttttgctgttttcaaaagcatttgtatcatgttgggaaanttgttttatccctaagttttggnttggatttgttgnttgntcccnaattgacggaagngngcccattaattgcaattgggcttacggaccngctnngcatgggantgtacggatttgggtcaaatttanatttataaattaanataaatatttntntttaaaaaaaaaaaaaaaaaaaaaaaaaaaaaaaaaaaaaaaaaaaaaaaaaaaaaaaaaaaaaaaaaaaaaaa

SEQ ID NO: 100526 - DNA, 699 bp, Oryza sativa
  unsure (1)..(699): unsure at all n locations
  Clone ID: PAT_MRT4530_98233C.1
atcggttttaccgggatcaccaaatggaccgtgttcttctgagctctcaattgtcatcacaaacggttgttaacacaagggttcaacaaggaagcggtggtatcaacagcataggatttgctgttatcagaaaggggagcttaaaattgagatgttatgcaattggtggacttgggggaggagagaatttgaatgatcctttaaaggaaagcaataatggacctgttttgcaaggattcaatggatctagtgcttcctttcggactgttggtgctaaaatcactcaggaaactggtgatttctttgttagcgatgcagagggtgacccagacaaaccaactgatggtttttcctctattgatgaggctataggcgcattgcatgaaggaaaggtatgtaatatctattcacgtctttaacctttcatctgtgtactcagtacttctcttttcacttaccaatctcagcctagtttaagacaaaatagttccactcatgtacttcttggacatggaccatgtatggtcaagaccaaagttaaggccattctacatgcacaataatactccaaatacatgcacagtgacattagtttcttncagcaatccagccttccatcacaatattctttgcttgggaggtgaaccaactgtgtgctttatcatacaacctatgtgcctatatgtgttcatttatcca

SEQ ID NO: 100527 - DNA, 480 bp, Oryza sativa
  Clone ID: PAT_MRT4530_98234C.1
ggattccccgattccgccgctgtgggatctccacttaattccatcgattccaccaatttcggccccaaagcggggactccgccacacaaaacccagccgggatgactccgccgggcgcatcctctttggttggctcctaactcgaccagggctgagccaccaccgaacaatcgaatccccttccgccggtgccacgcctgggactgcccccgacgactatggacgcacgcccccattgctcctccgcaaatagctcctgagcttcatgcgaagcccgcgccggccccacaaaagtctctcctccgagaatccctccccacggaatccctaagctcctctctcttcctcagggagcgtcgccgatccgtcggtcgctgctcaccctcccgtggccggatcccctcccatcatcggctgccacccggcgtctatcgccgtcgctgttggatgcaggtcgttgtccggcgttgactgccctcg

SEQ ID NO: 100528 - DNA, 529 bp, Oryza sativa
  Clone ID: PAT_MRT4530_98235C.1
ctaggtctttgttgcatagttggacgtgtaattattgtcagtttcaactccacctttgacatataacttgttctcatgcataattgacacttcttcacctgttggtgcccatctgattccacttctggacattgttaagctatccagtgtttctaatggtaacatggagtcgctttctccttgtacagcatacttatcaatttgtaaggaaggtcgctttctgggatcatctactgtgttcttcaggtcctcaacatctagtctttgcaggcactgctggtccctaatccagggcaagaaagctaccaccggcctacaccctgcaaggcggccagactgtacggttttcttgttcattggtattcggttcatgaacaaatgccttcaattcccttgtcccgcatgccttcggactgttgcccggtatgattttgtgtggtgtggtggatcatcatttgttcaatgaagaaaaggactgatgtcttggacgaattggaaccctgctaatctccacgcaatcatggatgga

SEQ ID NO: 100529 - DNA, 1187 bp, Oryza sativa
  Clone ID: PAT_MRT4530_98236C.1
ttcaccggcagcacacgcgcgcacacatggccggctcgtcagccgcaacgtcgtgtgctcggttcctggcattgctggcgacatgcctcctctggaacgaggccgcatcgttcacggcgtccggctggaacaaggcgttcgccaccttctacggcggcagtgacgcttcaggaacgatgggtggggcgtgtgggtacggggacctgtactcgacggggtacgggacgaacacggcggcgctgagcacggtgctgttcaacgacggggcgtcgtgcgggcagtgctaccggatcatgtgcgactaccaggcggacaggcggttctgcatctccggcacgtcggtgaccatcacggcgaccaacctctgcccgccgaactacgcgctccccaacgacgccggcgggtggtgcaacccgccgcggcagcacttcgacatggccgaaccggcgtggctcaagatcggcgtctacgtcggcggcatcgtgccggtgatgtaccagcgggtgccgtgcgccaagcagggcggggtgaggttcaccatcaacggcagggactacttcgagctggtgctcgtctccaacgtcggcggcgtcggctccatccagtcggtgtcgatcaaggggtcgaggaccgggtggatggccatgtccaggaattggggcgtcaactggcagtccaacgcctacctcgacggccagagcctgtcgttcaaggtcaccagcagcgacggccagacgctcaccttcctcgacgtcgccccggcgggctggacgttcggccagaccttctcgacctcacagcagttctcttaagtaattaaatattaatgagttattactggtccattcatatatgtgtttaattccgagcgtatattatcatcggcgtcggcgtgtaaagactaaagatatattactagtagctgtttgggttgcccacaagtttggagcatgcgcgcacaagtgtttggtgtggcgagctatatatatgatttgcaagctaaggacacctgcttttttcaatgcgaattaaaacggtatatatatgtacagtttgcgaggtgcttgccaatcgatgatcggcatgctttactgtaacgaccacacaaggagttttcactttcctgaactattactgtccatagtttcgtccatctgattggctaaaaaaaaaaaaaaaaaaaaaaa

SEQ ID NO: 100530 - DNA, 2202 bp, Oryza sativa
  Clone ID: PAT_MRT4530_98237C.1
atggatagaagttggatgtacacgactggcttgaggtgtcagtacaaggagtatagagatggcgtattaagttttatgaaagccgcagtggaggataggataagaagaaatgacaagtacatgtgttgtccatgtaacgattgcaggaatgagatttggttggacgatgaaaaggaagtacacgctcacttgatacgccggggattcatggagagatacacatgttgggtgaagcatggagagcaagatctgggtactgatggtgcagctgcagacggaagtggtgcagacaatcatgaagaaggacatgaagaagagcatgacatgtttgtcccatctccattgggcgcttctcgatacaagcgaaaaaagagcgcgggggagggaaagaagtcaaagcggggtggtctggcgaaggttgtgtggtatctaccaatcattgatcgtttcaagagaatatttgccaaccccaatgaagaaaagttaaaagagggtgtggaaacttgggatgcatatggtcaggagaacttcacgctacgagttctattgttctgcaccattaatgattatcccgcgctgggtaatctttctggacaaaccgtgaaaggaaagaaggcatgctctgactgtatggaacatacacgcagtaggtggctgaagaaatcaagaaagatggtttacatgggtcataggagatggctccccctacggcacgcctttagaagaacgaagaaaattttcaatggtaagaaagaactagggtctgcccctgcggatttgtccggagatcaggaagttcttaaggtccgtcattgcattgatctgatccacgtagagaagaatgtgtgcgatagcttgctggggctattactgaatatgcctggcaagacaaaggacgggttgaatgcgcgtctcgatctacaggagatgaacattcgcagtgaacttcagcctgttacagatgagaagacaggaagagtgtacctcccaccagctagccatacattgtcgaaggatgagaagatcgcaatgctatcatgtctggtagatattaaagttccttcgggctattgcgcgagaataagtaagtacgttaaattggaggatctaaagctggttggaatgaagtctcacgattgccacgtgctaatcacacagatcttgccagttgctatcagaggcattctaccaccacaagtccatcacatgatccaacggctttgtgccttcttcaatacaattggtcagaagattatagatccagaagacctagatggtttgcaggccgatattgtcagtaccctgtgtcacttggagatgtattttccactggctttcttcgatatcatggttcatctcactgttcacctagtgaagcaaacaaaaatatgtgggccagcttttatgagagaaatgtggccattcgagaggtacattggaattctgaagtcctacgttcggaacagagcaaaaccagaggggagcatcattgaaggttacatgaccgaggaagccattgagttctgtatcgattacatggccgagactgatcctattggagttccttcgtctcgccacaaaggaaggttggcaggtgtcggcacaactggcagaaaaagaattgttctagatcaagcttcctacgcgcaggctcatttcgcagtgctgcaacatatggctgaagtaaccccatactttgaggagcatttagcgaaggtccgacaggacaatattggtcgatcagatatttggatcaacagagaacatggtgctcgtttcaacgaatggttcaaggatcgtgtagtacggtcgaccgatggcccaagtgagatattacaaaggttggcaaggggtccatcttgggatgttgacacatggcatggttgggtgaatatccgcacaggtgtcaaggtcgacaaggaaggcttcacattagtggacctggccaaggttggatacgcagacgaaccattcgtactaacgaagcaggttgaacaaattttctacataaaagaccccgcaaacaagaagatgcacatcgttagggatggcaagagaagaattgtgggggtggacaacatcgtcgatgaagaagaatacaacaagaatcttcatgtcagacctcaaatcgaccttgacgatgatcccaaagacgaagtggcttacgttcgttcagaccattcggaaggcatatcactgtga

SEQ ID NO: 100531 - DNA, 596 bp, Oryza sativa
  Clone ID: PAT_MRT4530_98238C.1
ggagagagagaactagtctcgagtaagcaaaagttttttttcattgcatagtggcagccaatcaccatcatagagtaattcagcgagatagcaaccttatcatatcgagttgcatactgataagcatgtaaacagaaaacggaacatagcaaaaagaaaagtgtaagtccttcaccgggacttggtggcatagatgaaggagatggcagccaccatggtagtcgtagccgcatatagccaagcccaaatgccacccttcctcttcctatgtgcctcagccacttcgagattcagctgctcgatgtccttgattagaacatcgatcttctccctcttttccatcagtgccaccttcagcttcccaatctcaccgtccttctcaacattgcagttctcaatagcctcaattttcgacttcagcttgcacgcttcagccttctcagcatccagtgcctcctgaacagaattcttctcatcattcaggagcgagcgcttcgtatcgagctcatcacaggatgcttggagctgcgacatggagacatggagctccttcaattcatttctgagcttaacagcttgagcgtccttctcacgcc

SEQ ID NO: 100532 - DNA, 2999 bp, Oryza sativa
  Clone ID: PAT_MRT4530_98239C.1
tgtccatgtagcgattgcaggaatgagattttgtgggaagatgaaaaggaagtacacgctcacttgatacgccggggattcatggagagatacacatgttgggtgatgcatggagagcaagatctgggtactaatggtgcagcagcagacagaagtggtgcagacaatcatgaagaagtagatgagaagagcatgacatgtttgtcccatctccattgggcggtgaattggttgatgtggaccctgatatgcggcaagacatgttacgtgacgttgatgacctagctatgaacgagagagattccatgaagttcagcaggttggtcagtgactcggagactcctctatacgcaggatgcaagccaaagcacaccaaattatcagcaacattagacctaatgaagttgaaggctagtagtggatggtcagacaagagttttacaaaacttttgggaatactgaaggacatgcttcctcaggggaacacattgcccgagacgacatatgaagcaaaacaggttctctgtcccctagggttagaggtctggagaattcacgcgtatccaaacgattgcatattgtaccacaagcaatacgcggacttagatgcttgtcctgtctgcaaggcttctcgatacaagcgaaagaagagcgcgggcgagggaaagaagtcaaagcggggtggtccggcgaaggttgtgtggtatctaccaatcattgatcgtttcaagagaatatttgccaaccccactgaagcaaagttagtacattggcatgccacagagagaaggaatgacggtttgctaagacaccctacagattggattcaatgttggaatatcgatcgaaagcacaaagagtttgctgccgaccccagaaacgtgaggatatgtttgtgtacggatggcatgaatcctttcggagacatgagcagttctcacagcacttggccagttctcattgcgaactttaacctcccgccatggttgtgcttcaaaagaaaatatattatgttgtgcttattaatccaaggtccgagacaactcggcaatgacatcgatgtgttcttggagcctgttatcgatgaccttgagattctgtggaaagagggtgtggaaacttgggatgcatatggtcaggagaacttcacactacaagttctattgttctgcaccattaatgattatcccgcgctgggtaatctttctggacaaaccgtgaaaggaaagaaggcatgctctgactgtatggaacatacacacagtaggtggctaaagaaatcaagaaagatggtttaaatgggtcataggagatggctccccctacggcacgcctttagaagaaagaagaaaattttcaatggtaagaaagaacttgggtctgcccctgcggatttgtccggagatcaggtacacaatatggtgaaggacattactaatgagtttgggaagaaaagaaaacgtagcaaggaggacaagaaagagaagaatgtgtgcgatagcttgctagggctattgttgaatatgcctagcaagacaaaggacgggttgaatgcgcgtctcgatctataggacatgaacattcgtagtgaacttcagcctgttacagatgagaagacaggaagagtgtacctcccaccagcttgccacacattgtcgaaggatgagaagatcgcaatgctatcatgtctggcagatattaaagttccttcgggctattgtgcgagaataagtaagcacgttaaattagaggatccaaagctggttggaatgaagtctcacgattgccacgtgctaatcacacagatattgccagttgctataagaggcattctaccaccacaagtccatcacacgatccaacggctttgtgccttcttcaatgcaatcggtcagaagattatagatccaaaagacctagatggcttgcaggccgatattgttagtaccctgagtcacttggagatgtattttacactagctttcttcgatatcatggttcatctcactgttcacctactgaagcaaacaaaaatatgtgggccagcttttatgagagaaatgacaccattcgagagatacatgggaattctgaagtcctacgttcggaacagagcaaaaccagaggggagcatcattgaaggttacacgaccgaggaagccattgagttttgtatcgattacatggccgagactgatcctatcggagttcctatgtctcgccacgaaggaaggttggcaggtgtcggcacaactggtagaaaaagaattgttcccgatcaagcttcctacgcgcaggttcatttcgcagtgctgcaacatatggctgaagtaaccccatactttgagaagcatttagcgaaggtccgacaggacaatattggtcgatcagatatttggatcaacagagaacatggtgctcgcttcaacgaatggttcaaggatcgtgtagcacagtcgaccgatggcccaagtgagatattagttgacacatggcaagggtacgatatcaatggatacacattttacaccgtcacacaagatgagaaaagcacagtgcaaaacagtggagtccgtatagatgcatatcaggatcaagctggatcgagcacatactttggccgcatagagcagatatgggagctgaactatctgaacttcaaagtccctttgtttcgttgcagttgggtgaatatccgcacaggtgtcaaggtcgacaaggaaggcttcacattagtggacctggccaaggttggatatgcaaacgaaccatttgtactagcgaagcaggtcgaacagattttccacataaaagaccccgcaaacaagaagatacacgtcattagggatggcaagcaaagaattgtgggggtgaacaacgtcgtcgatgaagaagaatacaacaagaatcttcatgtcagacctcagatagaccttgacgatgatcccgaagacgaagtggcttacgttcgttcagaccattcggaaggcatatcactg

SEQ ID NO: 100533 - DNA, 3875 bp, Oryza sativa
  Clone ID: PAT_MRT4530_9823C.1
cttcatcatttaatctttcaatctctgtttataaatgctcgctttatgcaaatgaaccactttagctcttctttgataactccctgcatcatacccctattccggtatgacttgctgagtccagggggtagtcctaagcctggttttatttccccccgatccaagagcttgagtatgtgtccgatggcgggttctccgagagtaggcttgcttcggctgacagccgggccccacgcggcagccgctcggtgcgcccgaaggcggccacggcggcgcggccggcgggaggcggcgcgcccgcgcccctatggtcgccggcggcggccataggcacggcggagcggtgcccgagagaggggaggggaagggggaaacgaagcggcggtccacggctcaccccgggtcgacggcgacgacggaaacggcgaccggagcggaggaaggtggcggcgcggctcgggtggacggggttgacggtgctccggcggtcgtcgaccgaaacggagaggtggacgaggtcggcgaggatgcggcgaagccgaaggaggcggcgccgaggcgggagatggtccggggcgacgacggcggtggaccggagctcggcggtgacggcggagagagagagcgacgacgcgagctcgattccggcggggagagagggcggcgagtggcggaaacggtggagggaggcacggggagggtttatatagggttgggagggggagagagcggccggacgagggggaaacgggcgcggaagatccggccgccattgatggcgctggcgaggtgccaccgttttctccaagatagatcagggtatcaccagttaagaatcaaagaggaagatatacctaagacagcttttaccactaggtatggattgttcgaatgtactgttatgtcttttggacttaccaatgcccccgctttcttcatgaacttgatgaataaggtgtttatggaatacctagacaagttcgtggtggtctttattgatgacattcttatctactcccgaaccaaagaagagcatgaagaacatcttcgccttgcactagagaagctactagaacatcaactgtatgctaagtttagcaagtgtgaattttggttgtctgaagtgaagttccttggtcacgtcatctcagcaggaggagttgccgtcgatcctagtaatgtggaatccgtaaccaactggaaacaaccaaagacagtttcagagattcgcagtttcctaggcctcgcaggatattatcggaggtttatagagaatttttccaagattgctaagcccatgacacgactgcttcagaaagatgtgaagtacaagtggtcagaagaatgtgagcagagttttcaagggttgaagaatcgcttaatatcagctcttattttgattttacctgatccaaagaagggtttccaagtgtattgcgatgcatcaaaacttgggttaggttgtgttctgatgcaagatgggaaggtggttgcctatgcgtctcgtcagttacgtctgcatgagaagaactaccctactcatgatcttgaattagctgcagtggttcatgcgttgaaaatttggcgtcattatcttttcggtactcgtacagaggtgtacatcgatcacaagagtttaaagtatatctttactcagccggacctgaacatgagacaacggagatggttggaattaattaaggattatgacatgggaattcattatcacccgggaaaggctaatgttgtagcagatgctcttagcaggaaaggctattgcaatgctacggaaggacgacagttaccattggaattatgcaaggaatttgaaagattaaatttgggaattgtcagtagaggtttcgttgcagccttagaagcgaagtccactctaattgatcaagttagagaagcccaaattaatgatcctgatattcaagaaatcaagaagaatatgagaagaggaaaagctatcggtttcttggaggatgagcaaggaactgtatggttgggcgagagaatctgtgtccccgacaacaaagatttaaaagatgcaattctgaaagaagctcatgatactttatattccattcaccctggtagtaccaaaatgtaccaggatctcaaggaaagattttggtgggcaagtatgaagcgtgaaatcgcagaatacgtagcagtatgtgatgtttgtcagcgagtcaaggcagaacatcagaaacctgccggtttgctgcagcctttgaagattcctgaatggaaatgggaggaaatcggtatggatttcatcactggtctacccagaacgtcatcaggccatgactctatttgggttatagtcgacagacttaccaaagtggctcatttcattccggtaaagacaacctattccggaagccggttggcggaattgtatatggcaaggattgtgtgtttgcatggcgttcctaagaaaatagtgtctgatcgaggcagccagtttacttcaaatttttggaagaaacttcaggaagagatgggttctaagctgaactttagtactgcttatcatccgcagacagacggacaaaccgaaagggtgaatcaggttttggaagacatgttgagagcttgtactttagacttcggtggaagttgggataagaatctaccttatgtagaattttcgtataacaacagttatcaagctagtcttcatatggctccttacgaagcactgtatggtcggaagtgccgcactccgcttttgtgggatcaaacgggagaacgtcaggttttcgggacggatatcctgagggaagcagaagaaaaggtgaaaatcatccaagaaagattgcgtgtggcccagtctcgtcataagagttatgccgacaatcgctatagagatttgagttttgaagaaggagattatgtgtatcttcgtgtcacgccttttcgaggagttcatcgttttcacaccaaaggaaaattggcaccgcgttttgtgggaccttataagattgtcagtagaagagtagaggttgcttatcagttggaattacctcaatctttggcaggagtccataatgtgttccatgtgtcgcaattgaaaaagtgtttaagggtacctaccgaagaagctaatcttgaacagatagaggtccaagaggatctgacctatgttgagaaaccaatccgtatcttggaaatagatgagagaagaaccaggaatcgagttatccgtttttgcaaagtccaatggagtaatcactcggaagaagaatcaacttgggaacgagaagatgaattgaagtcaggattcggatcggtctctctctctccgagcccgaggtttccttcgcgtcgccggtcgccgtgggccttcgccgccgcctttcaacccctataaaaggatccccggtgtctcctcttcccgtcgccacctttgctttcgcctctcgccgtcggaagagccctagcgccccgtgcttcgccgtcgctccagccgtcgccgtcgctcggggaggtcgccatcgtggtcgccaagtcgccgccgtcctcgtccgcccctccgccgtcgctgttgaccgccggaacaccgtcgccgtcgtcaagccgaaggtcgccgccgcttcttcatcgtcgccgacgttgtccgttgctcctccgcctccgttcgcgccgccgcgccgtcattcgccgacgagtttgcgcgaccgagccgccgagccgccgagccgcccgagccaccgccggaggtgacgtcatcgccgacgtcatcgtggccgtttgccattccgacgtttccggagagtctgttttcgcaggagaagaatttgaagagttccatggccagcaaggcaagtcacacagatcccaaacaaccctttcagcat

SEQ ID NO: 100534 - DNA, 2302 bp, Oryza sativa
  Clone ID: PAT_MRT4530_98240C.1
cgattgcaggaatgagattttgtgggaagatgaaaaggaagtacacgctcacttgatacgccggggattcatggaaagatacacacgttgggtgatgcatggagagcaagatctgggtactgatggagcagctacagacggaagtggtgtagacaatcatgaagaaggagatgaagaagagcatgacatgtttgtcccatctccattgggcagtgaaatggttgatgtgtaccctgatatgctgcaagacatgttatgtgacattaatgacctagctatgaacgagagagattccatgaagttcaacaggttggacatgcttcctcaggagaacacattgcccgagacgacatatgaagcaaaacaggttctgtgtcccctagggttagaggtccggagaattcacgcgtgtccaaacgattgcatattgtaccacaagcaatacgtggacttagatgcttgtcctgtctgcaaagcttctcgatacaagcgaaagaagagcgcgggcaagagaaagaagtcaaagcggggtggtccggcaaaggttgtgtggtatctaccaatcattgatcgtttcaagagaatatttgccaaccccaatgaagcaaagttagtacgttggcatgccacagagaaaaggaatgacgatttgctaagacaccctgcggattcgattcaatggaggaatatcgatcgaaagcacaaagactttgctgccgaccccagaaacatgaggatatgtttgtgtacggatggcatgaatcctttcggagacatgagcagttctcacagcacttggccagttctcattgcgaactttaacctcccgccatggttgtgcttcaaaaggaaatatattatgttgtgcttgttaatccaaggtccgagacaacccggcaatgacatcgatgtgttcttgaagcctgttatcgatgaccttgagattctgtggaaagagggtgtggaaacttgggatgcatatggtcaggagaacttcacactacgagttctattgttctgcaccattaatgattatcccgcgctgggtaatctttctggacaaactgtgaaaggaaagaaggcatgctctgactgtatggaacatacacgtagtaggtggctgaagaaatcaagaaagatggtttatatgggtcataggagatggctccccctacggcacacctttagaagaaagaagaaaattttcaatggtaagaaagaacttgggtctgcccctgcggatttgtccggagatcaggagatgaacattcgcaatgaacttcatcctgttacagatgagaatacgggaagagtgtacctcccaccagcttgccacatattgttgaaggatgagaagatcgcaatgctatcatgtctggcagatattaaagttccttcgggctattgcgcgagaataaatgtattttccactagctttcttcgatatcatggttcatctcactgttcacctagtgaagcaaacaaaaatatgtgggccagcttttatgagagaaatgtggccatcgagaggtacatgggaattctgaagtcctacgttcggaacagagcaaaaccagaggggagcatcattgaaggttacacgaccgaggaagccattgagttttgtatcgattacatggccgagactgatcctatcggagttcctacgtctcgccacgaagaaaggttggcaggtgtcggcacaactggtagaaaaagaattgttcccgatcaagcttcctacgcgcaggctcatttcgcagtgctgcaacatatggttgaagtaaccccatactttgaggagcatttagcgaaggtccgacaggacaatattgatcgatcagatatttggatcaacagagaacatggtgctcgcttcaacgaatggttcaaggatcgtgtagcacggtcgatcgatggcccaagtgagatattacaaaggttggcaaggggtccatcttgggatgtagacacatggcaaggttgggtgaatatccgcacaggtgtcaaggtcgacaaggagggcttcacattagtggacctggccaaggttggatacgcagacgaaccattcatactagcgaagcaggacgaacagattttctacataaaagacctcgcaaacaagaagatgcacgtcgttagggatggcaagcgaggaattgtgggggtggacaacgtcgtcgatgaagaagaatacaacaagaatcttcatgtcagacctcatatcgaccttgacgatgatcccgaagacaaagtggcttacgttcgttcagaccatttggaaggcatatcactgtga

SEQ ID NO: 100535 - DNA, 1203 bp, Oryza sativa
  Clone ID: PAT_MRT4530_98241C.1
atggagaacggaagtggtgcagacaatcatgaagaaggagatgaagaagagcatgacatgtttgtcccatctccattgggcggtgaaatggttgatgtggaccctgatctgctgcaagacatgttacgtgacgttgatgacccagctatgaacgagagagattccatgaagttcagtaggttgcaatgcgcggacttagatacttgtcatgtctgcaaggcttctcgatacaagcgaaagaagagcgcgggggagggaaagaagtcaaagcggggtggtccggcgaaggttgtgtggtatctagcaatcattgatcgtttcaagagaatatttgccaaccccaatgaagcaaagtccaagacaacccggaatgatatcgatgtgttcttggagcctgttatcgatgaccgtgagattctgtggaaagagggtgtggaaacttgggatgcatatggtcgggagaacttcacgctacgagttccattgttctgcaccattaatgattatcctgcgctgggtaatctttctggacaaactgtgaaaggaagaaggcatgctctgactgagatgagcattcgcagtgaacttcaacctgttacggatgagaagacaggaagagtgtacctcccaccagcttgccacacattgtcgaatgatgagaagatcgcaatgctatcatgtctggcagatattaaagttccttcgggctattgcgcgagaataacttttatgagagaaatgtggctgttcaagaggtacatgggaattctgaagtcctacgtacggaacagagcaaaaccagaggggagcatcgttgaaggttacacgactgaggaagccattgagttctgtatcgattacatggccgatactaatcctatcggagttcctacgtctcgccacgaaggaaggttggcaggtgtcaacacaactggcagaaaaagaattattccctatcaagcttcctacgcgcaggctcatttcgcagtgctgcaacatatggctgaagtaaccccatattttgaggagcatttagcgaaggtccgacgggacaatattggtcgatcagatatttggatcaatagagaacatggtgctcgcttcaacgaatggctcaaggatcgtgtagcacggtcgaccgatggcccaagtgagatattacaaaggttggcaaggggtccatcttgggatgttgacacatag

SEQ ID NO: 100536 - DNA, 413 bp, Oryza sativa
  Clone ID: PAT_MRT4530_98242C.1
tactagttctagatcggcacgcggccgcccttttggagtattatagaattcatctgaatctatggatgctattgatgaacttgcgtattgttagatgcgtattgagtatattgatgcgactcctaccatggcaagctgctatattagactatggataccagactgatgggccaggtattgattatgtaggattcgcaatatacacacaatactaacatgctgtatgtacagtcataaggcacatgaaacttattagtttttcgtctctaacatgatgatacttatgatgaatctggataaatacttctctacgcacatttggtggacttgatgcggacatgtctgtcttgtatgctatttacagtgtctgcagccaatggagactcactagataagccctctaggcaccacac

SEQ ID NO: 100537 - DNA, 2842 bp, Oryza sativa
  Clone ID: PAT_MRT4530_98243C.1
atggcgccactccccgccgccgccgccgcgccggccttcctcttcctctcccctcccggcaaactgcccggcggcaaacccaggctgaaaccctcctgtgccgcctccacctcgtcttcgtcgtcgtcgtcaccctcgctcgccgagcagctggagcccctgtcccgcaggctcctccacgggaagcccacgcccacccagcacgcgccggagccaacctgggtgaacccctccaagcccaagcccaccgtcctctccctccgccgccaccgccgccgctccccttcctcccacccctcctccgcccctctccagccgctcctccgcgccatccgcgccctccccgacgctgccgacctcgcccccaccctccacgacttcttccccccggcctcgccgccctccacctccgacgcgctcctcctcctcaactacctccacccctcctggcgcaagtccctctccctcctctgctggctccgcgccctccccgatggcgccttcccacttgacaccatcgtcttcaatgtcgccctcaagtccctccgcgccgcccgccagtggccccaggccgagcgcctcgccctcgacatgctcgcctccggtgtccccctcgacaacatcacctactccaccctcatcaccgccgcccgccgctgccgccagttcgacaaggccgtcgagtggttcgagcgcatgtacgcctccgacggcgtcctccccgacgaggtcacctactccgccatcctcgacgtctacgcgcagctcggcatgaaggaggaggtcctcgcgctcttcgaccgcgcgcgcggcagcggctggaagcccgaccatgtcgctttcgccgtcctcgccaagatgttcggcgaggccggcgactacgacggcatccagttcgtcttcaaggagatgcgcgaggtaggcatcaagcccaacatcttcgtctacaacgcgctgctggaggcgctgggcaagaccggcaagccaggcctggcacgcaacctgttcgaggaaatgacggccgagggcgtcgagcccaacgcgcgcacgctcacggcgctcgcaaagatctacgggagggcgcgctgggggcgcgacgcgctgcagctctgggagcagatgcgggagaagaagctgcccgccgacaacatcctctgcaacacgcttctgagcatgtgtgccgacgtggggctggtgggcgaggccgagcagctcttcagcgagatgaaggacccggacctgggcgacgtgccgaagccagacaagtggagctacacggccatgatcaacatctatgggagcagcggggatgcggaccgcgcactccagctgtttgcggaaatggtggagagcggaatcgagcccaacatcatgagctataccattgtgatccagtgcctgggaaaggcagggaggatacaggaggcggtggacgtgctagaggctgggatggccaagggcctcaagcccgatgaccgactctgcgggtgcctgctctccgtggtcgcgctgagcagcggggacgagacggaggtgattctggcttgcctggagaaggtgaggagtaatctggtgaagctgatcaggatgctcggggatgcccgggtgggagtggaggacctgagggtggagctgaagggcatactgaacagcgcggcccctgaggtgcggcggccctactgcaactgcctgatcgacatatgccgcaaccatgggtaccctagtgagagggcagtggagctgttccgcctcgcccggcactatggcctgtactcgaagatccatacgaggaaggaggaggagtggtcgctggacctgcggtcgctgtcggtaggcgcggccaagacggcgttcgacgactggatgaagaccatccgggaacacgaggaggaggaggctctgccacagacgtttagcgtgtacaccggctccagcacccacaaattcgcgcaggggctggcgaccgcggtggcctctcatcttgagcaggtgggggcgccgttccgtgccagcgactcccagcttgggagcttcatcagcagcagggatgatctgctctcctgccgcaaccactcctcctcctcatcggaggggttcttcttccgaaatccgaatcgatcaatcgagcaagggacgggacagggacgaatcgtcgccggagaagaggagagggagagagagagagaacagaggggcagaaggcgagacaagatgatactagcggtgctcttctccaactccgacggcaacatcctcatcgagcgcttccatggtgttcccgcggaggaaaggctgcactggcgttctttcctcgtcaagcttggcgccgacaacctcaagggggccaagaacgaggagctcctcgttgcctctcacaagtccgtctctattgtttatacaatgattggggatgtctgcctgtacattgttggcaaggatgaatatgatgagcttgctctggccgaggtgatatttgcaatcacatcggcagtgaaggatgtatgtgggaaaccgcctacggagaggctcttccttgacaaatacgggaggatctgcttgtgccttgatgagattgtttggaagggtctgctggagaacacggagaaggacagagtccggaggttgatcaggctaaagccgcccgttgagccatgattttttgatcactttggaatatgtgtgtatccttctcgtcgtgtaatcatatctctcgcagtttatttgctggcagttgtttttttattccctttgggatggatgattctgtatgtgtacaatcctaatacattttgccactgatgatttgtactgttaaaaaaaaaaaaaaaaaaaaaaaaaaaaa

SEQ ID NO: 100538 - DNA, 798 bp, Oryza sativa
  Clone ID: PAT_MRT4530_98244C.1
aggaatcactcaaggcccctcctcctctctccatcaagagaagctctacctcggcccgtccgcgcccgccggccggccgccgtcgccatggctcccggcaagctccccgtcaatcactcaaggcccctcctcctctctccatcaagagaagctctacctcggcccgtcctcgcccgccggccggccgccgtcgccatggctcccggcaagctcgcggtgttcgccctcctggcgtctctcctcctcctcaacaccatcaaggccgcagactaccctccggctcctccccttgggccgcctccccacaagatcgtagaccccggcaaagactgcgtgggggcgtgcgacgcgcggtgcagcgagcactcgcacaagaagcggtgcagccgctcctgcctcacgtgctgcagcgcgtgccgctgcgtcccggcgggcacggccggcaaccgggagacctgcggcaggtgctacaccgactgggtctcgcacaacaacatgaccaagtgcccgtgagctaagcgcgcacgaatacgatccgtctgcctgcctagatctagcttaatttagctttgcattgctcctagttgagtagttggtgttgtccgttgggtttctgtctttccagagttatccttttttctttttctttttttttcttcctgagagaagagagggtgttgacgagctgttactgttagtattctggacctctagtatgttttgttgtgtaaaaaaggactagtgaaatccatctcggcttgaatcacgcttgatataaaaaaaaaaaaaaaaaaacac

SEQ ID NO: 100539 - DNA, 2973 bp, Oryza sativa
  Clone ID: PAT_MRT4530_98245C.1
atggaggagagtttgatgggatggtggcaagcgaatgcgaccgtatttgaaggagttggcaagtcggcggtagggctccaacgacagaaacaaatcgaaagctcttgtaacaaggaagcgatggatcgaagttggatgtacacgactggcttgaggcgtcagtacaaggagtatagagatggcgtattaagttttatgaaagccgcagtggaggagaggataagaagaaacgacaagtacatgtgttgtccatgtagtgattgcaggaatgagatttggttggacgatgaaaaggaagtacacgctcacttgatacgccggggattcatgaagagatacacatgctgggtgaagcatggagagcaagatctgggtactgatggtgcagctgcggacggaagtggtgcagacaatcatgaagaaggagatgaagaagagcatgacatgtttgtcccatctccattgggcggtgaaatggttgatgtggaccctgatatgctgcaagacatgttacgtgacgttgatgacctagctatgaacgagagagattcaatgaagttcagcaggttggtcagtgactcggagactcctctatacgcaggatgcaagccaaagcacaccaaattatcagcagcattagacctaatgaagttgaaggctagtagtggatggccagacaagagttttacagaacttttgggaatactgaaggacatgcttcctcaggagaacacattgcccaagatgacatatgaagcaaaacagcgaaagaagagcgcgggggatggaaagaagtcaaagcggggtggtccagcgaaggttgtgtggtatctaccaatcattgatcgtttcaagagaatatttgccaaccctaatgaagcaaagttagtacgttggcatgtcacagagagaaggaatgacggtccgagacaaccccgcaatgacatcgatatgttcttggagggtgtggaaacttgggatgcatatggtcaggagaacttcacactacgagttcaattgttctgcaccattaatgattatcccgcgctgggtaatctttctgaacaaactatgaaaggaaagaaggcatgctctgactgtatggaacatacacgcagtaggtggctaaagaaatcaagaaagatggtttacatgggtcataggagatggctccccctacggcacgcctttagaagaaagaagaaaattttcaatggtaagaaagaacttgggtcttcccctgcggatttgtccggagatcaggtacacaacatggtgaaggacattactaatgagtttgggaagaaaagaaaacgtagcaaggaggacaagaagaggatgtggaagaaaaaatccatattttggcggctacctttttgggaagatcttgaggtccgtcattgcattgatctgatgcacgtagagaagaatgtgtgcgatagcttgctggggctattgttgaatatgcctagcaagacaaaggacgggttgaatgcgtgtctcgatctacaggagatgaacattcgcagtgaacttcagcctgttacagatgagaagacaggaagagtgtacctcccaccagcttgccacacattgtcgaaggatgagaagatcgcaatgctatcatgtctggcagatattaaagttccttcgggctattgcgcgagaataagtaagtatgctaaattggaggatcttaagctggttggaatgaagtctcacgattgtcacgtgctaatcacacagatcttgccagttgctataagaggcattctaccaccacaagtccgtcacacgatccaacggctttgtgccttcttcaatgcaatcggtcagaagattatagatccagaagacctagatgggttgcaggccgatattgtcagtaccctgtgtcacatggatatgtattttccactggctttcttcgatatcatggttcatctcactgttcacctagtgaagcaaacaaaaatatgtgggccagcttttatgagagaaatgtggccattcgagaggtacatgggaattctgaagtcctacgttcggaacagagcaaaaccagaggggagcatcattgaaggttacacgaccgaggaagccattgagttttgtatcgattacatggccgagactgatcctatgggagttcctacgtctcgccacaaaggaaggttggcaggtgtcggcacaactggtagaaaaacaattgttcccgatcaagcttcctacgcgcaggctcatttcgcagtgctgcaacatatggctgaagtaaccccatactttgaggagcatttatcaaaggtccgacaggacaatattggtcgatcatatatttggatcaacagagaacatggtgcttgcttcaacgaatggttcaaggatcgtgtagcacggtcgaccgatggcccaagtgagatattacaaaggttggcaaggggtccatcttgggatgttgacacatggcaagggtacgatatcaatggatacacattttacaccgtcacacaagatgagaaaagcacagtgcaaaacagtggagtctgtatagatgcatatcaggatcaggctggatcgagcacatactacggccgcatagagcagatatgggagctaaactatctaaaattcaaagtcgctttgtttcgttgcagttgggtgaatatccgcacaggtgtcaaggtcgacaaggaaggcttcacattagtggacctggccaaggttggatacgcagacgaaccattcgtactagcaaagcaggtcgaacagattttctacataaaagaccccgcaaacaagaagatgcacgtcgttagggatggcaagcgaagaattgtgggggtggacaacgtcgtcgatgaagaagaatacaacaagaatcttcatgtcagacctcagatcgaccttgacgatgatcccgaagacaatgtggcttacgttcgttcagaccattcggaaggcatatcactgtga

SEQ ID NO: 100540 - DNA, 1227 bp, Oryza sativa
  Clone ID: PAT_MRT4530_98246C.1
tttgtgcatctgcaactcatctcggcaccaccgggccgctcttctcactcagggccaccatggccgccgccgccgccgcggcgctcatcaccgccgcctccactcctttcccgctggtctccttccgcagccggcgggatggccacctgagcctttcgcctcctcgccgccccggcgccgggcgctgcagggcctcggcgccgacgttccaggggggacccgccgccagctacgcccgcgagatggagcgcctctccgccaaggagtccctcctcctcgccttcagagatgctggagggtttgaatccttggttagtggaaagactacagggatgcagaagattgatgtcaatgagcggattgttgggctcgagcgtctaaaccccactccacggcccacaacatctccctttctggaaggtcgatggcactttgaatggtttggtgacagcagtcctggagcacttgcagcccgtcttctgtttgagaggtcacctacaactgttgcacactttacaggacttgatgtcctgatcaaggatggatactccaaaatttcttccaacgtgaagttcttaaatacggtgcaaagcaagttcctgctgactactcagttgtctgtggagggtcctattaggatgaaagaggaatatgtcgagggcctaatagagatccctaggatcagagaagaaacactgcctgatcaactaaagggtttctttggacaaactgcaggtgctctgcaacaactccctgcccccataagggacgctgtttcagaggggattaaattgccacttaatgggatgttccagcgcctattcatgatttcttacttggatgaggaaatactgattatcagagatgcatctggagcacctgatgtcctaacaagattggaagggccacagccaaattcaattgatggcacatcagacgcagtgctgtcagaatatgaaagctagtgttaattgggtgcactaattagaacgtcgtgattagttttttgttcttctgttcagccacttttcacgcttgcacatacataataactgtagtgcgtaacagcatccacttgaatggattaacttacctcctttcttgtgagcagagtacatactgatactgctcttcaggatttgttatggctgtcagctcatggaataagatgaatatctcgacataaaaaaaaaaaaaaaaaaaaaaaaaaaaaaaaaccccctcccc

SEQ ID NO: 100541 - DNA, 2226 bp, Oryza sativa
  Clone ID: PAT_MRT4530_98247C.1
atggagagttacacatgttgggtgaagtatggagagcaagattcggatactgatggtgcaactgtagatggaaatggtgcagacaatcatgaagaaggagatgaagaagagcatgacatgtttgtcccatctctattgggcggtgaaatggttgatgtggaccctgatctgctgcaagacatgttacgtgacgctgatgacccagctatgaacgagagagattccatgaagttcagcaggttggtcagtgacttggagactcctctatacgccggatgcaagccaaagcacaccaaattgtcagcaacattagacctaatgaagttgaaggctagtagtggatggacagacaagagttttatagaacttttgggaatactgaaggacatgctttctcaggagaacacattgcccgagacgacatatgaagcaaaacaggttatgcgtcccctagggttagagctccagagaattcacgcatgtccaaacgactacatattgtaccacaagcaatacgtggacttagatgcttgtcctgtctacaaggcttctcgatacaagcgaaagaagagcgcggggaagggaaagaattcaaagcggggtggtccgacgaaggttgtatggtatctaccaatcattgatcgtttcaagagaatatttgccaaccccaacgaagcaaagttagtacgttggcatgccacagagagaaggaatgacggtttgctaagacaccctgcggattcgattcaatggaggaatatcgatcgaaagcacaaagactttgctaccgaccccagaaacatgaggatatgtttgtgtacggatggcatgaatcctttcggagacatgagcagttctcacaacacttggccagttcttattgcgaactataacctcccgttatggttgtgcttcaaaagaaaatatattatgttgtacttgttaatccatggtccaagacaacccggcaatgatatcgatgaccttgaaattctgtggaaagagggtgtggaaacttgggatgcatatgagaagaatgtgtgcgatagcttgctggggctattgctgaatatgcctggcaagacaaaggacgggttgaatgcgcgtcttgatctacaggagatgaacattcgtagtgaacttcagcctgttacggatgagaagacaggaagagtgtacctcccaccagcttgccacacattgtcgaatgatgagaagatagcaatgctatcatgtctggcatatattaaagttccttcaggctattgtgtgagaataagtacgtacgttaaattggaggatctaaaactggttggaatgaagtctcacgattaccacatgctaatcacaaagatattgccagttgctatcagaggcattctaccaccacaagtccgtcacacgatccaacggctttgtgccttcttcaatgtaatcggtcagaagattatagatccagaagacttagatgggttgcaagccgatattgtcagtaccctatgtcacttggagatgtattttccactagctttgttcaatatcatggttcatctcactgttcacccagtgaagcaaacaaaaatatatgggccagcttttatgagaaaaatgtggccgttcgagaggtacatgggaattctgaagtcgtatgttcggaacagagcaaaaccagaggggagcatcattgaaggttacacgaccgaggaggccattgagttctgtatcgattacatggccgagattgatcctatcggagttcctgcgtctcgccacgaaggaaggttgcaggctcgtttcgcagtgctgcaacatatggttgaagtaaccccatactttgatgagcatttagcgaaggtccgacgggacaatattggtcgatcagatatttggatcaacagagaacatggttcttgcttcaatgaatggttcaaggatcgtgtagcatggtcgaccgatggcgcaagtgagatattacaaaggttggcaaggggtccatcttgggatgttgacacatggcaagggtacgatatcaatggatacacattttacaccgtcacacaagatgagaaaagcacagtgcaaaacagtggagtccgtatagatgcatatcaggatcaggctagatcaagcacatactacggccgcatagagcagatatgggagctgaactacctgaacttcaaagtcccgttgtttcattgcagttgggtgaaggattcaccttag

SEQ ID NO: 100542 - DNA, 1402 bp, Oryza sativa
  unsure (1)..(1402): unsure at all n locations
  Clone ID: PAT_MRT4530_98248C.1
taggtggttaaagaaatcaagaaagatggtttacatgggtcataggagatggctccccctacggcacgcctttagaagaaagaagaaaattttcaatggtaagaaagaacttgggtctgcccctgtggatttgtccggagatcaggtacacaacatggtgaaggacattactaatgagtttgataagaaaagaaaacatagtaaggaggacaagaagaggatgtggaagaaaaaatccatattttggcggctaccttattgggaagatcttgagacgggaagagtgtacctcccaccagcttgccacacattgtcgaaggatgagaagatcgcaatgctatcatgtctggcggatattaaagttccttcgggctattgcgcgaaaataaatcttgccaattgctataagaggcattctaccaccacaagtccgtcacatgatccaacgggtttgtgccttcttcaatgcaatcggtcagaagattatagatccagaagacctagatgggttgcaggccgatattgtcagtaccctgtgtcagttggagatgtattttccactagctttcttcgataccatggttcatctcactattcacctagtgaagcaaaaaaaatatgtgggccagcttttatgagagaaatgtggccattcgagaggtacatgggaattctgaagtcctacgttcggaacagagcaaaaccagggggaagcatcattgaaggttacatgaccgaggaagccattgagttttgtatcgattacatggctgagacttatnctatcgggagtcctacgtctcgccacgaaggaaggttggcaagtgttggcacaactggcagaaaaagaattgttcccgatcaagcttcctatgcgcaggctcatttcgcagtgctgcaacatatggctgaagtaaccccatactttgaggagcatttagcgaaggatcatgtagcacggtcgaccgatggcccaagtgagatattacaaaggttggcaaggggtccatcttgggatgttaacacatggcaagggtacaatatcaatggatacacattttacaccgtcacacaagatgagaaaagcacagtgcaaaacagtggactccgtatagatgcatatcaggatcaggctggatcaagcacatactatggccgcatagagcagatatgggagctgaactatctgaacttcaaagtccctttgttttgttgcagttgggtgaatatccgcagaggtgtcaaggtcgacaaggaaggcttcacattagtggacctggccaaggttggatacgcagacgaaccattcgtactagcgaagcaggtcgaacagattttctacataaaagaccctgcaaacaagaagatgcacgttgttagggttttggttgtctgtgtgtag

SEQ ID NO: 100543 - DNA, 1035 bp, Oryza sativa
  Clone ID: PAT_MRT4530_98249C.1
atgtcctcgccgccgtctgatccgagctccggtggtggcgatggcggctcggccgtgccggggacggcgagctccaacttcacgctgctgtacatcatcatcgccgtcctcgtcggcgtgatcctgtacatggcgatccggtacggccggtcggtgatgtcggagtggcgccagctgcaggccggcggcggcggcggcgagccgcgcgccgcgctgctcgggctgagctcggacgacatcgacgcgctccccacgttcacgtaccgggcgcgcggggcggcggcgtcgccgctggtcggcggcggcgggaggaggggcggcggcagcggcaaggggaagggggcgacgacggtggtggtggagtgcgtggcacttcttccacggcggctgcatcgacctctggctgcgcgcccactccacgtgcccggtgtgccgcgcgcacccggagcccgacggcgtgcggctcagcgacgtcgtggccgtgtcgccgccgctgccgcagctgcgccggtgcggcctgtcgccggagcggcccacggcggcgtcgcgcgccctggcggacatcctggcacgttctccattgaggggcaacaccacctcgacgacgacgaccaccaccaccggcggaccgatcacgtcgacgtcgtcgaagtcgccgtcgtcaccggttcaagcggcgatcatcaactacgtgcaggcctcacgttcgccgtctccgacggcgtaccacagcctgaacgagcggtggccgagctcgccgacgccggttgtggttgtgcggtcgaagtcgccgtcgccgtcgtcgccaccgataggtggtctgagtctgcagacgacgacggcggcggcggcgagaggcgtcggcgtggtggaaggggtggatgcaggtgcaaccacgtcggcgtcggcgtcggcgccaacgcaggtggtggcgctgtcaagggaaggtggtggttcgcggtccaagtcgccgtcgccggtgccacattaataacgaggctgcagaagagacgccaggataaggctatagcttga

SEQ ID NO: 100544 - DNA, 2988 bp, Oryza sativa
  Clone ID: PAT_MRT4530_9824C.1
atggtggtcgggccactgctgtccatggtgaaggacaaggcctccagctacctcctggagcagtacaaggtcatggagggcatggaggagcagcatgagattctcaaacgcaagctgcccgccatcctcgacgtcatcgccgacgccgaggagcaggcggcaaaacacagggaaggggcgaaagcatggcttgaggagctccggaaggtggcctaccaggccaatgatgtcttcgacgagtcaaagatgaatgcctttatttttaagttccgaccagagccaccaatgtcctccatcaaatggagaaagacggattctaaaatctccaacctttctatggacattgccaacaagtcaagaaagaaagacaaagaggagattgtcaatcgattgcttgctcaagccagcaatggggatctcactgttattcccattgtaggaatgggggggatgggcaagaccaccttagcgcagctcgtttacaatgaccctgaaattcagaagcattttcagttgctgctctggttgtgtgtctctgacaacttcgatgtggattcgctggcaaaaagaatagttgaagcagctcccaaagaaatgaataagaagaatgataatggaggggccaaaaagttaccacaggatgaacttaaagaagttgtgagtgggcagaggtacctcctcattttggatgatgtctggaaccgtgatgccagtaagtgggaagcactcaagtacaaccttaagcatggtggcagcggtagctcagttttgacaacaactcgtgatcaagcagttgctcaactaatggctccagctcaagaagtttatgatctcaagaacctgaatgaaagcttcattgaggaaattatcaagagaagtgctttcaattcagaacaagaaaggcctcctcctggctactcgaaatggttggtgatattgccaagaaatgttctggatcatgagatcgacgtggaaatgctgatccagttatggatggccaatggttttatcccggagaaacaaggagagtgccctgaaatcattggtaaaagaattttcagtgagttggtgtcaaggtcattttttcaggatgtgaaggggatcccatttgagttccatgatataaagtgctctaagattacttgtaagatccatgaccttatgcatgatgttgcacaatcttccatgggaaaagaatgcgctactatagctacagaacttagtaaaagtgatgattttccttattccgctcgccacttgtttttctcaggtgtcattttcctaaagaaagtatatccaggggctcaaggttctgagtatacttcactgtgggagcagtacatgtcaacatggatgaataaactgcgggacatggtgaagcttgtgttagatggttgcaaaaatctcgagaagcttcctccactgtggcagctgccagctctagaagttctttgccttgaaggactggatggtttaaattgcttgttcaactgtgacatatacacctcctttacattttgcagactgaaggagcttaccttggccagtatgagaaattttgagacatggtgggacacaaatgaggtaaaaggagaagagctgatatttcctgaggttgaaaagctgataatcaaaagttgtcctaggctaactgccttaccaaaagcgtcaaatgtgatttcagaattgtctggcggagttagcaccgtgtgtcattctgcatttccagcattgaaggaaatggaattatatggtttggatatctttcagaaatgggaggcagtcgatggaactccaagggaggaggtaacatttcctcagctttacaaattagatattagacggtgcccagagttgactactctacctgaagcaccaaagctgagagacttaaacatatatgaagtcaatcagcaaatatccctacaggcagccagcagatatattacttcattgtccagtctccacctgcatttgtcaactgatgacacagaaacagcaccggtggccaagcaacaagattcgagtgaattggtgattgaggatgagaaatggaatcataaatctcccctggaacttatggacttaactggctgcaaccttttattctcttacccaagtgcgttggctctgtggacatgttttgttcagctcctagatctgaatatttgggaagtcgatgcgcttgtcgactggccagaagaggtgttccagggcttggtttccttgaggaagttacatattcttcaatgcaagaatctgacaggactcacacaagctcgtgggcaatctacactagcaccaagtgaactcctgccacgtttggagtccctgcagatacgccgttgttattcttttgtagaggtccccaacctaccgacgtctctcaagctattacaaattacggactgccatgacctgaggtccatcatattcaatcagcagcaggatacgacgatgttggtgagtgcagaaagcttcgcacagccggacaagtcatcgttaatatcagggtccaccagcgagaccaacgatcgcgtccttccacgcctagaatctctagtaatagagtattgcaatcgtttgaaggttctccatcttcctccgtccatcaagaaattggatattgtacgctgtgaaaaacttcagtcactctcaggaaagctggatgccgttcgagcattaaatatcagctattgcgggagcttgaaatcactggaatcttgcttaggagagctcccgtcgctgcaacacctcagacttgttaattgcccaggcctggtatccttgccgaaggggcctcaagcatactcatctcttacatctcttgaaattcgttattgttctggtataaatttgcttccaccgagcctgcagcaacgtctggatgacatcgagaataaagaactagatgcctgctatgaaggtaatcttcagtttcttaaccgtgtacgatttagtggtaaaagtttcgagcgtggtgtctag

SEQ ID NO: 100545 - DNA, 217 bp, Oryza sativa
  Clone ID: PAT_MRT4530_98250C.1
atgacggacctcaagatcttcccaataagataccacacaaccttcgccggaccaccccgctttgacttctttccctcgcccgcgctcttctttcgcttgtatcgagaagccttgcagacaggacaagcatctaagtccgcaggagtctccgagtcactgaccaacctgctgaacttcatggaatctctctcgttcatagctaggtcatcaacgtcac

SEQ ID NO: 100546 - DNA, 1047 bp, Oryza sativa
  Clone ID: PAT_MRT4530_98251C.1
atgtcctcgccgccgtctgatccgagctccggtggtggcgatggcggctcggccgtgccggggacggcgagctccaacttcacgctgctgtacatcatcatcgccgtcctcgtcggcgtgatcctgtacatggcgatccggtacggccggtcggtgatgtcggagtggcgccagctgcaggccggcggcggcggcggcgagccgcgcgccgcgctgctcgggctgagctcggacgacatcgacgcgctccccacgttcacgtaccgggcgcgcggggcggcggcgtcgccgctggtcggcggcggcgggaggaggggcggcggcagcggcaaggggaagggggcgacgacggtggtggtggagtgcgtggtgtgcctgcaggagctcgccgacggcgacgtggtgcgcgtgctgccggcgtgcaggcacttcttccacggcggctgcatcgacctctggctgcgcgcccactccacgtgcccggtgtgccgcgcgcacccggagcccgacggcgtgcggcttagcgacgtcgtggccgtgtcgccgccgctgccgcagctgctccggtgcggcctgttctcttattggcccacggcggcgtcgcgcgccctggcggacatcctggcacgttctccattgaggggcaacaccacctcgacgacgacgaccaccaccaccggcggaccgatcacgtcgacgtcgtcgaagtcgccgtcgtcaccggttcaagcggcgatcatcaactacgtgcaggcctcacgttcgccgtctccgacggcgtaccacagcctgaacgagcggtggccgagctcgccgacgccggttgtggttgtgcggtcgaagtcgccgtcgccgtcgtcgccaccgataggtggtctgagtctgcagacgacgacggcggcggcggcgagaggcgtcggcgtggtggaaggggtggatgcaggtgcaaccacgtcggcgtcggcgtcggcgccaacgcaggtggtggcgctgtcaagggaaggtggtggttcgcggtccaagtcgccgtcgccggtgccacattaa

SEQ ID NO: 100547 - DNA, 1983 bp, Oryza sativa
  Clone ID: PAT_MRT4530_98252C.1
atggcgggcggtgacctcccgcgccgaacacgagccaagcgcggcgctttgttgctgtcgaaaatgttccgccaccgccgtcccacacggtatcgccggcactctgctgtactcgaacaacaatgtcctcacgtaattgccgctggtgccgcgactagcgccccgctgggagaaagtccatatgcgctggaagaacaagtccacgtcgaagagatgaacattcgcagtgaacttcagcctgttacagatgagaagatgggaagagtgtacctcccaccagcttgccacacattgtcgaaggatgagaagatcgcaatgctatcatgtctggcagatattaaagttccttcgggctattgctcgagaataagtaagtacgttaaattggaggatcttaagctggttggaatgaagtctcacgattgccacgtgctaatcacacagatcttgccagttgctataagaggcattctactaccacaagtccgtcacacgatccaacggctttgtgccttcttcaatgcaatcggtcagaagattatagatccagaagacctagatgggttgcagaccgatattgtcagtaccctgtgtcacttggagatgtattttccactagctttcttcgatatcatggttcatctcactgttcacctagtgaagcaaacaaaaatatgtgggccagcttttatgagagaaatgtggccattcgagaggtacatgggaattctgaagtcctacgttcggaacagagcaaaaccagaggggagcatcattgaaggtgacacgaccgaggaagccattgagttttgtatcgattacgtggccgagactgatcctatcggagttcctacgtctcgccatgaaggaaggttggcaggtgtcagcacaactggcagaaaaagaattgttcccgatcaagcttcctacgcgcaagctcatttcgcagtgctgcaacatatggctgaagtaaccccatactttgaggagcatttagcgaaggtccgacaggacaatattggtcgatcagatatttggatcaacagagaacatggtgctcgcttcaacgaatggttcaaggatcgtgtagcacggtcgaccgatggcccaagtgagatattacaaaggttggcaaggggtccatcttgggatgttgacacatggcaaggttgggtgaatatctgcacaggtgtcaaggttgacaaggaaggcttcacattagtggacctggccaaggttggatacgcagatgaaccattcgtactagcgaagcaggtcgaacagattttctacataaaagaccctgtaaacaagaagatatccaccgccgtcgtcgcctcctcctcctccgccaccgctgacgccgcctcctcctcctccaagccgtcgcctcccgaccgccgccgcctcctcctcgacgccgccaccgcctcccggttcaatatccatcgctgcctcctccatagtcgtggatccggccttactgaccgccgccgccgcctccaggttcaagatccgccctccccgaccgccagcgcctcctccacgcccaagaccgccgccgccagcctcctctccaagttcgccgccgccggcttcctctccgccaagtcgtcaagaccgacgccacggccgcttcagcgatcgacgtcaagcccgccgccaagaccgacgtcaagcccgacgccaagtccgccgccgtcactggcctcctctccgccgcttcttctcctcctagttactgaaattatggcatttaggagaatacgaagtgtcctggttgccaaatctggtttggtcggtgacattgatagcaagttcgagtggtatactgatgtcgaggtcgagttcccggctgctccagccctattgagcatggatgctatggtttcgtcgacgaggcgaattgacataggacatgtcgcagcaaggcgaaccgatgtcaacgaccacttctgggactacatcgtgccggaatcctag

SEQ ID NO: 100548 - DNA, 578 bp, Oryza sativa
  Clone ID: PAT_MRT4530_98253C.1
ctttgaccgaccttgttatttatctacagatgctatgcgcgcctgcaccctagggctgtcaactgccgcaagaagaagtgtggtcacagcaaccaggtgagcttgatgattgatagtggggcttactattattttacagtagtcatgcaattcagtccatcttctggttaccctttaggaattgttatgatgattggatggaagtagggttttcatatgttctagatttgttatttgtgcctttaagcttgtaaataatggccatggcatttgctagcatgatttcaataacatataccataacatatcaacataccctttttattttggctgtttgatctaacgaaaatttctggtccttccactttcagctgaggcccaagaagaagatcaagaactagagcgtcactcgccgggttcatggactggttaaatcaatcgtcatattagacttttatgcttccgttgttatctccctggatgttgttgaaccgtgttttactgtgctggatgcttcagcttcttgttttgacggtcgtggtatatggtaattggcagcaaactatattggtcaaaaa

SEQ ID NO: 100549 - DNA, 2499 bp, Oryza sativa
  Clone ID: PAT_MRT4530_98254C.1
atgcggccatggcggccgccgccgaccgccgtcgcctccctcgcccaccaatgctccctcctcctccgccgcctcgccgagcgccactcgccggccccgacctgcccctcctcctccttcctccgcgccctccgctgcctccacgcccgccttctcaccgccgacctcctccacgccccgtcccacccccacctcaccctccgcctcatccacctctacaccctctcccccgacctcgccacccccgcggctctcttccgctcggaccccgacccgggccccgtcgccgccacctccctcgtcgccgcgcacgccgccgccggccgcctccgggacgccgccgccttcttcgacgccgtcccgcccgcccgccgcgacaccgtgctccacaacgccatgatgtccgcgttcgcgagggcgtccctcgccgcgcccgcggtctccgtgttccacgccctgctgggctccggctcactccgccccgacgattactccttcaccgcgctcatcagcgccgtcggccagatgcacaacctcgccgcgccacactgcacgcagctgcactgctccgtgctcaagtccggcgcggcggctgtcttgtctgtgtccaatgcgctcattgctctgtacatgaagtgcgacacgcctgaggcctcctgggacgcacggaaggtgctcgacgaaatgccggataaggatgacctcacatggaccactatggtcgtcggctatgtcaggagaggcgatgtcaatgctgctagatcagtttttgaggaggttgatggtaagtttgatgtcgtgtggaatgcgatgatctcagggtatgtccaatcgggaatgtgtgcagacgcctttgagctattcaggaggatggtgtcggaaaaggttccgcttgatgagttcacttttactagcgtcctgagtgcgtgtgcaaatgctggattctttgtgcatgggaagtcagtccatggtcagattattcggttacagccgaatttcgttcctgaggcagcattgcctgttaacaatgcgttagtgactttgtactcgaagggtggaaagattgtgattgcgaagaggatatttgacactatgaatctgaaggatgttgtttcttggaacaccattttgtcgggatacattgacagcggctgtttggacaaagcagttgaggtatttaaggtgatgccatataaaaacgatttgtcatggatggtgatggtctcaggatatgtccacggagggctttcagaagatgctctgaaactgtttaaccagatgagagctgaggatgtcaaaccatgcgactacacctatgcgggtgcaatagctgcctgtggtgaacttggagcgctgaagcatggaaggcagctccacgcacatcttgtacagtgtggatttgaggcaagcaattctgccggaaatgcacttctaacaatgtatgccaaatgtggcgctgtgaacgatgctcgtcttgtgttccttgtgatgcccaatttagactctgtctcgtggaatgccatgatttcagctcttgggcaacatggacacggtagagaggcacttgagctatttgaccagatggttgctgaaggcatagatcctgaccgaatttctttcctcacaattttgacagcatgtaaccatgctggtttggtagatgaaggcttccattattttgagtccatgaagagggactttggcattagtcctggagaagatcattatgcacggctgatagatttacttggtcgctctggaagaattggagaagctagagatttgatcaagacaatgccttttgagcctaccccgtccatttgggaggcgattctctctggctgtcggactaatggagatatggaatttggtgcttatgcagctgaccagctgtttcggatgataccacagcatgatggaacatacatcctactgtctaacacatattcagctgctggacgttgggtcgatgctgcaagagttagaaagctaatgcgtgatcgtggggtcaagaaggagcctgggtgcagttggatagaagtaggaagtaaaatccatgtgtttcttgttggtgatacaaaacatccagaagcacaggaagtctaccaattccttgaagtgattggtgctaggatgagaaagctgggatatgttcctgatacaaagtttgtgttgcatgatatggagcctcatgaaaaggaatacatattatttgcacatagtgagaagctggcagttggatttggacttctaaagttgcctcctggagctacagttactgttttaaaaaacttgagaatatgtggtgactgtcatactgcaatgatgttcatgtcaaaggcggttggacgggaaattgttgttagagatgtcaggcggtttcatcatttcaaggatggagaatgttcatgtgggggtttgtggtggaatccaggagaatccgagaatggactaattcagattgctggcaaagtcgtggagaaacttggcatttcatga

SEQ ID NO: 100550 - DNA, 375 bp, Oryza sativa
  Clone ID: PAT_MRT4530_98255C.1
acttgccactttcacaggaccccagttccctaaccttctatggtaagccaccacttgccaggaaagagttccatcttccgtgctctccccaactgatgtttctagcaaatgcatatcgcatctcaagagcaagaggcctccagaggctcaagcataaccgaggagatgacttcgtgtcgcattcactccaatccaatacaagagctgaccaagaccgtttataatgccggcagaatcctcttacggtccgcgcttcctgcgataaagaatagactaaatacaataaatgttgcaacgcattgttttctctatgtactgtccactcttctcgactcatgatgataaacctctctttaaaaaaaaaaaaaaaaaaaa

SEQ ID NO: 100551 - DNA, 351 bp, Oryza sativa
  Clone ID: PAT_MRT4530_98256C.1
ctacagtgcggtgccgggccccgggtcgaaatgaatggggttgccatatgacatattgacatgcatgctttgtgtagtcccagctaccaccatcaacatctctttgtctggatccaacgtctccacgtccgcgacccattcaagaccgtcgccgatctctctgttctgtgaccggtgaccccaacaatctccaagcacattcttgtcgtccgagatcattgcttctcccacttgccgcaccttctcggctgtgatgcacgtgcagagctcacccacatccttgttacttggcggtggccggatcagcaatgctggtgcccaagaagagaggttgttgccggcggccttcat

SEQ ID NO: 100552 - DNA, 326 bp, Oryza sativa
  Clone ID: PAT_MRT4530_98257C.1
tattaattattatatatattaatatatatatatatatgatatgatgataatgatgatgatgatgatgatgatgatgatgatgatgatgatgatgatgatgatgatgatggtgtgtgagtggactggatgattgaaaccagtgagttggaaaaaatgggatgggaaatgatgcttggggtgggtgattgaccgtgcaacaaaggaacacgctggagatcccagaaagatgtttccgctgacggaaattgtaaatatgggatggcaatcttctatggagaatttggcatttttatgttgctttgcagtttgcaaaaaaaaaaaaaaaa

SEQ ID NO: 100553 - DNA, 300 bp, Oryza sativa
  Clone ID: PAT_MRT4530_98258C.1
atggcggacatcctcgtggtggtggaggaggcggagcggcggcgccggcggaggaggcgtagcgacagcggatgggctccttgcggagaggcgaagcggtggcgctggcatagcgacgcggacgggctcctcgtggaggtggaggaggcagagcaacggtcggggcagaggaggatgtgtagcggcggcggacgggctcctcgcggtggtggaggaggcaaagcggcggcgctgtcgaaggagagcacgctcctcgccggaccagagggaaagaagaaggatagagaagaggctgactag

SEQ ID NO: 100554 - DNA, 358 bp, Oryza sativa
  Clone ID: PAT_MRT4530_98259C.1
aaatattgttttatttgttcaatgtgcctaatatactctttgtttcttgaaattgattgattcttttccaaaaaaagaggggggcacaaaaaaatggtttctctggaaaacaagcaacacaaacagaattgcgggccccacccgggagagcgcccccgccccaatctgttaacccccgaaaagaacagggctccccaaatacataaaaaaacaaattattacacgcgcccctcggtaaaaccgttccctgggacgggccggaaagtctttgtaaaaaacggcgaccccgcgttggggtaaaaaagccaattttgccgccacttaattcccccgcggggggcggggaacaattgggggg

SEQ ID NO: 100555 - DNA, 510 bp, Oryza sativa
  Clone ID: PAT_MRT4530_9825C.1
ggctgccaaaatttccccccttgcggggtggccgccaaccaagtcctccccggtaccgccggctcctcctcaagacctccccttcgccgtcaagtcctccgccggctcctccccgaagtagtctccctcgccgtcactgccgccaggaccttttcccccctcgccgtcgccgccgcgcgcgaagtcctccccgccaccgcgggctcctccccgaagtcgtccccctcgccgtcgccgtcgcgcgaagtcctccccgccaccgctggctcctccctgaagtcgtccccctcgccgtcgccgtcgccgccgccaggacctctccccctcgccgcgtcgccgccgccaagtcctccccgccaccaccggctcctccccaagtcctcccggcccctcgccgccaaggccgtgccggctcctccccgaagtcctacccctctctgccaccgccgtcgccgccggcaatacctccccgccaccgccgcgccggctcctcgggtcccaagtcccccg

SEQ ID NO: 100556 - DNA, 1001 bp, Oryza sativa
  Clone ID: PAT_MRT4530_98260C.1
ttgttcatgatctcccccttgctccccaccggcatgggcagcttgctgagcttgagcagcgaggcggcgaagtcgtggtcccagagggcggcgttgtcggcgtactcgcggacgtggccgcgcgcctcgtcctgcgtcagcagctgccagtccgagttgaagttgaccaccttgtcgaggttgttgcggtagtaggtgttgtccagggcgctgaccggccgcagcttgccgacgaacgccggcatgaacctcgccacggtggcgaggtcctcgtcgcgggcgttgttcaccaccgcagggtcggcgccgccgccgcgggagcacctgtagttgagcaggttgcggtaggacggggtgatctggtcgggcggcgcggcgaggcgggcggtgaaggaggagcagtggccgtcgccgacggagtgcgcgccggagaggacgacgagctcctcgacggtgaagttcttgcgggcgaagttgtcgatgagctgccggatggtgaaggtgggatccgggagctccgcctgggcctcgtaggcggaggagacgacgccgtcgaggcggcccgcggggacgtcgaagcggacgcggccgttgctgaggatgctgctggcgtcgcgggcggcgaagatgaggatgtcggcgcaggagaccacgccggggcacctcctctcgagatcggccttgatctcctccaggatgtcgaatccttccagcccgatgctcaccggcgctgccgtctcaggacgagggttctcgtcggacgcgttaaggaggacggaaccatcgcaacccctgacaaaacaatcatggaagatgagacggatgagggagccgcctatgccgcggtcctgtatgatagtgtggagattatgggtatcccatatctcgtcgactcacgtcctactgacatcgtggagtacgacgaatttagttctcgctacaacgacttcgacgacttcgacgacttcgacggaagcctagatgacaactacacccctctc

SEQ ID NO: 100557 - DNA, 1810 bp, Oryza sativa
  Clone ID: PAT_MRT4530_98261C.1
aattcggcacgaggttcggtcgtataaaaagcaagcgagcgagagagccgggcctccgccgcgcgctttcctcccttgctcccaccaccacacctgtcctccttcccctccatcgtcgtctccctcctcttgtcccactccgactccgacatggcggccgcgaagcacttcacctacgtcatcctcggcggaggcgtcgccgcgggatacgctgcgcgggagttcgccaagcagggcgtcaagcccggggaactcgccatcatctccaaggaatcggtggctccctacgagcgtcctgctctcagcaagggatacctctttcctcagaatgcagccagacttccgggattccacacctgcgtcgggagcggcggagagaggctcttgcctgaatggtattccgagaaaggtatcgagctgatcctgagcaccgaaattgtcaaggctgatcttgcctccaagacattgaccagttcagctgatgcaacctttacctatgacactttgctcattgccactggctcctcggtcataaagctcactgactttggtgttcaaggagcagaggccaacgacatattgtacctgagggatattgaggacgctgacaagttggtcgcggctatgcaagccaagaaggatggaaaggctgtgattgtcggaggtggctacataggacttgagcttagcgcagccttgaagaccaacaattttgatgtcactatggtgtaccctgaaccttggtgcatgccccgtctcttcacttctggccttgctgctttctacgagggatactacgctaacaaaggaatccatatcataaagggaaccgtggctgttggttttgatgctgatgccaatggagatgttactgcggtgaagctaaagaatggaaacgtgctggaagctgacattgttattgtcggtgtcggtggcaggccactgactcatctcttcaagggtcaagttgcagaggagaagggtggaatcaagactgatgcattcttcgaaacgagcgttcctggtgtatacgccattgccgacgtggccgccttcccgatgaagctatacaatgagattaggagagtagagcatgttgaccatgctcgcaaatcagccgagcaggccgtgaaggcgatcaaggcgaaggaggccggcgagtcggtgccggagtacgactacctgccctacttctactcccggtcgttcgacctctcgtggcagttctacggcgacaacgtcggcgaggatgtgctgttcggcgacaacgaccccacggcggccaagcccaagttcggctcgtactggatcaaggacggcaaggtcgtcggcgtcttcctcgagggcggctcggcggaggagaatcaggtcattgccaaggtcgccagagctcagccgccggtggccgacgtcgaggctctcaagaaggaaggactcgacttcgctgccaaagtctgaacctctctatgcacacgcatttcattttgtggacgctgtgatgctgccatcttttcgattctgagcttcgtagtgattttgttagctccgatcctatatatggaggatttgttttgttctcattgtgaatttgtgatgtagtcactgtggcgaggtcccaataatgtctgtactctgtagcttctgtgattggttgttttctttttaaaaaaacctgtgtatcgtctgtgtttcttttttttttatcacggattaggctgttctttgctagttacttaagaagatttgacaaatgaaatcagaacagttttaggccatcttctttttagctaaaaaaaaaaaaaaaaaaaaa

SEQ ID NO: 100558 - DNA, 165 bp, Oryza sativa
  Clone ID: PAT_MRT4530_98262C.1
cagcatcagctccaattatttttagtgttcaatcaaagatcatgaagatagccaaacacattgtgcttccagggagcccctagctacttttagtattagaaggaaaaatatttctgggccctttgagtgtagatgattggtaatccaataccaaaaaaaaaaaaa

SEQ ID NO: 100559 - DNA, 627 bp, Oryza sativa
  Clone ID: PAT_MRT4530_98263C.1
gcgtcaaagctgatggagactctatcatctgaaaaggaaaagaatgaaataatgcaaaagcaactcgaagctctttcttttctagacaaaagaaaggcaacaaagccaaagctggtggccaatcaggttccaagtgtgtctgatgtgactcagggctctgatcaggttattgttccagcacagcagcaaacaccagtagtttcacctatcaaagttcctccagctaaagccacgaagaggatagcctctgtatctcggagggcgagagtgcgaggagctttgttgcaagatactgaggaagatgtcgaagaatagtcagatattgccttttttctgtattgattagttacaaacttctaaagcgtgagtgtgtggtttgttagttttggggccatttttacttgtatcaaatctatgaaatcaagctaatgcatttattgacacaaacctgctcactttttattgtgcactttatttttctcttgtttacctgtttggcataagctaagtgtgcttatcagttgtcttttagctgatgtggtactaagatttttttaccagttattgtattgcgcattgattttttttttaaaaagatactatgaatcagagaaccgtattttaact

SEQ ID NO: 100560 - DNA, 318 bp, Oryza sativa
  Clone ID: PAT_MRT4530_98264C.1
cagaccttcatgatgatgcagcccgacgacgtccggaggggcctcgttggagaggtcgtcgggcgctgcgagaagaagggtactacctcagagccgtgaagctcatccacgtgcggaagtcgctcccggagagtcggtacgacctatctgtcgtgcaagcccttcttgtgagcgttcgtggagtacattgtctccggacccgtcgtcgcgcatggtctgggagggcaagcaggtccgctcctccgggcgggagctcgacgggggcaccaaccccctgtgcgctgagccgggcaccagccggggggacttcgctggcga

SEQ ID NO: 100561 - DNA, 393 bp, Oryza sativa
  Clone ID: PAT_MRT4530_98265C.1
atggtgagctcactgaggctagccgagatctccaggaagtggagcgggtcagggtcgagcaaggtgacgtcgccgacggcggcggcggcggcgtgcccgcgggggcacttcgcggcgtacacccgggacggcagccggttcttcgtccccatcgcctgcctcgccagcgacaccttccgggagctcctcagcacggcggaggaggagttcggctcccccggcggccgccccatcgtgctcccttgctccgccgaccgcctccaccagatcctcgccgccttccgctccgcctccggcaagaacaagtgctcgccgccgtccggctccggcggccgcgccggcggcaggaccaagatttggtactggaacatgaaaggtgacacattgtcgtga

SEQ ID NO: 100562 - DNA, 195 bp, Oryza sativa
  Clone ID: PAT_MRT4530_98266C.1
ggcggcgcatctctattgaagtagtgtatgacgtatgctgcacgccgtcagatggtaggctcttcattggcggccgtcctttttttttttttttagtatgccaaccgtaaatttttatttttgaatacattggtttcgtaaaatcaaggtacaaagcgaaacaatcaaaccagttagaataccaggaaaggatca

SEQ ID NO: 100563 - DNA, 816 bp, Oryza sativa
  Clone ID: PAT_MRT4530_98267C.1
cgaccgctgcgccccgctgcggcctccggccggacgctcccacccactccggcggcctctcgctcggcctcgccctcgcccccgatcgattcgcccctcatcttcctcctcccggatcccccaagccaagcccggggagccgggccgccgccaacgcgcgcggcggacacgaggaagggaaacaggcgacgacgagaagagaggatcagctgggggtgatgaattgttacgctgcatggacggagcaagcgagaagcctccccacaaggactattacaaagttctggaggttgattacgatgcatccgatgacaccatcaaattgagttatagaagattagctttgatgtggcatccagacaagcataagggggataatgatgtcacagctaaatttcaggagatcaatgaagcctacacagttctaagtgatccagctaagcgccttgaatacgacctttccggatgttatgagttaaatcgatatactttgcgtgagtaccttacaaggtttaagggtatgatacttacctgcaatggtcttggcatagaccattcttcaaaatgggcccggcatttgagggaattggagccccattgatctataggtacatcttatttgtccatgagcttcttcagtactttctttgaggccaattggatgcttagctgtttcttttaacacaactatggatacggcagggcatctctctgttctttgtaacacaacaatggattctgtcgtatactaatgtatttttgctgcaagaaatgcatgcacgcagtttccagatgtaaaaaaaaaaaaaaaaaaaa

SEQ ID NO: 100564 - DNA, 384 bp, Oryza sativa
  Clone ID: PAT_MRT4530_98268C.1
ttccgggctacgacctcacgcggacgaagacgaagaaagaacaggaggaagatgcagaccgctgttagcagtgtcgttggcattgtcggccgagttgcccgctgatgtgaatgcgctcagcctgccgattctggctgctctccgcggtgcgttgcgcgatcttgcggccgcggacggcgtggcattcgacgctgccgagtgggacatacagctctaacatatctgtgtttacgatggaggcgtgctacctcatcggcggcgaggcgtgcaacgtgcagatgtactcagaggccaagctctcatcatcgggtgcttgtgctgtttctcgtgcggcggcggaggaagtcgacagggactacctatcctacgacgagcccacccacg

SEQ ID NO: 100565 - DNA, 800 bp, Oryza sativa
  unsure (1)..(800): unsure at all n locations
  Clone ID: PAT_MRT4530_98269C.1
acacttccggtgcagtgcagtgggaggtggtgaagncatgccaattctttcgatggnatctaacgagatccnaatggctgcgcttagcctagatggccgtgactctncccccactgattcagtgtgcaagcctcgttgagctgaaaggagcancaaatggaaatttgttgtgaagtttggttccacagcatggctgaagaacgcagtgtgccttcttaggattgatgagcagacagtgtcatgacactgatatcgggtattacgttgggtctacttggtgtgccgtgagagacagcatggcctggcagtattaatntggaatggggccctgaattttggttgctgacgtggcaccctggcttggggcatgcctgtgctggaccatgcatgattgctgtgaaaggcagatggaagaccatgggagtgagtgggttgattgatgtgggggctgtgtgatgattggtgctggcccttggacttggaggaactgttgatgtgcactctggctggtgatgcaaggcaaaggaaaggaacaccgtgatggtgatggcttggagccatgatgtgtgcatgtgccagagcctgctgatgcaggtgttgcaccgaccatgcaggatgttgaagtgctgtgccagtgtgtggtgagggctgaagccaaaaaagtgtgctgatggtggtgaagagttggagacatctgtttggttacaagctatttgattggtatttgatcattcttttgtattaacnctgataaacttacanggagttaattctattgttatgtgaaaaaaaaaaaaaaa

SEQ ID NO: 100566 - DNA, 5534 bp, Oryza sativa
  Clone ID: PAT_MRT4530_9826C.1
ctagcccccagccttgtcatcggagaattcttctcgggagataagacttttggacctttgacctgcctcggttgaaccagcactgatcacggcttggttaatacgcacggcgagaactcttacacgaccagatcttacatggtctttcgtctcaacaggatccgacaaggccttatcggctctgggcgtccccagccgaagttcccttaggttcctcggaggccttgtcaagacggcgtaaagggacatgaggttaggtttcaatgctaggtgttatcgtggtgagggatcgtcgggaaggaacactttgattgtaatctttacggccatcaccgtctgcaatcttaaatgcacccggccgcaagacttgcgtgattgtgtacggtccttcccatttgggtgagagcttgttacgccctgcctggctttgaacccgtcagaggacgtagtcactaatcgaaagtgtgcgtgctctgatgcgcttctcgtgatatcggcgaagggcctgttggtaactggctgctctgacggcaactctttctcgatgttcctcgagtagattcacgtcgtcggttcgctgttcctcctgatcctcgtcggagtacttatgtactcatgtactctgatgctgtaactcagtagggagcatagcctctgagccgtacatgaggaagaagggtgtctccttgttggacgttgtcggtgtggtacgcacggcccatagtagggtcttaattccttgtagtactatgccatttgccctcttgacctgtccattgctctgagggtgagaaaccgaagcgaagcagatcttgactcccagcctaatgcagtaatcctggaagttggcactgatgaactgggagccgttgtccgttatgatgcggtgaggcaatccatatctgtagaatatctctttaatgaatttgatggcactgtcggccttgatttcccccgtggaggtcgcttcccttgtcctcgtgggaatggtccgagtatgtcgagcccccagcatgagatcggccaagtgagagggatagtttggaacgcttgcgctggtaactttgtgtgtttacatgtcgcaaatgtctttgagggcagtaggccagaaaaacccttgtcgaaaagcttttccgaccaatgtgcgatcggcggcatgtgacccacagatcccttcgtgtatgtcgaggaggagatgtttgccatcgtcgaacgagacgcatttgagaagtaccccgtttggtgccttcttgtatagatcattgccgatcatacagtagattttggcttgacgggttattttctcggcttctgcatcgtcctcgggcaacttgtcactacttatgaatttaatgagtgggatccgctagccgtctgtggtctcgatgtcggcaatggcacactctgcctctgtagcccccgagctgatgtcgggggcaactgtgctatcttcgtcgtttgcctctttcaccgatggctttgtcaggacgtccagagaggtgccgggtttgagtggctcccgtctggacgcacgccgtgctagatcatctggttcgatgttgtccttgcggtatacgtgtcggacctcgattccatcaaatcttttttccagcttcctgagtacttctgcgaggtacttggataactctacctcggggctagaccacttgtagtctttgtgcacctggtttgcgactagttcggaatccccttttacgatcagtcgcttgactccaagtgcggctgctgctcttatcccagtgagtagtccttagtattcggtagtgttgttggtcgccctgaagttgaggtgaattgcatgcttgaactgatctcccgaaggtgatgtcaagatgaaccctgcccctgctccttggctgttgagtgcaccgtcgaacgccattgtccatgtttcgttgtcggtttgactgtctgacctgttttcaagcatagtccaatcggctacgaagtcggcgagaacctgggacttgatggctgttcgtggcacaaagtggacatcaaactagcttagctcgactacccatttcgcaatgaggccgacaacgtctttgtttctcacgacttcaccaagagggaaggaggaaacaactgtgaccctgtgggcttggaagtagtgacgtagctttcttgacgtcatgattactgcatagagcagtttttggatctgtgggtatcttgtcttcgcgtcgtggagagcttcgctgacgtagtagactggtctttgcaccttctctctctcgacaacaatgacagtactcatggaatatggcgtggcggcaatataaaggaataattcttcattaggatggggagtaacaagtacaggggggtttgacaggtagcgcttgagtgcgatgaatgcctcttcggcttcttgtgtccatacaaatttgtcttgtttcttcagcaaagcgaagaaaggttgtcctcgttctcccatcctagcgacgaaccagcttagtgccgccatgcatccagttagcttctgtacttccttgagtcttgtgggcgacttcacgttcttgattgccttgatcttctcgggattttcttcggttcctctgccaaatacgaggaacctgagcagcttgcccgatggtactccgaacgtgcacttttctggattgagcacgaggcgatatcatcggcggttgtcgaatgtttcccgtagatcgtcaatcaatgagtcgcttgtcttggtcttgacaacaatgtcatcgacgtaggcctcaacattgttcccaagctgatcgttaagtgccccttggaccgtgcgttgaaaagtgtttcctgcagttatcagtccaaacggcatcttaacgtagcaaaatacaccgaacggcgtgataaatgctgtcttctcctcatcctctttcgccatgctgatttggtggtaaccggagtaagcgtcaagaaaacttaacaactcacaaccagctgttgagtcgaccagttggtctattcgaggaagagggaagtgatccttgggacacgccttgttgaagtcggtgaagtcgacgcacatcctccacttcctattggccttctgcaccatgactaggttggctagccactctggatggagtagctttgagaagcttgtcgagctcttctcgtatggcctgttttcgatctggtgcaaatctctgcagtttttgttttactggcttggcatcgggtcgcaccatgagtttgtgctcaatcacctccctagggacccccggcatgtcggacggctgccaagtgaacacatatgcactgtcacggaggaaggtgatgagcgcgagttcggccttgtcggggttggcactggagagcggaacgatcttgattgcgccgtctggtttcggcgtcttgttcgttttgctcactttcctgggtggctcagctgtggcgggtgggctgggcgtgtgctcgaccatgtcgaggctctgcttgtcgcattgcactgccagctttgcgttcccttgaacagtgattgttcccttcggcccaggcatcaagagcacttgatatgtgtagtgagatgcggccatgaacttcgcgagagcagttcttccgatgatagcattgtatgctgtatcaaattcagcaacatcaaaggtgatctgctctgttcggaagttatttgcttggccgaaagtcacaggcaacataatcttgcccaatggcttggacgatgattgaggagtaattgcatggaagggttgattaatgggcgtcaactcgcttcgtgggattcccatagtgtccaaggtgcaggcgaagagaaggttgatggagctgcccccatcgataagaacccgtgcgaccttggtattctaaatagtgggctcgaccacaatcggatatcgtcgccatggaacctccgaagatttgcgagacatggagatcggaatcaggttatgctgagtccaagtcctgagtagctgcctcagcggccttctcgactacacgtactcgtttgcccttctccaatgccagttgctttgcgagcgactttttgaagacgaagcaatcttccaaagagtgtctgtctgacttgtgtatggggcaccatattttcttcgtgtcgttgccttgtgggtcagggtgcttgggagggtccacgtactctgccgcgaggacttccgtttgagctttcgttttcccactcttgtgactcttcttcttgcttgattcaggtgcgtctttggctggtttcttctctcctcccgtcttcggcttgttgttcttgcgtcttagtgcgtcgtccgcgtgagcgcatcaatcgacaatctcgaatagttttcgagcagtcctgatcctccttgtcgccaactcctgggtggtatagcgatctctgacaccagtcttgaaagcgtagatcacggaagcattggtgatctcggggatagtatttctgcactcattaaagcgtcgaacgtagtccctcaatgatttgcccggattctgtgtcaacgcgtgtaggtcgtcttcgatcgcatggcgcttgtaagttccttggaagttagcaacgaactgctgccacagatctgcccatgaagaaatcgagtatggccggaggtgaacaagccatgaacgtgcagatcctttcaacgccactggcaaataattcgctaacgcgttgtcgtccgctccggcagtgtagagtactctggaatagacctgaaggaattcttctaggtcggtgctccaatcatacttctctattgctcccggtcggaatctctcaggccaccggacatcacgtagagcacggttgaaagctttacatctgccgctgggggtggtgggttgtcgatgatcgtatgtcctccgtggatttctgtctgacaatgaggatgatgaggatgatgacgatgacgatgagtcacttggttccggtgtacgattacgaggatgacgtccgggttctcgagaatcctgtcgtcgcctcccgttgatgtcccggcgacgatctccatcgtcatcatcgttatggcggcgtcctcgaccagtatcgcctggcatccgctgttcgcgatcatcatggtctcggttttcgcttgggtgtcctcctcgctcctcgttctcgcgacgtcgtgatgagacgcgatgtcaggaatggttttcattgtctcgcgcgtgtcgtacttctcggcggccattaagatggtcacaaagatcgccggtgccgcgaggtggaggggtgtcttgtcgaggtgatgtccgctgctcaggtggttcaccatttgcaccgctagctggcggttgttctggtttgctccggcagtggcctcctcgaacgcattactgagattggccactgattcccgtagtcattctgtccaccgtgtgaggtcatcgttcagaatgggatcataaggggtttccctcagtattgcgttgatggccccgatgtgctgggccggtgtaaccacttgattctccacttccgcgtcagcacgcgcagacgtgctggtcccgccgatagcaaacacatcgcgtggtgtgcttgtcgacgatgagcc

SEQ ID NO: 100567 - DNA, 1496 bp, Oryza sativa
  Clone ID: PAT_MRT4530_98270C.1
acggcacgagggggagcttcagaatggaggtgctcctgtctgcagttcttggtgatcttgtgagtagatccatatccttcttagttgacaaatactaccagcagaagatgggcatgggggtggatctgcaatgcctgcgccacttgctgctgcggatcgaggcaactgtcctggaggtcgaggggcggcacatcacaaatcgagcgatgctccagcagcttcagatgctaagagaaggcatgtacaagggatactacttggttgatactatcaagaatggagtgcttcagcatgagatggtcaatgatgaggttggtgatcactcattttcctttcccaaactcagacctaccaagcggttgtgtttctccactaggacgttcaccatggcttttcaaggtgaggataggaaggaggtgggagagatgctttgtagcctactgagtatcactgacgatatgaaagagtttcttgttttcttgaagggatatcctcacatacaccgccaaccttatagccaacatttaattttggaaaaatgcatgtttggtcgccaagcagaaatagagaggattaccaatttcttgttgcgagaatctcttggggcagaaagtttgggagttcttccaataataggtccagcaagagttgggaaaagtactcttgttgagcatatttgctatgatgagagggtacgcagttttttctcttctattgttttctgtagtggaagtgatatcggaagcaaaagctttgctgatctcagagatagtggcatagtcaagcatcaaagttgtgttgcacatgaacggtcacttatcatcatcgaatttattgatgatggcgatgtagatgaggaaaactggagaagattgtactcttcaagaagctgcataccacatgggagtaaaattattattacaagtagatctgaaaggttcaggaatgttggaacaactcaacctcttgagctaagtttgttgcctcaggaggcccattggtacttcttcaaggtgcttgcctttggaagcacaaaccctgtggagcacccatttctagaatcagcagctatggaaatggcagcagagtacagatgttttgtagctgctaatttcgttgcttcattattcagagctaatttttgcacccagttttggcatttgttccttagatgtcacagaaacatcgttgagaaacatgtcattctatttggtgaacatccatacactcttgttcaaaaaaatcacggtatatatcttgttgaaaattttagggatccaaaattcattctagtcaatggctataaaacatgtctcagggatgatgatcctaaggtaatgctacatgaagtccatactggaacttctaaagctcatggaaaatttgaggtcctagtatggagatcacgcatacctccctaccatgagttcgtaatgagttgtgaagcacaagcacagcagcatataatattcaagaggaagcggtttttggcatag

SEQ ID NO: 100568 - DNA, 1650 bp, Oryza sativa
  Clone ID: PAT_MRT4530_98271C.1
gacgcgtctttatttctgtccttacacgcctcttctgcttgttttttttttttgaaattcaatctcccccaaattccatttcgttcaaaccatcgatctacaatgttcaaacacaagacacaacttagattacatcactactagtattacacaggcattaccggggaatatatccaaaccaccctgcctgatgggttgatggataatcttaaatggatggataagaggatgcacatccacatccaaccttattcatagatagctaatcaagtcattacacataatacagcacaggtacaaacacagacagacggacggacagacgacggtatatatgtcctaagattaatgtgcttacagcaagttaggcatgataagagatattatgagcatgatgggtagggtacacgtatgtatgtatgtatgttgctgtgccacaccacaatcataccatacatacaagcaagctaaactgatgcagagcctaataaccggctgtcacccagcaacgtcagttccttggtcgatttgattacacaatgcaaatgcgaatgattcctaaaaggcgtacatcacggacaaggggaggaggatgatgattcgttggggggtttcatcttcatcttcaggtgcacttcacggcagaggcaccagccggcagctgcccgttgttgacaggggatgactccttggcgggggcggcggcggaaggcggctggctgtcctggtgagggcctttgtccgcggagttctctactggagcagcagcagcagctttgggtgcggaaggctcagttgggttgcttggtggagcagctgctgcttcaggttcagctggctttgcatcctctttcttctctcctccttccgatggtgctggaggagcagcctcagattcagccggttttgcatcttccttctcggttccggctggtgctggagcaggagtgtcggcgtctgcggtcttgctggcatcttcagcagttttcatctccacatcggtgtcttttggagcatcttcgctaggggcctccttcgcctcttcagcaggctttgtctctacatcagtctcctttggagcatcttcgctaggggcctccttgtcagcttcagcgtctttcgcttcttcattttcggtggcctcctttttctcctgcttgccctttctgccagatgagttcctagaacgtttcgggatcttctccccttctgggctatcgaaagccttaactttctcgctaatgcgagcagagcgccttggagtatcaccagttccccaatcaaactctgaggatgcagggcctccagggtgtgccttcagatactggctcagctgtctcttgttcttaatctcttctccagttggtgaaacaaaaacaatctcaaatctcccccctctctggggagtaaacttcttcgtccacccctccggcgccggcatctccacggacaccacctccttcgccgccgcctccgtcacctccgccgtctgcgccgccgccgcctgctgctgctgctcgtcgccggccgtggccatggtttcgagttttcgcttcccgctcgcaacgcaacgcactctcgcttcgagaaaaatggagagagaagagacgagacgaggagagcggacgcgtgggcctccggcagcccggg

SEQ ID NO: 100569 - DNA, 496 bp, Oryza sativa
  unsure (1)..(496): unsure at all n locations
  Clone ID: PAT_MRT4530_98272C.1
cagatgaaaggatcaatacattatatcagaataagcattgttcctcttctcaaaatttgtatgacaaatttcttcctagctgagaaatgtacaagggaactactattacatcaagcggactggcactacattgccagggtattagacctagaaacggttagacacatctattgagactcagatcggtgtattgttagccccaggattagcttagctaatatgaatctaatatatccgcaaaatccacctggggagtgtaatagatgagcaatgctgcagtagggtgcttggagaccggacagacatcacaccaccagacggcaagcaaagaatgagcacatgctatggtaccaaaaagaatcaaggtcagtcaatcaagtcaagactagtagatgctatctagcctggatggatttagagtgntctgatttgtttgagcggcacatgcagtcggggcatggaaaggtgtatataagatttcatttngctctttttc

SEQ ID NO: 100570 - DNA, 450 bp, Oryza sativa
  Clone ID: PAT_MRT4530_98273C.1
ttggacgggctagtcggggacttcgagctcggttccccgggtagcagcgttcagaagaccaggaggcggcggtttttcagtcgctggcggcggcttcctcaggcggcgaggaggatcggtgaggcgctggtttgggtagcccagcgcatcgggcggcggaggaattaagtctacgaatgcaggaaagcgtggatgttagatttattagcttagttcataaggcgacaatgaagaaaatgttctcttcatgtgtgctaggaaggaatccaattttgcttggtaagatgactgtggtgatatgagagacggtggagcactgttgcaggtggagtcaagagaaagaaattacagggatagtgagagtctcttgtttacggtgagcctggtggaggcttgtcggggcagttcagcgtgagcggcgaaaaaggatcaactcaagttcgggtacac

SEQ ID NO: 100571 - DNA, 651 bp, Oryza sativa
  Clone ID: PAT_MRT4530_98274C.1
atgggatcgtcaggggcaccagagttgacacatgaaatgagcagcaatccttgtgccggcgggagagcaacaatcctgggaatcggcacggccgtgccggttcatgtttatgagcagaagtcattccctgattattactttgagattaccgatagcaatcacttggtcgacctaaaagccaagtttgcaaacatctgcgagaagacatcgacggagaagcggcacatgtacatctctgatgagtggctgagggccaacccgtcggtgacggcgtacatgtccacctcgctcaacgtacggcagcaggtcgccgaggagggcatccctcggctcggtgcggaggcggcgcgcaaggccattgacgactgggggaagccggcgtcgagcatcacccacatcgtcttcgccaccaccagcaccggctgcttgcccagcgccgacgtcgtgctcatcaagctcctcggcctcccgctgtcgaccaagcgtgtcatgctctaccaggctggttgcttcggaggcaccacggcgctgcgtgtggccaaggacatcgccaagagcaaccccggtgccagggtgctcgtggtgacatccgaggtgatgtcgctggtcatcggtggcccctccgaatcccacatcggggggatcctctag

SEQ ID NO: 100572 - DNA, 390 bp, Oryza sativa
  Clone ID: PAT_MRT4530_98275C.1
atgggcggtgggcgatgcgacgtgtgcccgcagggcgaggaggggctgctcgctgcggccgggcgaggagggaggcagtgcgcggtagccgggcggagcagccgacggcgtggagctgccacgctcgctgacctctacaccatcgacaccaaaggcgaagacgaagaggatgctgacgggcccgtctacaacctccacccggaggaggaggccggcctccccaaccgccactcccacctctccctcgcctcccgggccacgtcgcccatccgccgccgccccgccgctgtctgccgcatcgccgccgccgtccgccggtcgctgccggtgccgcgctgtcgccgcgtggccgccaggaacgtgtcgtggggctgtgtcttgtgggtacag

SEQ ID NO: 100573 - DNA, 630 bp, Oryza sativa
  Clone ID: PAT_MRT4530_98276C.1
ggagtcggtcgtgttcgacggcgtcaagatcgtcatccaccgccggtcgctgccccgcgctccctctctccggcatctatcgcctgtaacttgcggagactgcccgcctccgccgattcggcttccgccgcacctcccccaattccgcctccgctctcgccgccgccgctgccgggggctccgggtgccctgacggaggatgctgtcgagaaggaaaggatgcggcggcgacgcgcgccgcagaggaccaagaaggccgcggcgcagccgcgcagaaggagtcggcggcggcggggccgaggttgtgcagctcttctcccgccgccgccgcagccagggccatctcccgccggccgccgcgcgcagtttactctccgtcgtgcctggagagaggagagggtagataggtagagaggaggaagaagaagagggatgaggatgacatgtgggctccacgtgggccctactatttttaattaatttgtgtgtgaaactgacatgtgggtcccatagattttatcgccatgtcaatgccacgtcagatgaagaccgagtcaaattagccacgtaggcgccacgtcaaccaaaaccaccctcaaaaccgccgagggatctaatctgcaccggttt

SEQ ID NO: 100574 - DNA, 128 bp, Oryza sativa
  Clone ID: PAT_MRT4530_98277C.1
atgaccctgacacaggccactagcggcgtaagggcccggcggctgcagccgtacagcgggcatccgcagtcgaagcaaacgtggcgcgcggcaaagtttcgcctctgcccacgagcgctcctcttccg

SEQ ID NO: 100575 - DNA, 2010 bp, Oryza sativa
  unsure (1)..(2010): unsure at all n locations
  Clone ID: PAT_MRT4530_98278C.1
gcacgcggcttcgcctgccttcagcaagaacctgatcctcgcccctgtcctgtcgtcgcctcctggcgggatcgggacgaaaccattcttatctgttctcggtgtagagaaggggaagaagcagacaaggagaagggggcagaagcagagcttagctctcccctcctcctcctcctcctcctcccatggcggccgggtgggcccgccctgccggctttgccctgctggtggtggtggtgctggcggcggcggcgagcgcggacaggccggcgaggggcgggctgtcggtgacggccggggcggaggagtcctccgccgtgttcccgctctacggcgacgtgtacccccacggattgtactatgtggcgatgagcatcggcaacccgccgaggccctacttcctggacgtcgacaccggcagcgacctcacctggctgcagtgcgacgccccctgcgtcagctgctccaaggttccgcacccgctgtaccgaccaacaaagaacaagctggttccatgtgtggatcagatgtgcgccgctctgcacggtggtctgaccgggaggcacaaatgtgattcaccaaagcagcagtgtgactatgagattaagtatgctgaccagggatcatcacttggtgtgcttgtcactgacagcttcgcactccgacttgcaaactcctcaatcgtccgtcccggtcttgcatttgggtgtgggtatgatcagcaggttgggagcagcactgaggtgtcagctactgatggtgtccttgggcttgggagtggctctgtcagcctgctttcacagctcaagcagcatgggatcactaagaacgtggttggccactgcctcagtacaagaggtggagggttcctcttctttggtgatgacattgtgccttactcgcgtgcaacgtgggctcctatggctcgtagcacatcccggaattactattcacctggctcggcaaacctttactttggtggccggccactaggtgtgaggccaatggaagtagtctttgacagcggcagttcattcacttacttttctgcacagccatatcaagcacttgttgatgcaattaagggtgatttaagcaagaacctgaaagaggtacctgaccactctttgcctctatgctggaaggggaagaaaccattcaaatctgttcttgatgtaaaaaaggagttcagaacagtggtattgagcttttctaatggcaagaaagctctcatggagatccctcctgaaaactaccttattgtcactgtaaacattctagaactccgcatattactaaaatatgggaatgcatgccttggcatcctcaatggatcagaggttggcctcaaggatctgaacattgtcggagacatcacaatgcaagatcagatggtgatatatgacaatgagagagggcagattggatggatccgtgcaccctgtgatagaatccccaagtttggatcttcccttctgtgatcatttcacacacctgaacatatatacccataattactctctgtttattcaaacagtgacaataccattcatggatttgaggacggttattgttggcctcagttccccaacatcattggttatcagaatgagcagtccgcagtctgttacagttcaattacaaaatgagcgacaagggaaaaggccattaggatgatagaaggaccaaccgtcagaaggatgaacatcaaagggaggctctacacggtattattaggtgaatgtattctttagaaaagagaaaatctagttacctgtaaacatcatcatgttcatatgaaataaaattatgatgttcctatgaaacagtcccagtcccagtcccactcttggttggcacaaagttcttcctgtatacttgtaagactgaatataattagttccacaatctgttattggctgggactatacattatgtagtctaatatgctatgtatatgatttgttagctgattccttagtgtcattngagtaaaaaaaaaaaaaaaaa

SEQ ID NO: 100576 - DNA, 647 bp, Oryza sativa
  Clone ID: PAT_MRT4530_98279C.1
ccggccgggaccgtaatactagctacttaatctgtggccgttgtaggcccttgtccttgctctaagtgtaggacgagcgtcatcctgtagcaacacagcgaaataaggcgtggtgacagggcgcagactttatatgacaggggatacgcgcagatcgctgaccgaatgcaggcacgagcagacccaggtgaaaaggcagttgctgatgtaacaagacactatgataaggtggaacaggacgtgcatcgcatcgactgtacaggaggccatccctgatccaattacaacaggagcaatgctagctgcagtagcagctgcagcagttggaaatctcggggcagcgcgccttgaggaccaaaggaggaggttccacaacttacagcgaatgctgcattgacatctcaaaagtcgaacgcagcctgagctccatcaagaccgatcatatggacgactgaccatgcatatgctaccttcactatctcgtttaggtgcactattatgcgcgtgcgtgaaacaaaactggccctaatagaccacaaggtagtgacttagtttcaattgagctatggctggcctgctgcattatactgttgtattccatctgacgatgctgtgtatgcaagatctgatggaaagcttataatctt

SEQ ID NO: 100577 - DNA, 1855 bp, Oryza sativa
  Clone ID: PAT_MRT4530_9827C.1
tgatttgggagagctgcggcagttggaccttggtggtcaactagagctatcacaactagagaatgtgacaaaagcagatgcgaaagcagcaaatctcaggaagaagaaaaaactgaccaaattgagcttagattggtcaccaaatcattccaaggaggcacagaataatcataaagaggtgctggaaggcctcacgcctaacgaggggctcaaggttctgaggatacattgctgtgggagcagtacatgtccaacatggatgaataaactgtggtacatggtggagcttcagttaattggttgcaaaaatctcgagatgcttcctccactgtggcagttaccagctctagaagttcttttccttgaaggactggatggtttaaattgtttgttcaacagtgacgaacacactccctttacattttgtaaactgaaggagcttaccttgtctgatatgagaaattttatgacatggtgggacataaacgaggtacaaggagaagaactggtttttcctgaggttgagaagttgttcatcgaatattgccataggctaactgcgttacccaaagcgtcaaatgcgatttcgaaatcttctggaagagttagcactgtgtgtcgttctgcatttccagcattgaaggaaatgaaattatgtgatttgagtgtctttcagagatgggaggcagtcaatgaaactccaagggaggaggtaacatttcctcagcttgacaaattaacaatcaggtgctgcccagagttgactactctacctgaagcaccaaagctaagtgacttaaacatatataaaggcagccaacaattatccctagtggcagctagcagatatattacttcaatgtccagtctcaatctggatctctcaattgatgacacagaaacagcattggtggccaaacaaaattcgagtgaattagtgtatgagaaggagaaatggaatgataattctcccctggaacttatggacttggacgggtgcaaccttttattctctcatccaagtgcactggctctgtgggcatgttttgtacagctcctagatctgacaatttggtgtgtcgatgtacttgactactggccagaaaaggtattccagggcctggtttccttgaggaagttacagattcgtgaatgcaggaatctgacaggacacacacaagcttatgagcaatctacaccagtacgaagtgaactcttgccatgtttggagtccctagagataagctactgcatatcttttgtagagatgcccaacttatctgcgtctctcaagctattagaaattatgaactgctttggcctgaagtccatcatattcagtcagcagcatgataggaggttggtgagtgcagaaagtgttacacggccggataggtcatcattaatagcagggtccagcagtgggaccaacgatcacatccttccatgcctagaatctctagcaataaagcgctgtgatcgtttggaggttctccatcttcctccgtccatcaagaaattggaaattttgaaatgtgaaaatcttcagtccctttcaggaaaactggatgccgttcgagcattaataatcagatcatgcgagagcttgaaatcactagaatcttgcttaggagagctcccgtcgctggaacaactcgatctttttgattgcaagagcctagtatccttgcccgaggggcctcaagcatactcatctcttagatttcttacaattgattcttgttctggtatagagttgcttccactgagcctgcagcaacgtctggattacctcgaggagaaaaaactagatgcccgctatgaaggtaatctccagtttcttcgtttcttttaa

SEQ ID NO: 100578 - DNA, 654 bp, Oryza sativa
  Clone ID: PAT_MRT4530_98280C.1
atggcgcaggcttgcacattctgtggcaagcctaaggaggatgcaagtgcttatttacagcaattcctggaaagctgtagcacgtataccgtcaaaggaatcagactccaactgttgccgctctccctcctcgagagagcagaacagtggttctacatcaaccgtgtaacagtgaatacccggaataagcgctcaacggcattcctctcaaaaattttcccgatgggcaagaccaacactcctcgtggaagaatatctagctttcagcagatgagggatgaaaccattcttgaagctggggaaatgctgcaggaacggtcagtgatgccaaccaacctgattgagaagatggtctcaaatattggttggagcaaggaacgactccaaacccgtcaacgcggcatgtacaccgtcgaagggatggaaatgctcgccgcccagttggatctccttatgaagagactggacaacaatgagaaggacgccaagcagagtgccgttaaggctttgggctctcacataacatgtgaggtctatggcaaaaccggtcactctgggacggatcgtccggaaacccgtaagaacgtcatgctcatgaacaacaacaatgggtatcgtccacaaggagaccaaggatggagcattgctccatag

SEQ ID NO: 100579 - DNA, 108 bp, Oryza sativa
  Clone ID: PAT_MRT4530_98281C.1
cggcacgaggtggcacatcaacccggcggtgacgttcgggctgttcctggctgcggaagctgtctgctgactgcgggctgtgtgttctacatggctgatgcatgtgcc

SEQ ID NO: 100580 - DNA, 3198 bp, Oryza sativa
  Clone ID: PAT_MRT4530_98282C.1
atgcacacaagtgtatttatttggatttgttcgattcacaaattcaaactgggtgatgagatgggagataattttgtgagcattgaggatcaagagcactatgcaatgatgaaaggtatgagattcaagagtgaggaagatggtttcatcttttacaatagaattagctatgctcagaaggccaatttaatggagctgaaaggagtgggattgcggcagcatcaagtaatggatgtgatggagaggcatcgtggtggttttgaaacaactgggtttgttagtaaggacatgtacaatttctttgttagacaaaagaagaaacagattgttggtggtgatgtcgatcgtgttatcaaatacatgcaagctagacagaaagatgatatggagttcttttatgagtacgagacagatgaagccggtcgccttaagagattattttgggctgatcctcaatcccgattgattacgatgcttttgaaacatcctaaagggttgattacagatagtgataattccatgagaagagcaattgcaactgtcatgcccaactcggaacataggttgtgcacttggcatattgaacaaaatatggcaaggcatctccgtccgaaaatgatttcagactttagagttctagttcatgcaacttattctgctgaggagtttgaggaaaaatgggtggagttcaagctgaaacgcaaagtggcagaagataaccaatggctcgggaggatgtacaacttaagaagaaatgggcggctgcatatactaaagcactatgagcactgcttgtcgcgtatgagacatagggaggcagagcttgattcgaaagcttcacagtcagttccattcacagccaacgatgctagtctaattgaaaaggatgctgcccgtatattcacaccatcagtttttaagaagttgaaaatggatattattaaatcgaaagattgtgaggtgatagactgtatagatgaggaaaatattattaagtacatcatttgcatgaaaggaaaaattgacaagataacaatcttgacttgttcatatgttgaatcatcattgaagaatatgagctgtacatgcaagaaaatggagtgtgaaagccttccatgtcagcatatgttcacaattatggactatttgaaccttcaagccattccagatgtgtgtgtagtgcctaggtggacagttaaagccaaaattgcatttccttcagataggtatggtgaggtttatacctggtctgatcagatggaaagatatcgtagaatgcgtgcaattggatctgaggttttattgaagtgctcgatgtcagaggaatatactttgaaggtgatggagatgtttgaaaaactggacttagagacaaatgcaattgagggggatgaatttgatgtaacattgtgcggtcacgttgtagctcaaagtttacgctctgacattgctagtgtacagaaggttcatgatcctatggaggtagtacctaaaggtgcaccaactaaaaggttgagaggttttttggagaagggtaaccggcgttgtggttattgccgtgttcgtggacacacggttcgttcttgtgccatttacctaagtatctccgtggcgccaaccatggcggatcaagacggcaacgcacgtgatgaaggcccacctcaggtgccacagcaagctcatgtgtcgtttgcccttaagatgagctccatgactattgcttgttctattccaaaatttgtttcactcgttcaaaatttcgattcgtgtcaaaaagaagctattgaaagaatcggttttggtggtttattgcaaatgcctgatattacacttcaaaggataacgtgtgggcacatcgctgaccagttcgatgtaactacagaatgcgttgagattgaaggtatccagattccaataacaacatttgatgttcagtgcataatgggtttaccagctggagaattgttgattacccctaggccagtttccgatgatgaagactacaagtactactcggtgtacaaggacccaaaaaaaaagaatatcagtctagctatcttgcgggaagaactcttaaaagcaaaagtagccgacgaacatttcttgagaagatttgtcttgtttgaaataggatacattctatgtccgacaactaaaccatttgtcagctcaaattaccttgctttggtgaaggacatcaaccaaataaaacacatcaattgggctgctctcactagagattttctgatccgttctctcaaggagcttaagggcggaaggactaatctggaaggaaatctaccactcctacaggtccaagattctaagtacaagatgacatatggtgataggacacctcctctcatgtcgtattggaatgagatgaaggtcaattcatggcttaagtacgacagcaaacatggcatatctggactaaattcagccaatatggatattgtactgggccagctactgcaacttcaacaaagcatccagttccttgacaataaaatgacaaacaagttgatatcaattgaaggcatatgcaatcaaaatagaaaagatatccaggagattaaaaaaaggttgagatcagcattccatgtaacaagcgcaaagcacccaaaggtcgagatcatccatgagcagttcaacattacaaatcaagaggaatttcttagagcacttgttgtccctcaagaagcacctccaacatccaagtggttaaatggcagtatcatagacgcatacattgagctcatcaaagacgagcaagccgacacaccaagaggaaatgggatggcattactagaatctgaagcacattgccagcaatggaaatctgatggtgcaaaaaaaggaactttcagcaaaacataccgtcaaagaagagccacagttgcatccaaatacctcaaccatgatatgatcttcctaccgctaaatagaaataaggaccactggtatgttgttgtactcaatgctggaaaacaaaaaatacagatactagactcaatacgtatggataggaacacatatgaggctaacaaagacctcaacgatacggacacatgcactacatttagagcgaagctggcatccaccctaatcaactcttccatgaatgaggtcatcaacatacaagaagacatcagacgcatacaaactgagcaaatgcaacaaaagaaggacgagtga

SEQ ID NO: 100581 - DNA, 2544 bp, Oryza sativa
  Clone ID: PAT_MRT4530_98283C.1
atggctcgggaggatgtacaacttaagaagaaatgggcggctgcatatactaaagaggaatatactttgaaggtgatggagatgtttgaaaaactggacttagagacaaatgcaattgagggggatgaatttgataaggttcatgatcctatggaggtagtacctaaaggtgcaccaactaaaaggttgagaggttttttggagaagggtaaccggcgttgtggttattgccgtgttcgtggacacacgagtgcacgtgtgctacgacacttgtacatcacacttgtgcacatgggtggacctaccatgattcccggtatctccgtggcgccaaccatggcggatcaagacggcaacgcacgtgatgaaggcccacctcaggtgccacagcaagctcatgtgtcgtttgcccttaagttcgatgtaactacagaatgcgttgagattgaaggtatccagattccaataacaacatttgatgttcagtgcataatgggtttaccagctggagaattgttgattacccctaggccagtttccgatgatgaagactacaactcaaattaccttgctttggtgaaggacatcaaccaaataaaacacatcaattgggctgctctcactagagattttctgatccgttctctcaaggagcttaagggcggaaggactaatctggaaggaaatctaccactcctacaggtccaagattctaagtacaagatgacatatggtgataggacacctcctctcatgtcgtattggaatgagatgaaggttgtccaagagatcactcttcccttgcaaaaatgcgatccaatagttcaacatgacaatgaagagcatgccgaacaagcagcggacaataaagataacaacattccagagattaaaaaaaggttgagatcagcattccatgtaacaagcgcaaagcacccaaaggtcgagatcatccatgagcagttcaacattacaaatcaagaggaagtaaggactgcacaagctgacgacacaaagaatacccaaacagagagcgtgaaaactacgcgaagtgacaaggtgaaacacacacaatctgacagcatgatggaatcaaaggtgaaaactgaagacatcaaagagacaagccaaactcctctagttatcctaagcgacgatgacaacagcaatggaaacacagagtttcttagagcacttgttgtccctcaagaagcacctccaacatccaagtggttaaatggcagtatcatagacgcatacattgagctcatcaaagacgagcaagccgacacaccaagaggaaatgggatggcattactagaatctgaagcacattgccagcaatggaaatctgatggtgcaaaaaaaggaactttcagcaaaacataccgtcaaagaagagccacagttgcatccaaatacctcaaccatgatatgatactagactcaatacgtatggataggaacacatatgaggctaacaaagacctcaacgatacggacacatgcactacatttagagcgaagctggcatccaccctaataaactctttcatgaatgaggtcatcaacatacaagaagacatcagacgcatacaaactgagcaaatgcaacaaaagaaggacgacgacgaacttaccgctgcggcgccgttgcagtctgttccgaccaccatatcgccccttgaccacgacggcaaacctctctcgtggctggcgacaacgagcggaccagggcttaagaactccgcgggagcgccgcccttcactcctcttgcctttgccctggagtccgcggaagcgccgcccttcactcctcttgcctccgccctggagtccgtggaagcaccgccctggagtccgcggaagcgccaccctggagtccgcggagatcggatggggaatcagatcaggaagcgccgctggcaccattcacttctggcgacggatggggaatcatatcgggaagtgccgctggggaatcagatcgagaaagaatttgcatccctagggaacagcaacacagcattccgccgcgccgccgaaatcgccatggctcctcccgcctcccgcccgccgacgccgacgccgacgccgacggcgaatgcggcggcctcctcgtcgcggatagagtcgccgtcgctcagggcggccctcgccatggctctcatccactacaaccgcctcccctctcgagcagcagcagccgctgccccctctccccaggctctcctcaactggaagcgcaaggccaaggaccggaagcgcgagatcctccgcctccgcgaggagctcaagctcctccaagacggggcgcgcggggaggagatggagccgccggtcgcgtcgtgccgatgccacttcttcgacgggtgcggggaccttccaccgccgacggacggcgatgctggggagcactgggtcgacgacgtgctgcggaggagattcgtcagattggaatataacactgaggatgagagagaagctggctcctcatttactacattttctcaccaggcagtagacttcattctgggtaagtga

SEQ ID NO: 100582 - DNA, 279 bp, Oryza sativa
  Clone ID: PAT_MRT4530_98284C.1
atgcagccccgcgtcaggtgccaagttccgcaggatgacaagcctatagggtgcggatccggccaccgcggcctctcccccatcgccggccacttcctcctccgcgtcccgaccgccagccgttgccgcctcccccgcctaacgaccgccggcctcgtcctcctccagtcgcagatccggtgcctctcccccgaccgccagtcgcctcgtcttcggccaccccaccgccgcctgccagatccagcggcagcctcctccaccgcactgccaaccgtttga

SEQ ID NO: 100583 - DNA, 880 bp, Oryza sativa
  Clone ID: PAT_MRT4530_98285C.1
ggccgcccttttttttttttttttttcggtaaggttcttatgtagtactaacacgaccagaacttctccttacatgttgttcaaatacaggttgtccaagagatcactcttcccttgcaaaaatgcgatccaatagttcaacatgacaatgaagagcatgccgaacaagcagcggacaataaagataacaacattccagttacagaccacggcccccacttgggaagacagaatcaatcaagaaattcacacactttccagatcagatacagaccatggccaaacatatgaatccccacaataccaaaattatgctacaaggcctgaaagcagccatgcaacccacgatatttatttgtttcatttcaaaacaaaagtagcttgaaattgcagtttcttacttcgctctctacagaattcagccaatatggatattgtactgggccagctactgcaacttcaacaaagcatccagttccgctgcggcgccgttgcagtctgttccgaccaccatatcgccccttgaccacgacggcaaacctctctcgtggctggcgacaacgagcggaccagggctgtaccgacgagaagcgaaccggcgtcaatcagccctggacttcacagtaagaactccgcgggagcgccgcccttcactcctcttgcctttgccctggagtccgcggaagcgccgcccttcactcctcttgcctccgccctggagtccgtggaagcaccgccctggagtccgcggaagcgccaccctggagtccgcggagatcggatggggaatcagatcaggaagcgccgctggcacattcacttctggcgacggatggggaatcatatcgggaagtgccgctggggaatcagatcgagaaag

SEQ ID NO: 100584 - DNA, 441 bp, Oryza sativa
  Clone ID: PAT_MRT4530_98286C.1
atgcggcttgagaaagtctgcaccgatgataatggggctgacttgttgaccaaggtgatgacaatggagaatctcaaggtttgttgccagctcattggtatgactaccggaaggcagccagggaaggaaaacgggctttatgacattattgatgacgtcatcgccggcaaggcattgaaccgcaaggccacaggaggagtagatcggcttcacgtcgacgaggggcttccagcgggttacggagaaaaggaaccagtggccgggcttcttctcctccttgcgaatccaacgacggcgacggcgactgaagtcccggtggtggcgacggcgaccagaggcggcggctactcggcggtgcggctcggatggaacgacggccgacgcttggagagagaaggcagctgcggggagagacggctagggcacgggagctcgagctag

SEQ ID NO: 100585 - DNA, 1674 bp, Oryza sativa
  Clone ID: PAT_MRT4530_98287C.1
atggatttttatccaacccccaagatgggtaatagccctagtcatgtttactggaggtataccgtatctagggatgacaatgggtcgggcacgggtagagcaaaaccatgcccgacccgatgcccgacattgcccacccaaaccctacccattagagttagcgggcaaaacttcgtgcccgtacccatgcccggcgggcgcgggtatgtccggcgggcctacattggggtagagccatttcttggtctctttcgcttttactatgagttgcgctggatggaaccgaaaaagatagagaactcggatccagtctttgttgttcctgaggagcaaccagacaagattccggagtggaccgccaaacctgccctaactccctcccttcagtctttcatcgacattatcgatgacctccgagtacgcgggttgttggggtatgaagtcgctgccgacttcatcggtttgaacagcgaaatcgtggagcgccgtgccagtcaagtgatgatcagcggtcctacaacggcgagcaacatccccgtccccatttgcaagaaggggaaggccaattgcatggctgcgatcaacgctctccctctgacggatgtcatcgggccgctcgcggaccaccaggcggcagcgtcgttaaagcagggcgttgccaaggaggcatccgacattgctgctgctgctgctactacgatgagtggcagcaaccgaaggcaaaggctggtgacgcttggcgagaaggcggcgcgggcgaaggcgacgcaagacgggtccggcgcaacctccagcgcgtctcctgtggcgacctcgacggatgtcgtggtcacaactagggatcgggaggcgacaccgagtggaccagctggcggtcttgtgcccgctcggggcccgcctattgatgccctcacctggggggagctccaagctgagatggagcgcatcctccaggctggagctcgcggcgtgggccgcgagattgaggaagccaggacctgcgaggacctcctcaagatgagggagttggtggctggcaatgaaaggcaacggcagggactcgggcagatgtcggagctcgagaacaacctgtcggagatccgcggctcgctgcgggtgtcttacaccggcctacaccaactcgccggggacttcgacctcgagagtgcgttggccgaccaagatcgtcgaatccaatattggaagacgaagttcgaggtggccgaactcgagaggacaatggtggaagtgaagaaagaccaagccgtggaagcactccgaggtcgcgaggtgtggttcaactcgtacctcaggagctgttgtacagcgatggttggagtctgcagagagctccgagtaccccgttggaatcccgaggagtcggcggctgggtatatctcgtggttgaacggggcctgcgctcagcttgaaggcatcggcaagcgtatcgacgaggccctgaagcaggagtgtcgtcgatcgagccgatatgctggagggcacgtgctggcctgtatccgagatcactgcccgcagctgcacctcgagttcctccacgaagggttttcacgttctcggaggactcccgcagagatagataatctggcgaagtcgatggcaccgcttaaagagaaagtcttccagtccatggactggcgttggccttcctggtag

SEQ ID NO: 100586 - DNA, 713 bp, Oryza sativa
  Clone ID: PAT_MRT4530_98288C.1
ttaatcacacactagagaaccgttccgttttccgtgcgcatatcctgcccgtgtagggaagactgttcggaacgcaaccttagatcggatggctccgcacctccctttgatcgcgctctctcccgcatcggacggcatccgctcctctcccttccgcaactccctctctcccgcaccgcatccgcgcctctctctctctcccgtgcctccctccgagatccgctgcttcctctcccgcatcgcatcgccgctatcgactcccgtcgccgccccagtctgccctcccaccgccgcctctctcccgtcgatccaatccgccgcccagtcccggctccgatcccccctctctctctctctcgcaaaccctagctcctcgcgatccccgtcctccgcgcagccgccgatctccgtcgcgcctccaagagttgccgcccgtcttccgttgccgatccccgtcgaccacgaccacgaccacgaccacgaccacgccgcccgccgatcctccatcgccgccttcaccgagtcaccgcccgtcatccacgactacgtcgccgctgatcccccaaccgcacacggctctggaccaccatcgtcctgggaattcaccatctgaactcctagcctaaggagaaatccgccttggcatccgtcgttgcttttgagattatggaggccgacgacgacattaatatttttgtgaaggatatgaatgc

SEQ ID NO: 100587 - DNA, 259 bp, Oryza sativa
  unsure (1)..(259): unsure at all n locations
  Clone ID: PAT_MRT4530_98289C.1
gaagctggcttgagcaatggtgagctagacattggcttctntntgcttgaagttagtgtagcttggtcgctcatttcggagaatccagttcttgctaaatcggttctgtagtactggaaaatatgcatggtcaggcatcggaatggttgtnaaacgtganctggtgattaattgtnagcatggttgatgcagcttttgtaagatttgtggccgatattacaattatactgcatatatatggatgtnttatttaaagtca

SEQ ID NO: 100588 - DNA, 522 bp, Oryza sativa
  Clone ID: PAT_MRT4530_9828C.1
gttgagtcacgcttggaattcattaacggggcatcatttgggtcagaactttgtacaacctcagctccttgtaagtgcaaactttcatttggttattctttgttatttgcctctgccagtaatcactaaatgtgagcatccgtgacagattgagctcatactacttaaatgccctcctcttctcatgataatattcttcattacagatccagagaaatctatttgtgctgtaactggacttcctgccaagtatgttctctgagcgcacatttgaagtgacctatattggcctttgatgttccttttctgaagccgaaactgttgctgtgtttattgcattgatctaaataaaattgtgcacacgtgcaccttttgtttaacatctccacattattagcagagtgtttatccttagacattgcattgcttgaaatgctgtttgccacatccattgtattggttgccatcttgttctggtgaaatagctacattattttgacttggcaatttgaatgatcccac

SEQ ID NO: 100589 - DNA, 606 bp, Oryza sativa
  Clone ID: PAT_MRT4530_98290C.1
ccaacgcaagggaagtcttacatttgttttctccaaaatgaccaaactatcctaataaataatctcttgtccacttttctccacaaatgggatgaggatgggagatattaaataagagcaaaatgtgaagctgtgctttggaaaaaaatgacatgtcctccgtatcgtgaaccaataaagtagtcaaaagtggccagtatttgtgaatggagttgtgctggctgttcttggttgtgatatccaaagcgatttcgaattttgaagcttggcttttaagaataattttaggtagattttttagttgtcttcttaacagtcatgaacatagagctgggcaatgaaagagatgaaataacccttaaagttaatcctaaatcgaaatctaaaatttaaaatcacctttggattaatccaaagcacaagcaagcgcagccccattgatctgatcattgataccttgatatctgtgactagctggtaatgcaaccttttttttctttatgatgcaagcacactacatttttctcaagaagtttgccatcttattttgaaatttagcttaaactgcgattaaataaatacctatcattgtgtgttgccatctcc

SEQ ID NO: 100590 - DNA, 430 bp, Oryza sativa
  unsure (1)..(430): unsure at all n locations
  Clone ID: PAT_MRT4530_98291C.1
ccccacctccctccttnttttctgttgccggcaagaaagagaagaagaaaggaccgggaggaagaaggagagaaggaaaaagaagaagaaaaagaaaagcctgacagcccacgcgtccgcccacgcgtcagcttgtgatgttttgaggatcggataattaggttgcctatcttggatttgtttgcgttggagcaagagttaatttggagttcttgccgaagccgagagttcaatcatataagttagttttcatttcaatctagttctcaagtctagattagttagatggtttaagtctatagcaatacactagagttggtttattctatagcttctgctgtattagttagccacaagtttgtaaatacccatatattttgtaataacatctcctttggagccttattcaaatgtatgcaatgaagttccc

SEQ ID NO: 100591 - DNA, 304 bp, Oryza sativa
  Clone ID: PAT_MRT4530_98292C.1
cttcagttgaatatagtcttgcacatgctgtaagctcgacttcgtacaaactaccgttgcatcatgccacgggctttgggatcatcctcagctaaacagcgcattgtacatcttgagcatgatagccctctgttgaaccggtcggagcatgaaaacattgatcagtcttttggaacaaacacggaagatggaaaactgtgtatggtccatgaactagcaactcaaggctcttcggctgctctatattaataatacgcgtttcaggactcacaagtctcagcgttcacaaggcaccttttgaata

SEQ ID NO: 100592 - DNA, 474 bp, Oryza sativa
  Clone ID: PAT_MRT4530_98293C.1
atgtcaggaaggagaaaggagacaacgctggggcaagatgagcctgatagtcgccgccgtgagctcattgctgcagtgctggaagaggtcgatcgaacgggttggggcgggcgaggtgcggcattttcggctgccgcaccatgagggcgtcggacagtctggcgacagccgcgcgcgctcgcacgttggcctgcggccgccgccgtgaccggcggcctgcggcgaggtgagatcgtgctcctcgtcctccgcccacggcgcacctccgctgcaccatgagctcccggctggcgtgcacgagccctcggagacggccagtgggcgcccgtggatggcgtcaacggtgtagacgcggtcgctggcgccgcagtcgacgtcgtctgggaagcactcatcatcgcagaagtcgaggctgctggcgacgcagagagatggcgtcaacgtggagggatggaaaacgcgatggagtggcat

SEQ ID NO: 100593 - DNA, 589 bp, Oryza sativa
  Clone ID: PAT_MRT4530_98294C.1
ctcccccccccccccttcctttttttttttttttttttttttttttttttttttttttttttttttttttttttttttttttttttttatttgaaaaaaaaggggttgctcctacctagcagtttggcccaaaaaaaacctatgcttttttccgcctaaatttacatccccccctccctttcccgccgggtttattttcccggaaaggaaaggaaagggaacggttttaccccccttggcctttttcttgaagggggggcagggcccaattacccttgggggcccccccccttttgcttttttttatgccccacccggccggggttgaaaaaaaagcccccgggctccgactttgggatttttctggaaccggccccatttttttcctcctccggaaaaacccggggagcctggtaaaaaaaatatacgggctgggagaaaaacacctttccggccttaagcggggggccgtttataaaacccccccgtaaaattttgttggcaccggtaacctttgccggggccgggccgggcctcacctcttttttggttggcggcagggaaaaaaccctttttctttttttttttt

SEQ ID NO: 100594 - DNA, 388 bp, Oryza sativa
  Clone ID: PAT_MRT4530_98295C.1
atgctgtggcgggcgctgtggtggtggcggcggtgggtcccccgcccgcgcccccgcgcgcggcggctggcggcggcggtgcggccggcgggcgcggcgtggtgcatcgcgaggagcggggcggcggagaggacggtgcaggcggcgctggactacgcgtgcggccccgcggggggagccgactgcgccccgatccaggccagcggcctctgctacctccccaacaccctcgccgcccacgcctcctacgccttcaactccgtcttccagcgcgcccgcgccgcccccggcgcctgcgacttcgccggcaccgccaccatcaccctcaccgaccccagtcagtagtcctctcatctcctctaatcatccaccgccatgaaatccatcc

SEQ ID NO: 100595 - DNA, 326 bp, Oryza sativa
  Clone ID: PAT_MRT4530_98296C.1
tcggtttcagcaagtggagccgacaatcacaccccgcgggcgcaaacagtaaccattccggcctcgaggaccccactaatacgggaattcctctacttccaaaactagccactgataacgctactcctcctccgatcccaaatggaagaaggatttttcgacgggtattcccgtgacgactacggggaaaatcgcggtaacattgcaacgaatggggaatcctgccgggatccagcttcagggtgcaccaccacaccatctagaagctgcaccttttccgcggcgacactgttctgctcacgggttagaagagaaaagacaccatg

SEQ ID NO: 100596 - DNA, 1228 bp, Oryza sativa
  Clone ID: PAT_MRT4530_98297C.1
cttaccttgtgcaattcgcaacatgcatcggataaacaagtaatcatcgactaatcatacaagcatatgacggaaatactcccataaaacttaatcctaacacaatgcccctactatgtccaaagaataaaattatccagcaaccaacaatccatgcaaaaaaaaaaagaattagaaaagtttcttagcatcaacacaggagcagcaatccagctgaggcagatgcagcaagagccaagaagtagccggcaatgccggcgccgcggcgcgacgacggcggcgacgacgagctcttcttctcgtccgccttcgccttggcgctcgacgacttcccggggagcgggctggcggcgtcggaggccggcttggcgtccggcgccggcgccggcgacggcgccatgggcgggtcggtcctgaagatctgcatcgggaggagcaccctgtccacctcgtagacggcgacggggcgggtggagtagacgctgctgctgatcttggggttggaccacatcgacccgacatggacggtgcccatgtcgtcggtgacgttgaccgtgtactcgccgccggcgagcgtgggcaccgggctggccgcgccgcccagcctgttgaactcggcgagggagtagtacctcggcagcgcgtggtacagcgccagcgacttgagctggtcggaggtgaggttcgccgtcgccgacctcgccagcgacgcgaacgccgcgtccttggggacgaacaccgtgatcccgtccttgctgccgttcgcctggctctggaacgtcctgagcacgtccgtcttctccaggaggtcgaggaacgtgtggaacggacccgccacgctcaggaggtcggcgaggtccacgtggcgcggcgccgccggggacggcgccggcgacggcgggaggctcacggccgccgcggcgggcggacccttgtgcttctgcgcgaacgccggtgagatggaggagcagcagagcaggatggtcaccatcatggctgctttggattccatcatcctcgaagtccctgagctgctgagctgagcagggaagtgaaggcagcggtggcgcgcgtgccaccgccatcgcaggagagtaggaggggagttaaggaggagagtggctatataaaatgtggggaaagtaaaaagataatgaaatcatgggtggcagctgttgatgaggattgagtagaggacagagagggctcactactgtttcaggctttc

SEQ ID NO: 100597 - DNA, 268 bp, Oryza sativa
  Clone ID: PAT_MRT4530_98298C.1
atggagacgaggatttttataaagattcgggcccctgaactgtcaggggtaaccttgctcctcgagctcgcgcccgacgaaatcagagacagtgctagatccctacggacggcctctgaaggggcgccggattcacctgatcttcagattgatccccatgagcctgaacgagcaacttgggaggatccactctaatcttgacatcagtgagtttatctgcgtctgtctcatcctgttggccggagccggagttacttttattcaccat

SEQ ID NO: 100598 - DNA, 465 bp, Oryza sativa
  Clone ID: PAT_MRT4530_98299C.1
atggaggagttcgtcccattgccatcgatgaagcaaccggtttacggtggcaccatcgagggaggaggcgttcccggcagcagcaacatcgagtccctcctctctatgggcatcgacgcgcttgaggtggcatgtgaaggcatcatggtgcttaggacgacaggcgtcgccgcgtcgacgcgctcgaggcaacgggtgaggatcaagcaagtgcggcaaccagagcggattgatgtggccgagatgacgggcactgtaacgtcccgcctttccgaagccgcatgcatcatggtgcttaggatgacaggcgtcgccgcgtcgacgcgctcgaggcaacgggtgagggtgaggttcgcatcaccctcgccggcagcgcggggtcctccagtcctatatgccttcctcatcgccattgacagatcgagcaagtgcggcaaccagagcggattgatgtggccgagatga

SEQ ID NO: 100599 - DNA, 743 bp, Oryza sativa
  Clone ID: PAT_MRT4530_9829C.1
agaagtcaagaacccatttttgtgctttgttaatgctttttatatggagtttgttagagtaaaagccttttcttttccgttggtcgtgtagacgctgcagcttcggaggatccgctcttcgtggaagttgaagccggcatttgggaaagcgagcaaggcaagacacatcatcgccccctctattcaaaatccccaaaaatggttttaggctgggctcggggtgcatggttttgatagtagcacctcggccatataaggaccggtcttcgggcctctgttgcaaagcactaccgtacttccacatgtctagtgggtaaggcttagtttgtggctcagtctagttataaacaaaagtacacggatggagatggacgaagtcgggggtcgatggacatctctaggacaaatgaaggctacacgagctgcggcccggtagtcgagatgtcatggcacagggccggtgtcctgctgctaggggctcagtcctgcctacctgtcccgggggttccggccgtaggtggagttgggtcggtactcttgtctatggctaggatgggttggaaactatgtcacgtcttccgtccgtataccgtggtggtatgtggcacgtggttacacgtgaggaagatgtgtcttgtggcacttgtgggtgtgtcttattgagtacggtggttgtactcagtcttgctcaatttttcccaaacccataagaggagttcctggaagatgaaggctttggtgtc

SEQ ID NO: 100600 - DNA, 523 bp, Oryza sativa
  Clone ID: PAT_MRT4530_982C.1
attatccgatatactagtagcaatatatttccattttgttcctcttcttcagttaattagtctagaatggtaagctgtaatttcttgtgggtaatactagtagtattattattcctcatgcctgtgccaaaaaattccttgtataaatcaagtttacctgagtatgctgtaaatttgcacaaggtggagtagcactaagagcttgtttagttcaaaaaaacattatatcgaatctttaaatacatgcatagagcattaaatatagacaaattaaaaaactaattgcacaatttgtatgaaaatcgcgagacgaatcttttaagcataattaatctatgattagccataattgctatattaactaattaattaggcttaataaattcgttttgtggtttttaggcgagttatgaaattagttttctcattcgtgtccgaaaaccccttccgacatccggtcaaacgttcgatgtgatacctttaaactttttttttcgcgaactaaacacaccctaagtaccaa

SEQ ID NO: 100601 - DNA, 319 bp, Oryza sativa
  unsure (1)..(319): unsure at all n locations
  Clone ID: PAT_MRT4530_98300C.1
agtacttcacaatcccttggagtattccttgaccgagcttcgtagcgccattcctcttgtaagcaagctgtccatgaatgtgtaaagcggacttgctacaaaggaagcaggttcatgaatctcaaacatgctatgttgagcatgttattttcgcaaatcgttgggtcaccagtgctatccttcagttcactattttttttttccgaattctgtcaaaattgtgtcaacttctaaatctgaccatgttacaattaaaaaaaaaaaaaaaaaaaaaaaaaaaaaaaaaaaaaaaaanaaaaaaaaaanaaaaaaaaaaaga

SEQ ID NO: 100602 - DNA, 390 bp, Oryza sativa
  Clone ID: PAT_MRT4530_98301C.1
atgaacaaaagtcctcaacaaacatcacgaaacaaaaaccatggccatctactgctgctacacggtctgaaaggcgacgaagaactcgttcgtgaagggctcaccagccaccttgaactagtgcagctcaccgagcatgctagcgtacagctccgacgcttcggcgtggtggtggtagcggcgctggagcacgaggtggaggatgagcttggagtcatgggcgcggtggagggacttgtcgagcgcggtgatgaagttgagggtgtggagggtgccatcgaagtagtcctcgatgaggacagtcctaatgtcaaaattagtagtattactacagaccccctaaatggtgccgattgggaaacccccttaggtgccggttttcccaactag

SEQ ID NO: 100603 - DNA, 333 bp, Oryza sativa
  Clone ID: PAT_MRT4530_98302C.1
catcatctatttataataataacaataaaaccaccaatgccaccccatcaacattaaacaaccttttttatcatcatcaaccaaccaaaaaccaaactataaacttcctctgctccatttctgcctccattttcaatggacacccacatcataactatgcatttttttttcaccccttgtgtgactgaaaataactaccacttccccttttgccttaactgctttaaaacccatcccctgctgctgaagctaccccattccgtgattcccccaacaaacctggctctcaagtccttcctaaaaaccttccccgaagggctcttggagatagaa

SEQ ID NO: 100604 - DNA, 600 bp, Oryza sativa
  Clone ID: PAT_MRT4530_98303C.1
atggtcgttgctaagctgctccttgtggttgttgctgcatgggctcgaattgaccaaactgaggtgcgaactggggctgagccaatccccctggctgatattgggtttgcggggaaggaggctgaaattgataactcaagttacccccttggtagttctgaagattcggctggatgttgcgtaccaagtgctcaggaaccatctgaggcaccacagtgccgtccggttgtgcatggtgaaccaaatgctctgggacgacttggtttacaaattgctgcgcaggttgcccaccaggagctgcgaacccggccgatgcatttgccgaccccgggtgctggatcggctgaacgatctgctatcgcactagagtctgttggatcggctgaagccgctgccgtggtggcgtttgttgagctggttgtacgacttgttgttggattggctgtacaactggctggattggtggtgcctgctgaatcggctgctgttgcactggtaggctgtggatgctccctcattaataaccgagggttcagcggctggcctggcgccatagctgatgtagcgggtaggggagttgatgttggcgccgtcggctga

SEQ ID NO: 100605 - DNA, 426 bp, Oryza sativa
  Clone ID: PAT_MRT4530_98304C.1
atggtcattgctgagctgctccttgcggttgttgctgcatgggctcgaattgaccaaactgaggtgcgaactggggctgagccaatccccctggctgatattgggcttgcggggaaggaggctgatactgatagctcaagttacccccttggtaattatgaagattcggctggatgttgcgtaccaagtgctcagggaccatctgaggcaccacagtgccatccggctgtgcatggtgaaccaaatgctctgagacaacttggtttacaaattgctgcgcaggttgcccaccaggtgctgcgaacccagctgatgcattggccgaccccgggtgctgaatcagctgaacgatctgctgtcgcacctgagtctgttggatcggctgaagccgctgccttggcagtgtttgctgaatcggttggatag

SEQ ID NO: 100606 - DNA, 339 bp, Oryza sativa
  Clone ID: PAT_MRT4530_98305C.1
ctgcacgcgaccgcggactgactggctggaccgacccacgcgtttttttcgagcgaatcaccataaagagggagaccgcctgaacagctagtactgaagctggacatggaaggttagacctctcaccttgttgcagccgactgctgtggcagtacagttgatccattgaaggaaccttccttagtcacagtaaacaccgtcctttccattctttctggggattacccagctgaaaaggtttactgctatgcaacctgaagatggagctgcaatgctcacatttgaagcactggcagaaacatgtgaatttgcacagaaatgggtccctttctgcaaaaa

SEQ ID NO: 100607 - DNA, 250 bp, Oryza sativa
  Clone ID: PAT_MRT4530_98307C.1
cgggccccaaaaccccgagggggaaaaaaaacccctggggcagggggtttagggggcccagacccccagaaatttaagggagagaactccccagggggcccaaataaaaaacgccctcacaggggggggcaaaactgggaaacccacccccgaaggggggggccccccctttttaaaaaaaaaacgttggtctaaaaacccgaaaccatcataaacataaggggtgggtgataacaaaggggaccggggg

SEQ ID NO: 100608 - DNA, 1163 bp, Oryza sativa
  Clone ID: PAT_MRT4530_98308C.1
tgcaggaattcggcacgagggggaggaggcgctttttttttttttttttttttttttttttttttttaagctccaagcaagagcagctgcaggctgcatctccattattcatataacatattgtactagcaaaggttccattacagtatatgcactctcttagttgaacataaggccaaaccgacccacggtttcgacttaagccagcaggagatagttcatagaaaaagtgcacacttgcaacaaccatatcaaggtactcaacggatgaggctacattattccaacccaatcatgcacccaagctacacaagagtagtagtagtgcccaccactgacatggaccgatcagataaacagcatggtgtccaagcagcaccagagcataagggcaggctcttacgcattcacttttggtgcccatccagcaatcaggtgctccttagctgccttcgtcttgatgaaagattcgcggctaaacagagcctctgtgtaagcatgaacattggttaggtcttccgggatcttccagcctttgaaatgctccagagcaacctggagatggtagagctttggtgccaggctaaggtcagcagctgaaatgttctgcccgttgataaaggggccatgagctttcagatgctcctcgagtgcctgcagttcagtaagaagtgccttctctgaaccatcatttggatccttgctcttcaagaacgttgtgaagcatgagaaaatttttgatcccactgatgcatactcaggaggggtgacaagagacggggttgggtacttctcctcaatgacttgagtgatcacatcagaatcaggaatccatttgccatcaccaccgttaaacacaggcaccttcccctctgggctgatcttcagaaaccagtcgggcttgttctggacgtcgatgagcttcatctcgtagggcaccttcttctcctccagagtcagcagcaccctctgcgagaatggacagtcgccgagcgtgtccgggtggccgacggcggccttgacgcacacctccacgcccatggcggcgacgacgacctggcgcttctcacgtacgggaagagaagattttgggtttcgacggcggcgagctattggcggcgagatcccggccgggctcgcgggtgccaagcgccgacaggagt

SEQ ID NO: 100609 - DNA, 339 bp, Oryza sativa
  Clone ID: PAT_MRT4530_98309C.1
gggtggtttttttttttttttctgtgggctttccttctccaaatattttttttccctgaattttcttcttctcgtatagaagacatggaataaaacctctatacaattacatacaccagaagccataggcaaggcaacaaaagaaggggcagagagtgggccccacgttgctgtgggtcatcaaatcttaaaaaaggctggtctgatccggtctgttaaggaggggattcttggcaacctgggtggggcgccaaggcacagtctaggacaaaaaggtagggcttcttggctttttgggtcacttggcatgggctatacacaagagggggaggtgatggt

SEQ ID NO: 100610 - DNA, 517 bp, Oryza sativa
  Clone ID: PAT_MRT4530_9830C.1
actgaaggagcttaccttggccagtatgagaaattttgagacatggtgggacacaaatgaggtaaaaggagaagagctgatatttcctgaggttgaaaagctgataatcaaaagttgtcctaggctaactgccttaccaaaagcgtcaaatgtgatttcagaattgtctggcggagttagcaccgtgtgtcattctgcatttccagcattgaaggaaatggaattatatggtttggatatctttcagaaatgggaggcagtcgatggaactccaagggaggaggtaacatttcctcagctttacaaattagatattagacggtgcccagagttgactactctacctgaagcaccaaagctgagagacttaaacatatatgaagtcaatcagcaaatatccctacaggcagccagcagatatattacttcattgtccagtctccacctgcatttgtcaactgatgacacagaaacagcaccggtggccaagcaacatgatcgagtgaatggtgattga

SEQ ID NO: 100611 - DNA, 181 bp, Oryza sativa
  Clone ID: PAT_MRT4530_98310C.1
ttcttgcttactttggaaccattgctttggtcacaatacctgcattatacagtaagaaccaggagcaagttgataggtatgctgggatggtccacaggaacatatcaaggcattacaagattgtcgacgaaaatgtgatgagcaggctaccaagaagctttattagagataaagaggattg

SEQ ID NO: 100612 - DNA, 2915 bp, Oryza sativa
  Clone ID: PAT_MRT4530_98311C.1
atgagcagcaagttcatgataacctacaagaggaagcgtgttacatcacatgtctatacagctgatggcaccaatctcaagtcttctggtgcttccagtagtgttcctgtcagcagtttatccccaaaatatggggttggtgccgataataacatgttagaggaagataatttttcgacctctacaaagcaacaggatgtatttgattcaagggagcaagtcatcaaggaagaatcacctaaacaaagtgcaaatgcaccaggcaaagaacgagcggaacttaagtcacgtgaatcattatctcaaaaggaacagcctgagatatgttctactcatactgcaataggagacgcatgtgagaataaattagaatgcatagatggcacacataatcaaagtcttgtttccagttgtgtgcatgctgacaggacaactaatcaggcagaagattctagtgcctctgtttctgtgggagtaaattctcatcagcagccgaataattctaccaggcctagccaatctaagagtagatttagtcctatgcttacatttcataggcgagttaaaaacaaaataggtttggaagagcctgcagcaggaagttgttcaagagataatgacaaacattgctcaaaactaagttgcaacccaccaagttcgccactggatgctatacccttgtgtagacaaactgctggcagttctttggatgttgaagataaggttactatagcgggaacaagcactggacaatctgtaattgttgaccacttgcttgaacaaaaaagttcacacattccgaaatcgtcggtacatcatatggttccctcgcagcctgctaaagatgcaaaccaaagttcaatcccagaagaaggtacaccagtatctgagttcactagggtgctagaaaccagtgagtcagatgcaagagtggaggactcaaacagaacaccagtagacgctattgaagtaccaaaagttattgaagtgaagagggatgaacatggtaatggacagactaattgtctacagtcaccaaggaaaaatataaatgttaatcttctgaaaccaacaaatagatctgaggcagctgatcttctggagtctcaagattcaacaaaaaatattccaattattgtcttggacgatgatagtgatgagaggggcaaagagcaggaaaaatcagaggtccttgatcaattaatccaggagaaaaataaaggtagattttctttggggcagatcaacctaaatctaaattgtgctgaattaccacaagagaggcttctcagtttggatgagacatcggtgtacaaactaaaagatcaggatcaatgtgttcatgaacgaaagcaaatgtcccatccagttgaaaggttgttttttacaaaggagaaggatgccatgcacggtaaaaaacatcatgaagaaacctcaaccatgcatagctcgtactcaaatttatttgatccagccccatcatcgtcgtggattactgggaatttcaaggaaccaagtgtcatgccatcagaactgaagttcagaatattggataaggctcctgaattcaatttagatctcaaattggatagtttcccagacagtagtgtattagcccttaggcacgataagttatttcgtggaggcacctccagtggatcccattttctgacagaaaggcttgggacatactcctacaaaaggcactcttccccgtggtcagaagaagaattggattttctttggattggagttaggaggtatgggacaaataactggaatgcaatgttgagggatagacggttacggttttctaactcaagaaatgccgaggatcttgctaagcaatgggacaaggaacaaagaaatcttctaggtgtggatttccttcaatcactcagatcctctgctcgaggtcctccaccgccttcacatataccagaagattacgttggaagcagttcttggactggatgctcaaaatctccatttctttctgctccaacagacctttcattgggtgacatgtaccttcgaagcgcccgtacttcagagagagggcagcatcatttatcaaacctgggcatgttaaacctacatgcaaccgacaatgtaccaagaaatttgtctctgggaggtttccctgttgcttcctccccatatgggagaagttctagcaagcgtaggagggcgtccaagcttcccaagtcatactatgacaacaaggcagtttggtgccaagatccatcagagagggtggctcagttccttcccataaaccaggaaccaatcaacaatcttcctgagtggctgacaaaggacgccgagatggcgggcgtacgccggcttgatgcagatctgtggccgagcatgcaggctccgggtcattctgcagcagaccgactgaatgaaatgaagcctcatgttcttcctgatggatcactgaagcgtgcgcccaagaggaaggcggagtggcgcgccttcagcaagaaactgttcaagtccggcgatggcgccctggatctaaaccagagggctgctgccatcgccggacccctcggtgccattgggactagtgacaccggtgcatcgtctgaagagacggtttcagacagttgagtgtatctctagtagtagtgatttagtccagaaaaccttgtgtcagtctgaagctgcctgtatgattccgctgctgaagctggtaaacagtagcagtatgatcaaaggtaaaatcgagttaaatttcagccaagtgattggattcagtttttgtaaacatgcatcgatctgaattctgattacatcctgtgtaatatattattggcttgtgtaatccaaaaagagggaaccatataggctagcatgctgaaaaggaaaaaaaagtttttgtgatttcccatgaaaaaaaaaaaaaa

SEQ ID NO: 100613 - DNA, 305 bp, Oryza sativa
  Clone ID: PAT_MRT4530_98312C.1
gatgccgggaaattgtctgggggctgtcacaggctctcacaagactgtctggttggcttttaacgttccactctacgatattggtattctaccctacggtagctactggtgcaccctacgtaccactgtaccacacccttggcggtgttcttgtaactgagttgttaaccacgtattagtggttcggaacgttataataataagcctcacgatattcactcactaatgtgaccacatgtgaaactttgggtgatataaatagaaaaaaagttgtctttcatatttaaaaaaaaaaaaaaaaaaaa

SEQ ID NO: 100614 - DNA, 444 bp, Oryza sativa
  Clone ID: PAT_MRT4530_98313C.1
gttagtttgtcttacattgtgaaatggaggtagtaggagtgattatcatgttctgttggtctatatgtaacactaaatattacctcaatgtgatcatactaggcactagtttgagttgaatcatggagtggggctgtgataataactttgtgtggtctttgtagaactctgtaacccttcaattttctgacctattagtctcctttctcagcacctatccaatttcgattctgaaaagggagttttttttaggggaaaaagggaggtgtttggtctagcttcatagttcatagagatatcatggcgacatggtgtggtaggctaaactgttgcgaactttgaagcatgtaggattttatttgtacatattatgcgtgttcgatactccgtacaggctacacagtctcttactttctataaggtgcttctctgccatagatgaaa

SEQ ID NO: 100615 - DNA, 171 bp, Oryza sativa
  Clone ID: PAT_MRT4530_98314C.1
atggagttcatagctgaggccggccgggctgcactgggagccttcaatgactctgcatcactgcctgcatatatgctgatcagtggagcccttttgagaagatcagaagaagaagatgatgacgacgaggacgaactgacgaagaagaaaatacggcgagaatcttgctaa

SEQ ID NO: 100616 - DNA, 357 bp, Oryza sativa
  Clone ID: PAT_MRT4530_98315C.1
atggcgtcttgctgggagcagctgcagggcctctgcgccgccggccacttgcgtcgccgctgccgcggtagaagcttggtcctgctgcagcagctgcagctgctgggggttttggtggtggtggtggccggggttgcaccaggcatcagtgaggcacaggtgaggagccggttcaaggcgatcttcatgttcggcgactcgatcgtggatccagggaacaacaacgggcaactaacggaggcgagagccgacttcccgccgtacgggcaggatttccccggcggggtcgccaccggcagattctccaacggcaaggtccccggtgacttgatagctatttcctctgttccaaaataa

SEQ ID NO: 100617 - DNA, 2231 bp, Oryza sativa
  Clone ID: PAT_MRT4530_98316C.1
atgggcaactccctcgcctgcttctgctgcggcggcggcgccggcggccgaggcggccgccacgtcgcccccgccgcgctcccctccgacccggcctacgacgagggcctgggccactcgttctgctacgtccgccccgacaagttcgtggttcccttctccgcggatgatttggtggctgacgcgaaggcggccgcggcggcggagggggaggcgaccacgttccgggcgatatccggggcggcgctcagtgccaacgtatccacgccgctgtccacgtccgtgctgctgctgatgccggaggagtcgtcggcgtccgccaccgcgtcgtcggggtttgagagctcggagtcgttcgctgctgtgccgctgcagccggtgccgaggttctcgtccgggccgatctccgcgcccttctccggcgggttcatgtcggggcccttggagagggggttccaatctgggccactcgacgccgcgctcctctcgggccctctccctggcaccgccacctccggtcgtatgggtggcgccgtccctgcgctccgccggagcctctcccacggtggccgccgcctccgcaatttcacccgcgcgctcctcgcgcgcaccgagaagtttcaggattctgcggatctaggctcgccggacgccgccgccgccgccgtcgccgcctgtgggggcgatccctgtggtctgcagtgggcgcaggggaaagccggcgaggaccgcgtccacgtcgtcgtgtcggaggagcgaggctgggtgttcgtcggcatctacgatgggttcaacggccccgacgccaccgacttcctggtatccaacctctacgccgccgtccaccgcgagctccgcggcctcctctgggatcagcgggagcagaacgtgcagcacgaccagcgccccgaccaacccggctcagccccaagcaccacggcctcagataaccaagaccagtggggtcgccgccgccgcacccgccgctcaagaccgccgcgtggcgccgacgacgaccagcggcggtggaagtgcgagtgggagcaggagcgggattgctccaacctgaagccaccaacgcagcagcgtcttcgttgcaacagcgagaacgaccacgtcgccgtgctcaaggcgctgacccgtgcgctgcacaggaccgaggaggcttacctggacatcgccgacaagatggtcggcgagttccctgagcttgcgctcatgggctcttgtgttcttgccatgctcatgaaaggagaggacatgtacatcatgaatgttggcgatagccgggctgtgttggcaacaatggacagcgtcgatctcgagcagatcagccagggttcattcgatggatcagtcggggattgcccgccatgcttgtcggccgtgcagctcacgtcggatcacagcacttcagtggaagaggaagtaatcagaatacgaaacgagcatcctgatgatccatctgccatctccaaggatcgcgtgaagggctcgctgaaggtgaccagagcatttggtgctgggtttttgaaacagcccaagtggaatgatgcactcctggagatgttcagaattgattacgttgggtcctccccatacatatcatgcaatccatccctttttcatcataagctcagcacaagggatagattcttgatattatcttcagatggactttaccagtatttcaccaacgaggaggcagttgctcaggtcgaaatgttcatcgcaacaacccctgaaggcgaccctgcccaacatcttgtggaggaagttcttttccgtgctgccaacaaagcaggaatggactttcatgaactgatcgagataccacatggtgatcgtcggcgataccatgacgatgtatctgtcatcgtcatctctttggagggcaggatttggagatcctgcgtgtaaatagaaacaatagtaggctagtgaaacaaaacgtatagagggggttcttcccatgccttccttgagctgagaggtgttcttgcggctactctactcctcttcccccagttgctactgtacaatatcaaccaagcactgtggggggttggattcggcttgggctctcggcacatccagctgaatcgccatgaatcgcccgcagggctggccgcgtggtataatatgttgatgtaaatgaggatttgttcaattattaataatttataaaatcgaccaattggtcaactttctttgacaaaaaaaaaaaaaaa

SEQ ID NO: 100618 - DNA, 905 bp, Oryza sativa
  Clone ID: PAT_MRT4530_98317C.1
gggctgcagtgaattcggcacgagggcagagggtgggctagggcgatccggggggcgcgaccatggcttacgtcgagagaggtgttgtgaaagacaaacggacaatttggcggctaagcataatttctgacttcttcagggctattgtgaacttcatcagaatgttcttccttacaatgttctcgattgaaaaaacagacagctataggaaagggtatggctctggtaagaaatgggatggtgggcctggtgggggaggtcctggtggtggcccttatgggggcggccgcggcggtggaggcggcctccgaggtcctcgcacactatctgacatccgatctaacgatcagaattctctccctgcttgtggatcctgctgcggttaacctgtacatctgtcattgtgactgctgaactatgaacgactctaagatccttttgatgtcattttttaggagcaagtctgaattctgaaaattttagaacgtatataatcttcgctggttaagcaggatataagaacacttgttacatgttacatcttctgcttagaaagatcatctatgcattgtgacattgtcaaaacacgagtgtaatacccagcacatattatgcaacttgtttctgacgtgatctccacgttgccttcaaaaaaaaacaaaaaaaaaaaaaaaaaaaaataaaaaaaaacgtaaaaaataaaaaaaaaaaaaaaaaaaataaaaaaaaaaaaaaatataatgtaaaaattagtattttttaataataaaaataataaaattggggggggcctttttaaaggggccaagtttttttcccccttctttcaattttatattttttttttgggggcccctaaaaataaatcccgggggcgggggttaaaaccttgggggaggggggaa

SEQ ID NO: 100619 - DNA, 927 bp, Oryza sativa
  Clone ID: PAT_MRT4530_98318C.1
gcacgaggtgcttttcttgggaagaattttcttcaatgggaaagcaaaactatgaacttcccaagaaacaaaagggcgccaggtgcacaatcatgtatacaagtggaacaactggagacccgaagggtgtgataatcacgaagcagagctctaattgccggtgttatgaccacagaacatcttctgaaagtgacagacaaagtggtggctgaagatgattcctacttttcctatctcccattagctcacatatttgatcaagtaattggaaactactgcatttctaaaggagcctccattggattctggcaagcggacattaggtatctcatggaggatgtgcaaatgatgaaaccaacggtattttgtggtgtccctcgtgtttatgatcgtatatacacaggtattaatcagaaaattcagtctggagggatgatagccaaaagccttttccagtatgcatacaactacaaacttggaaacttgcggaaagggttgaaacaggatgaagcctcgccattttttgacaaaatagttttcagtaaaataaaagaagggcttggaggccggatacgactccttctatcaggagcagcacctttgccaaggcacgtcgaagaattcatgcgggttaccagctgcagtgtacttgtacaaggatatgggctaacagagagttgctcaggatgcttcacatcaatcgccaatgttttctcaatgattggatcagttggtcctcctgtgacgacaatcgaggcacggttagaatccattccagaaatggggtatgacgcactctcaaatgtgcctaggggtgagatctgcttgaggggtcacaccttgttctccgggtactacaagcgccctgacctcaccgaggaagtattctcagatggttggttccatacaggtgatatcggtgagtgg

SEQ ID NO: 100620 - DNA, 532 bp, Oryza sativa
  Clone ID: PAT_MRT4530_98319C.1
gcacgaggcggtctcccatacctcccccaacctctcctcctcccataggcaacttctcctcctcctcctcctcctcccggcgttgatcggcacgacctcggcagaccggcgacggagacggtggcaaccatggcggaccgacggtggcgaccacgacggcctgcgaggggctcgtgccacgaatccccgcccaggatgggcgtgggagcggtggatccggctgctgcaaggtcgcaggcggtggatccggccgcgggatgcgcgcgcgactacggcggactggcgacggcaacggcggcgaccacggcggactgcgaggcgcgctggagctagcggtggatccggccgctgtagggccactggcggcggatccggccacaggacgggcgcggagggccacgatccgtcgacggcggtcgtggcggcgatggcgatggggacgggtgcggatccggccgcccgactgtccccgtccggcccccccccccctccctccccggcgctcctcccgccggccgcggcttcggtggcg

SEQ ID NO: 100621 - DNA, 1259 bp, Oryza sativa
  Clone ID: PAT_MRT4530_9831C.1
tcaatccccgggaacggacgcgccaagtccggccgctttccatggccgtcggccgttattcccgtggccgttctgccctctcccgagcccggctcccgcccccaccctataaaatgggatcccctcactccgttctatcgttttaaccccatcccgagcctccccgtggtccctagccctctccccgccgccctcctctctctcccacgccgccggccgcctccagccgcctgtgccgcctcgaccgtgcgccggccggccgcgccgtcgcctcctccagcgtcgccgccacctcctccaccccggcctgccctccgtttcgcgcggtgaccgccggaggcgcgttcccgccgtcgcccttctctttcctccgcgccggccgcctccagccgcctctccctcctcaccggagcgccgtccggccgcgccgtcttctccctcggcctcgcagccacctcctctccctcggtcagccctctgtttcgcggggaaagcaccggagacgcgtcctcgccggcaaaacagtggcgttgccgccactgttccacctccggccgccactgtcgcgtttcccgtgcgccggccgacgtcgccaccacctccctcggctccgcgacgccgccctcatccccggcatcacctcctcctcgcccgaagctcgccggagtggcctcctcgtcggcgtccagtacctccccgcctccggccggctcctgtacgtcgccggtacgccgatcgacgtcgccgcgttgtcctctcctccagctgctcctctgtttcgccggaacaccgtcgcccgtgctggcctctccatcctcatcgtcgccgacgtcccttcggccgcccgttcatcctcgccggctcgtcgtctcgcggtgccgcctccgtcgtcggattcgcagcggcgcgttccacgtcgtccccgtctccgtgcagctgccgccggctgccctcgtcgtctcctcgctggccccggtcgtcgtcgtcgtcgtcctcccgtcgttcccggtcgtcgtggcgttcgtccctccgtcaagccgttctcgtccgtcgtccgcgtttgtcaagtgtgccgctgcagccccgtcgtcgtcttcgtcctcgactccgcgtcgtcacgcctcgtgccggccgcgtctcgccttcgtccaaggatcgccgccgaagtcgtcccctcgccgttcgtccccgtagttcccggccgcctccgccgcgcccgttcgtcgttgtcgttcccacgcctcgtcgcgtggtggtaa

SEQ ID NO: 100622 - DNA, 312 bp, Oryza sativa
  Clone ID: PAT_MRT4530_98320C.1
atggggcactccaacgtgtggaactcccaccccaagaactacgggccgggctcccgcgtctgccgggtgtgcgggaaccctcatggactgatcaggaagtacgggctcatgtgctgcagacagtgcttccgcagcaacgccaaggacatcggcttcatcaaggttatccatgcagctcaggccatgatttctgcatacgacaagcagggtttcaaaaaccgccgggggcccggttaccgccacccggcggctgagctcacagcacttcgggtggcctacaaatctgcattcttctcagctcggcgaatgtga

SEQ ID NO: 100623 - DNA, 408 bp, Oryza sativa
  Clone ID: PAT_MRT4530_98321C.1
atgaggcagtcgtcccgtcttagcattatagctgtcgtcatttctgtcaccttggttgccatcaccaacaacgccgacgtcgcgctagcaagctcgctgccgccggcgccgccagcggcggccgcggggtggacggcggtggcgaacgtgaacgacaagagcatccagcaggcggggcagttcgccctgtggatctataggcagatcacacgtctgtattttctgcggtacgtgaacgtggtgagcggccagacgcagccgtacaacggcggctacaactaccggctggtggtcaccgtgtatggcggcccgaactggaagacgacgctgtacgacgccgacgtgtggggcatccccgggacgacgacccactggtggttccgctccttcactcccaagcgatcgtag

SEQ ID NO: 100624 - DNA, 2392 bp, Oryza sativa
  Clone ID: PAT_MRT4530_98322C.1
aaaagaaacaacttccaggagcatcgatatcttgttgtatagtatctgatgaagtatacattgatgtcagctacaaggattggacggcatttgcgagaacttcaggatcacatccagctaaaaaccattaatacatcagggccagtggtaatagctaagcaaaaggaaacttccaattgaacatgacaaatacacagcacatcgatccgttcatcataggttggcaggatcaaaacgcccttgccactaacatcaatcccatgtgacaaaaaagaagggaaaaaaagaaaagaaatagaagaagaaaagaaaaggaaaacaaaattcgacctttcctctggaccactatggcagtatctagtggagtaaatgacaatcggaagcaatggctaaagagacaacaaagtgtagtgtacataatacaacaataggaaggcctaccgatgacctcgtcagcaaagctctgctgctactctgtaaaacttacctgatgatccatgaagtacagaccagtgtgatcacagagtagagagcagagttggcagcagcaaagtctggagattcttccaatgcaatcatgtcctataaaagcaagtgccattatgtcattctcactaaccaatcttttgaggatttttggtttgatccatgatgataaacgtttgtgtttgttgcaccaatggagaagaaggatggatggatggatggatggtgttattgctgcgtgttgttgtgggtggcaaagccgtcgacgagctccaccgggtagcggtcaatgcaatcctcccaggggctctccggcgacggattgacgttgcggagagcgtgccagacggcgctgttgcacttgaacccgctgccgaacgcgatctgccagatgcggtggccgcggcggacccggcccttggcctccatgtaggcgagctcgtaccagatggagctgctcgacgtgttgccgaagcggtggagcgtcatgcgagaggcctcgacgtggaccggctgcagctggaggttcttctccagctcgtcgatcacggcgcggccaccggcgtggatgcagaagtgctcgaacgcgagcttgaagtccgggatgtagggcttgatcttggcgttgaagagcttcttggcaacgagcgtggcgaagaagaggagctgctcgctgaagggcaggacgagcgggccgagcgtggtgatgttggtcttgagcgcgccgccggcgatggccatgaggtccttggacagcgacacgccggtcttcccctcgtcgtcctgctcctggtacacgcagttgaaggccttgttgtccgcgcccttgtgcgtgcgcacgacgtgcttgagggcgtacttggcgcggcggcggtcggcgccgcggttggagagcagcaccgccgcgccgccgacgcggaacaggcagttggggatcagcatcgacttgcggttgccgaagtaccaattctgggtgatgttctccgtgctgaccaccacggcgtaggtgttgcggtgcacctgcagcatgtcgcgcgcgaggtcaacggcgatgacgccggcgctgcaccccatcccgccgaggttgaagctcttgatgttccccctcagcttgtacttgttcacgatcatggcggagagggacggcgtcgggttgaacaggctgcagttgacgacgagcacgccgacgtccttgggcttgacgccggtgaacttgaacagcttgtcgagcgccccgaacatgacagactccgcctcggcgcgggcattcgccatggttggttccggcgggatgaggtgcatggcctcggggacgtaggtctcctcgctgaggccagaccgctcgaggatcttgcgctggaactcgaggcagtcgtcggagaatccgcacagcttggagtggtggaggaactcgtcgaagcggaccttgagcttgtcgggcggcttgtagcaggcgaagtcgatgaggtagacgggcctaggcctggacatgatgtagacggagatggtgaaggcgaggacggcgaggaaggcgaggacggtggcgaggtcgtaggtggcctcgccccagaccttgcgccacagctcgtctcggctgaggctgccgacctcggcgccgcagacgagcacgatgaccgggatggtggccaggtacacgccgtggctgatgaggtagtggtacccgagccgcacgtacttgaggttcaccgactggaggaagtccggcagccgccgccgcacccgcaccgagaacgtcggcgacccggcgtccggccccgacggctccacgccgcggttcacgatctccgtcaacagcagcgcctgctccctcgccatggccgcctcctccttcaccttcaccttctgcagtaaatgagaaggcagtttttttttttttcccggccgg

SEQ ID NO: 100625 - DNA, 2099 bp, Oryza sativa
  Clone ID: PAT_MRT4530_98323C.1
acttgaacaactatcagtccattgcagcaacacttaataaacagccaccaggttaattcaagtagcatatgacagtataaataatagaatcaaacgtagataagttcacatatcaccgaactcgcgtacactggttcagtacacatgtctcgcacaacttttatggtagtctatggctcataaaccgacttgctaatacaccaacacaaattaatcaagcttgaaccttaaccggcatcgcatgccgatcccgtcttttgacgttgcagtaattttccgttcattagcctctgcatacttaccactgcagcttaagcgttcatgcgagccgggtactgctcgacgcagtccagccacgggctgcgcgccgggcggcgcacgcggcggacggcgcgccacacggcgctgttgcacttgaacccggagccgaaggcgagctgccacacgcggtcgccgcggcggacgcggcccttggcctccaggtacgccagctcgtaccagatgctgctgctcgacgtgttgccgaagcggtggagcgcggcgcgcgacgcctccaggtcgccgtcgcggaggcccaggttgccctgcaggtgctccagcacgtcgcggctcgccgcgtgcatgcagaagtgctcgaacgcgcgcttgaagtccgggatgtagggagcggcggcggaggcgtcgccgtcggcggacggcggcggcggggcggaggtcttggacgggaacaggtggcggaagagcacgccggcgaagaagaggatctgctccgagaacggaagcacgagcgggcccagggtggtgatgttggtcttgagcgcgtggccgccgacctccacgaggtcgcggctgatggacaggcccttgatccgctgctcgtcctcctcctggtacaccgaccggaagctgcggtcgtcggcgcccttgtgggtgcgcacgatgtgctcgagctggtacttggcgcggtggaagtccctgcggcggttggagagcagcacggcggcgcagccggcgcggaagaaggcgttggggatgagcatggagcggcgcttcccggcgtaccaggtgaaggagacggcctccgtgctgacgacgacggcgagccccgcgccgctggcctggagcatgtcgcgggcgaggtccaccgcgatgacgccggcgctgcaccccatgccgccgaggttgtagctgaggatgttcccgcgcatcttgtagtggttgacgatcatggcggacagcgacggcgtcgggttgaagaggctgcagttgacgacgagcacgccgacgtccttggggcggacgcggcacttgtcgaacagctcgtccagcgcggcgaacatggcggcggacgcctcggcgcggccttccttcatggtggcgcagttggtgcccggctcgaacacgcagcgcggcatgtaggactcgtcgccgatgccagacttggccagcagccgcgactggaacgccaggctatcctcgtcgaacttgcccgacttcctcgccagatcgatgaactccgccttcgacaccttgagttcgtcggctggtttgtagcaggcgaagtcgatgaggtagacgggcctaggcctggacatgatgtagacggagatggtgaaggcgaggacggcgaggaaggcgaggacggtggcgaggtcgtaggtggcctcgccccagaccttgcgccacagctcgtctcggctgaggctgccgacctcggcgccgcagacgagcacgatgaccgggatggtggccaggtacacgccgtggctgatgaggtagtggtacccgagccgcacgtacttgaggttcaccgactggaggaagtccggcagccgccgccgcacccgcaccgagaacgtcggcgacccggcgtccggccccgacggctccacgccgcggttcacgatctccgtcaacagcagcgcctgctccctcgccatggccgcctcctccttcaccttcacctttgctagcatagcaaattcatggccacagctttggcttaactgatcactgactttgtagcagtaataactactccagtaaccaccagctgcgccgatagtagcacttgactgattgaatacacggtccgccat

SEQ ID NO: 100626 - DNA, 294 bp, Oryza sativa
  unsure (1)..(294): unsure at all n locations
  Clone ID: PAT_MRT4530_98324C.1
cccagntctntccnaggggaggaggcgaccgccgncgcaacaaagggcgacggcggcgggcggtggatgtncacgcggcgtggggagcacgcaggcggcgacgganttnacgacgatgctgccggccggcctcggcnaccttaaccacgcgcaatttttctggaggaggcctgcggcgacgacctgcggctccctgcgccacccctgccctgcnatccccttttttcccctctcccagatctatccnaggggaggaggtcgccgccgggcaacaaagggcgatagcgtgcgggc

SEQ ID NO: 100627 - DNA, 510 bp, Oryza sativa
  Clone ID: PAT_MRT4530_98325C.1
atggaggggggagtatttatagggaagagggggagaaggagaggggaggggcgacggggctcggggcggcgcgcggggctcggcgcgtggtcatgggacggcgacggcgacagcggtggctcgcggcgtgaggcgggacgcgacggcgacggcgacagcacggcagcggcggcacggggcgcaagacgacgcgacgggcggcagcggcgacgtgacagcgggcggcgcggcgcggggcgcaatgacgcgacaacaacggcgacggcgacgcggcagcgacggcgatggcgcgcggcggtacgaggcgcgaggcgcgacggcgacggccgagcggcgcggggcgcggcaggcgacagcggcacggcggcaggcggtgatggcgatggctcggggcgcgaggtgcgcatggcagggaaggggaaggggctagggaacctcgtcgaacacctagagtgcaatgaacagtgtctttttcctatttatcccgattttagtttatttcccatataa

SEQ ID NO: 100628 - DNA, 396 bp, Oryza sativa
  Clone ID: PAT_MRT4530_98326C.1
atgactgccgatcgatgcatatatgacatcggctcaaagataaatgatttgtcatcagcatccagccgatcggctatcttttatggatttaaccgtggcaagttttggacctgcactggagttaagcagatctcccaggcctcgtgtttttacatcaacaaacacacaagcatataaatactcctatagatttatactcatatttcaaatataatctacaaggtgcatgtgtgtcggaggcgaagggggtcggggcagcccgacccccaagcatggagggggcgaggcggtcgccgccctaccacgggcccgaccctcctcgggggagtgccacgttggtaccggcagcctcctccctctggtcttgatacccccagacacatatcaccgacaatg

SEQ ID NO: 100629 - DNA, 756 bp, Oryza sativa
  Clone ID: PAT_MRT4530_98327C.1
atggcggcgttcgtcaccttcaccgacgccgtgtcgctgctgcggccgcagttcgaggcggccgtcgccgccatgtggcctctggcgagcttcatcgtcgccgacgcgttcctgtactgggtcaacgagtcggcggccgtgctcggcgtccccaagatgtccttcttcggcatctcggcgttcgcgcaggtgatgcgtgagctgagaaaccgccatggcctgtgcgccgttatggagcccggcgacgtcgacgacgacggatacccagcgacgctcgcggtgccggagttcccgcacatcagggtcacgcttgaggatctcatggcgacgttcggcgagccgtcggctgtgaggatgatgatggagctcgacggcaagctggggaaggccatcgaggagagccatggcctgatcatcaacacgttccatggcttagaggctccctatatcaagttctggaatgagcatgtcgggcctagggcctggcccatcggcccgctttgccttgcgcaatcggcatctgcgaccgccgatgcccggccctcttggatggagtggcttgacgagaaggcggctgccggccggcccgtgctgtacattgcgcttgggactctcgcggcaatcccggaggtgcaactcaaggaagttgccgatgggttggagcgggctgatgtgaacttcatatgggcttgtagggccaaaaacattgaccttgggctagggttcgaggagcgtatcaaggataggggcctagtt

SEQ ID NO: 100630 - DNA, 805 bp, Oryza sativa
  unsure (1)..(805): unsure at all n locations
  Clone ID: PAT_MRT4530_98328C.1
cgggccggccggggcggccaaanattcgagcccgcggcgagagcgagacgacgacgaggtgatctgagatctccggccgccgccgccggtttcgggtttcgcggcgcgcccccatcatggccgactccaccagggtgctggccgtcatcctggtcgtcgacgtcgtcgccttcggcctcgccatcgccgccgagcagagccgcccatcggcgagggtggagacggacgcgaggcaggagtggacctactgcgtgtaccgccccgacgcggcgaccgggctgggcgccgccgcgctggcgctgctgctcatcggccaggcggtggccgccgtctccagccgctgcttctgctgcggcgccgcgctccgccccggcggcgcgcgcgcctgcgctctcatcctcttcctctcctcctggttgacattcctcatcgcggagtcgtgcctgctggccgggctggtgcagtccgcctaccacacccgctaccgcaaggtcttcttcgagaacccgccggactgcgagacggtgcggcggggcacgttcggcgccggcgccgccttctccctgatcacctgcgtgctcaccggagcctactacttctacttctccaagtcgcgggtctcctacgcccgccgggaagccaccatcggcatgagcccgtacagctgaaaccctgaaccatcacttcacttgatcttgtctctgctatttgtgcttaattagtctgttattacatgcatattcagagagagagaaatcactgtgtaatactgtgacagttttggtaaaaaaaaaaaaaaaaaaaa

SEQ ID NO: 100631 - DNA, 576 bp, Oryza sativa
  Clone ID: PAT_MRT4530_98329C.1
atggcgcgggaggcgacgcggtggctgctggtggaggcgcgccgcggcggcggcttggcgacgacacaggaggtggcgcggcgagtggtggagccgcggccgcgcccactcgatgacgacgacgacagcacgacgttggtgagctcgcgacaacaatggcggcctcgaggagacaaatccatcgtcggtgggctcaggggaggcggatccgtcgcccgtgagctcgggggagttggatccgtcgtcggattcgtcggtggaggcgtggacccagcgggctgcgcacgcggcggccatccccgcacggcgaggcggcggccggggagcggtgccgccgctgccgccactcgaccactcctccccatcctccctatgctcgcgcgaggcgaccgggagcgggcgctgccctcctcacgcccagatccggcggtggcggctgccccccgcccggatccggtggcgatggcagccggcacggcggtgtcggcagggtgcccagatctaggggtttcccaaacctccggggcagaggttatcatgcctcggcgaatgatcaatggacactatgaacactag

SEQ ID NO: 100632 - DNA, 507 bp, Oryza sativa
  Clone ID: PAT_MRT4530_9832C.1
ttttctagagagttgttaacagtgaaatttggtaagcccctaagagagttatcacgtcgccaatagtcggatgaaagtttctttcttgtcctacaaggactagtatgtccccatgggtataaatatgtacatccgggatcattgtaaactatctcttgatcaatactactctcggcgcatcgccaccctctattctgaggtttttacttatcaaccagtggaattaggcacctgacgcggggctgcatcggttcaaatcgatctccggcgaaggggtaagttctacgttccgccggcccaggcaattgtctcgtctatgtcggtgtcgttcaatgctgcatcagtgcattcaacctcttggatgctcctgtttggatgatatatttgtctgcctatttatcatatgtcttcgttaatctagtcttagtatctcaatttagctttattggttgtctctcgctttagggtttctgctggtatcggctaaattgttttactatattagat

SEQ ID NO: 100633 - DNA, 1780 bp, Oryza sativa
  Clone ID: PAT_MRT4530_98330C.1
cgggctgcgggagtccgcgcctcggggtttttttttttttttttttaaacagaaaaactcgacaatcgacagtacattgattgcagttcacctgtgaggaccatatatatgagaccaataattcacatcattggcaaacaaatgagatcgaaatgcacatgatctttgtatcaggtactgaaggcaagaaaatgggttttctatggaaggagaaatatgaaccatcatctctaaaccaaaagcctgtattggccaaacagaagttctagtttcacaaaggcccaagaggtgatatactgatatctccctccatcactgtgtataaaatgttcagcccttgaaagggtcgtgagcaatagaaagaactctctcaaatcatcatcacaagactctaaccaccaaacaagaaagcagcagcctgctcctcattcccgttgaacaacttgagagcttggattacggatgcccggtcgaatccaagttccaccagtttcgtgacttttgcttcgaaatctcctcctccctgtggttgcggaggattcacagctggagcacctgtagtaggagctcgtggtggcgcatcaggagtcttctcccgtgccgttgacgattctccagcagctccttggctgagagatgctagcttcgatagtttctcttcatcacgtatatgtgaagggatgtctttctcttgtaagaagggcactgaaacctcaccacctcctactctaagaacattgtcttttaagtcaattatgcactgatgtttccgcagcatatcaagcccaaaaagaaattccatattgggagcatccaatactgtgaatgaacaaggatagaagacatggccaatctttattggggctacatgtattctaccaagaatctctgattgaccaacgccaatagcaacacctctatatcgctgatcaagcagcctaagcaacccgcaacgttcggcacagctttttgatatgatagttgattgtgctccactgtcaacaaaggccttcaaaggtacaccattgacttccatgtccacatacagcataaccactcgagcaaatgcttcagggttgtgctccaaggcagcctcccagttttcatcaatacctttctgccgaattgcagcttcaattttcttctgagcttcaacatcaaaaggatcagcatacattagagcaagctcttcttcctgcttgcgctttagttctagtctttgttgatggcgtgaccgcaaggtattttgcaactcattgatgtcatcaccaagaatagcttgtgctaatgccgggtcattctgaaggagttgtcccataagttgtgaatcacctcgaatatgttgtcggaaagcttgaggatcaacagcagatccatcagggtttaatcttataatatcctgagatggcctttcattagaggtaaccttcaccatcatcacaagatcgccatcctggactccgacggtgctaagtttatccgtgttctgtatctccctgccattgaagtgaagctgctgctgccgcaaaggcacactagtctccacctcaagaagcgccttcaaattctccacagattcgtcggggtcgacgtcgacggtgagaatctgctcgtcggcggtcatcacggtgaccttcatctcgcccgccgccgccggtgggggggatcgatcgagctcctcttctcctccgccgcctcggctgcagagagggaagggaagtggtgtgggggacttgccttgcttgggctcgggggagagtctacgggtgcggacgcgtgg

SEQ ID NO: 100634 - DNA, 243 bp, Oryza sativa
  Clone ID: PAT_MRT4530_98331C.1
atggggaagaaggcgatgatcacctacgcattcaccgtccaaaaagtggcaatggaggcaacgacatgtctcgtcacaccggcatcgcagatgctgctcctgcagccgtggttcgacgggctgatggcgtccaccgccgtcgacaggctctcctgcgttgtgctctcagcatcatcatggagcgggactttgtcgtacgtgcgggtgactgaaactctcagtcaccctcattcgattacatag

SEQ ID NO: 100635 - DNA, 827 bp, Oryza sativa
  Clone ID: PAT_MRT4530_98332C.1
gtgggccgcagcgcacgtcggcggaggcggcggcgccggcgaggaaggcccgcgtgggcggcgggttggcggcggcggaggtgggcggtggcggtggcggtggcggcggcgggtttcggtgaagcgatttgggaagggaatgggggacgggactggctaggatcgtttgggctgggctgggcccacctattggctgggctcgtttgttaagggatggcagtgggcagccccctcatgcgccgcccggtgaatctggcagctggacaaccggacaccccggccgacccaactccatcacgcccaccctcgccaccggtgcctaggaaagggtcgagctatactacaagtcaagcagttacccactctcgcttgtggcaagcacggtaaggctgatgtcagcaaaggaggggggagcgccaacagacgggccccacatgtcagcggcacaaggcggccggtccaccgtggaccgggaccacgcgggtggtccaccgacggtccagatcggcccacggcgaatgacggcggcgagcggcggacggtgaggtggatgggtggacgaggagaccctcgtccttgcaaggccgacagcggtgatggagcggcacggcggcggcttcagcagcggctagcggtggccggaggcggcagtaggcggcgacgcgcggggagagcggtacggcggcgacgcgcggcaagcgagcggtggccgagaaggctcttgtggcagtgaagctagcggcagcgaaggcacggcgtggtgacggcgctagcggcggtaggaagcacgggagggtgcggcgagtgagggaaacgggagaggaggc

SEQ ID NO: 100636 - DNA, 852 bp, Oryza sativa
  Clone ID: PAT_MRT4530_98333C.1
ggccgcgggttttttttttttttttttcgtggagaaaatacatagattaacactagccattagcaaatcaacaacaaaataataataaaaaaaatctcgaggaactgtcgcttcccctctttagtcccggttggtagattccctctctttactcccggttggtgttaccaaccgggactattatttgaaccgggactaaagatagcgatctttagtcccggattcgtagtcccggttggaaaaccgggactaaagggggggtatcaaccgggactacaaacggtttctccaccagtgtgagatgcacacgatagtatgcatcatacacttgttatttgactatacaagtaattgaaattcgatcaacaacaaccataaggaaagagttgaaagttggcgggtgccatgttgcacacatatggcagttgcatcaccatcttcatcatcatttgttgttgcccgagtccaccacaaatagcattttgcatgttctgcatcatttgacaactagcaccacaatggcactgtggtatcatgccttgtagttgcatgcaacattgttgttgcaggagagcaattggttgtgacatgaacatggttgcgtagctacccatgcccaaagtttgcatcatgtacagcttacagggattcatggtgcccattgctagtgttgatgggaagtatggtatagtggtggtgattgcggtagctgcacttgcagaaagagctagcaaagcaaagacaaccaagatcttgtatgatgccattgttgacagcgtatgggagatgcttaacaagattactagatggtgtaaatgtagaagattatatgttgagggtgatcccggccgg

SEQ ID NO: 100637 - DNA, 1067 bp, Oryza sativa
  Clone ID: PAT_MRT4530_98334C.1
tttttttttttttttttttttttttttttattttcgactcaaaatgtactaatgcattattaacatcccggcctcagacagaaaactccaatcacacagcccaatattacaaaccaccaagaacaagaataatgtaaagaacaaactagtcaaaatcaaataaatttaaacatggagagaggaagaatgaaagaaaaggaaaaaaaggaaaaaaaaagaaaagaaaagaaatgcatgcacatggctagcttcctcgaccatcgtgtccgtacaccgtcttacaagaggcagccaacaacggcggcgagcccggcgacgccccagccgacggccctggcgctggcggcgcccgtgggctcggcgtcctccgcgccggcggggccggaggcggcctccgtggagccacccttcttgggcttggcggtcgacgcggtgggcgcggcggcgggggccttgacgccgaagagctcgaaggggaggagcaccttgtcgacggagtagacggcgagcggcttgaccgcgctgagcgcgttggtgacggtgacctcgacgacgccggtggagacgttgacgttgttgttggtggtggaggtgatgttgagggtgtaggggccgtcggtgccggacgcctgggtgcggacggggttgctggccgtctggaaggagtccatggagtagaactgcgggaggacgtggccctggacgagcgccacctgctgctgctgcgtcaggctgttgagggtgcccggcttgaggttgttgaaggcgttgtcggtaggcgcgaacacggtgtagccgttgccgttgaaggagttgttcagctggctgttcagctgcgtgtcctgctgcgtctccttcatcagccggatgaacgtcgtgtactgccctcccttctccaggaccgccgtcacgttcggcggccccgtggcgcccgccgccggcgtcgcagcgggacccggcgcctgcgccgccgccaccgccgccatcgccagcaacaccaccacggctacgctcctcgccattgttgtgagagtagtggtgtgtagcgtagaagcgggacgtgcggg

SEQ ID NO: 100638 - DNA, 675 bp, Oryza sativa
  Clone ID: PAT_MRT4530_98335C.1
atggcggtttgggccgccagggatgcttttcagctggatgagtggaacaggcccttggagcaaagagcagcggggcggggcaaagcggatgaccggcggagcggggcatgcggcggaaggaacggcggggaccagagcatgctggcggtgcggagcggaatgggtgagcggaacgagcggcgggcggggaaaagggcggcgcgcggcggccacagccgtatgaggaatcagcttggcggcggcggcgtgaacccgttgcgcgcgcgaaaggcgaccacggccgtgatcgtgccgtggctgttcgctgccctccgctcctctcaacttgacacctgtgatggctgccactgcttttcctcgttgtcgctcgatccaccgccaccagagaagggagggaaagacagggggagggagaggccgccgctggagatgggggaagccgacgaggcgagaggagaagggcagcctcgacagaggaggggtggatctgtcggcccatcccttgctcccatgctgccgccactgcttcatgggaggagaggaagagtggatctggccaccccgccgccatcgcctgccgttttatttgcgatggggaaaggaggaaaggagagaaaaagagaaagagagataaaaagtcaaaaagattatactaatatgacccactatagataa

SEQ ID NO: 100639 - DNA, 363 bp, Oryza sativa
  unsure (1)..(363): unsure at all n locations
  Clone ID: PAT_MRT4530_98336C.1
agggggggggaagaccctaacatcaaaaaccctccttgaaaattttggaatttgatccccaacgattcagatgccgatgaaacactggtggttcccactcggattaccccccatacaaattccccgacaaactggctcaaaaaccccccanttggttccaaaggaaaacgggtatgagggatcttcccaccgggactggcttnnccttncccccgnccnttgggtcccctgggccccgntttttccaaaacaaatggctttgacgggntnggcctcgcnccccaagggaacctgccgncntgggtatccccactttccccctggcaaaccgggggcggntgancttggggggcggnnccctgt

SEQ ID NO: 100640 - DNA, 884 bp, Oryza sativa
  Clone ID: PAT_MRT4530_98337C.1
aactagtggatcccccgaacaaacagctatcaccccgcgatccatttgcccaatcagatcaaggcgtgtagatttgattttggttttattactcgcaacctgcacgttgccctcagtcacctggcggcggagagagagatcggagatgagctcggtgtgcgcgaggcccgtcggcgtggggtaccttgtcggcggggcggcgagcagctggtcccagcggcgggggcgtggggtggcggcgccgcgggcgagagtgagggtgtcggcctcggcctcgaccgtggcgccggagaggcgggcggcgacgatgtacgaggtgctggcggtggaggagaccgcgggcgccgaggagatcaaggcggcgtacaggcgcgcggcgcggcggtggcacccggacgcgtgcccggggggagccgagcgcttcatgctggcgcgcgaggcgtacgaggtgctctccgacccggagcggaggcgcggctacgacatccagctccgctgctgcggcgccggcgccggggcccaggcggcgcggcgggccgggttcgccgactgggaggcgcagctcgccgggctccagtggcgggccgcgtcgcgggagacgtgggggagcaggatgcgccaccgtcagccgtctccgtcctgagccgagaatcgcagaattcgcagtggcttttttgaattttgaatttgtggtgagttttctctttttctttcactttttttttcctcttctgtagccttccttgggatgtgtatataccatacggagtattaggatatgatctataggtggtacatggtagtagtatagaagaatgtacaaatttcaaacattttgaattctgatacctactttttgggaggaaaagatctttctaaaaaaa

SEQ ID NO: 100641 - DNA, 313 bp, Oryza sativa
  Clone ID: PAT_MRT4530_98338C.1
atgagtaagcttgccgtcaaatccggttgttccgagctggtcgccatcgccgccgaccgcgctcctatcgtggcctccccgctgggcacgaccacactcggcacatcccaacccgcgctggcaccccctccctctacctggctcgtagccccgccattgaggccgatggggagaggggaaggggaaggatggtcgtcgccgtcgtcgtcgtcgccgtcgtacccttgccgtcgcggcactgcgtcgagcactcgctgacgcgtgccatgccggcgaaactggaaggagagagggagaaggaacgtccccgccg

SEQ ID NO: 100642 - DNA, 205 bp, Oryza sativa
  Clone ID: PAT_MRT4530_98339C.1
gtattcaagagtggaagcagctgatgcaaagctatctggaaaggtctcaaactttggaagccccacaactcctccagttctttgcaccaagcaagttgaagtgtttgcaaattcaccagcttacacagagaattgggaagagaaaaccaagattcgtaggcgtgtaaaggttgccaagagatcttcaagaaaggatttgctcaca

SEQ ID NO: 100643 - DNA, 1414 bp, Oryza sativa
  Clone ID: PAT_MRT4530_9833C.1
cccccttgaatggcgcccccaatcgtcgggaacggccgcgcttttcccggccaccaaccatggccgccggccgccattcccgtcgccgttccgccctctcccgtgctcggttcgcttccctccgctataaaatgggatcccctcactccgttctatcgttttaaccccatcccgagcctccccgttgtccctagccctctccccgccgccctcctctctctcccacgccgccggccgcctccagccgcctgtgccgcctcgaccgtgcgccggccggccgcgccgttgcctcctccagcgtcgccgccacctcctccaccccggcctgccctccgtttcgcgcggtgaccgccggaggcacgttcccgccgtcgcccttctctttcctccacgccggccgcctccagccgcctctccctcctcgccggagcgtcgtccggtcgcgccgtcgccgccagcagcgtcgcagctgcttcccctccaccggcgtcgcctccgtttcatgcggagaccaccggagacgcgttcccgccggcaaccagtggcattggtgccactgtactccctccagccggctgctgtccctcgtcggagcgtcggccgacgtcgccatctccttcgtcgacgccgtggcaacgtctccttccccggccacacctcggtttcgccggaacaccgccgtgtcgccaccaacccctccacccgcctcgccggagtcctccggccgcccgttcctcctcgcttgtttaccagtcagccgcggcaccaccacctccggcatcgcagcggcaaggtcgcccttggcctcgcctccccttcgaccgaacccctccgcggtccatcgtcgttgtctccgttcgttctcgtcgtcgacgtcccgtcggtcgcccggctcgtcgtctcgcggcgccgcctccgtcatcgtcatcgcagcggcgtgttccacgtcgtccccgtctccgtgcagccactgccggctgccctcgtcgcttcctcgccggccccggtcgtcgtcgtcgtcgtcctctcgtcgttcccggtcgtcgtggcgttcgtccctccgtcgagccgttctcgtccgtcgtccgcgttcgtcaagcgagccgctgcagccccgtcgtcgtcttcgtcctcggctccgcgtcgtcaagccttgtgccggccacgtctcgccttcgtccaaggatcgccgccgaagccgtcccctcgccgttcgtctccgttgtgcccgtctgtctccgccgcgcccgttcgtcgttgtcgttcccacgcctcgtcgcgtggtggtaaggatccgtcctctcgctgccccgtcctcgtcctttcggtgtcgccccgtacccgttgtgcggttgtcgaccccgcccgtgtggtgtctagtggagtccgtttgtcggctactcgcctcggttga

SEQ ID NO: 100644 - DNA, 2603 bp, Oryza sativa
  Clone ID: PAT_MRT4530_98340C.1
cagaatagaaggcctaatgggcacggctttcgctaccgttttcgtcctcgtgttcttgatttctttgtgcaaatcagatgatcagctaacacctgcaaagccactccaccctggtgacatgctaatctcggatggtggtgtctttgctcttggtttcttctccccaacaaaatcaaatgctaccttatatgttggcatatggtaccacaagattcccaatcgcaccgtggtgtgggttgccaaccgtgacaacccaatcactgccccttcttctgccatgctcttcatctccaatagttctgaccttgtgttgtctgaatcgggaggccacactctttgggaagcaaggaacaacatcaccactggaggttctggagccacggtagttcttcttaattctggtaatttggtccttcgatctcctaaccacacaatcttgtggcagagctttgatcatttgactgataccatcctccctggcatgaagctcttgctgaaatacaatggccaggttgctcagcgcattgtttcttggaagggccctgatgatccatcaaccggcaacttttccctcagtggtgaccccaactcggatttccaggttttggtttggaatggaacaagtccatactggcgtagtggggcatggaatggtgcgttggtctctgctacgttccagagtaataccagctctgtaacataccagacaatcatcaacaaagggaatgagatatacatgatgtactctgtttctgatgactctcctagcatgcgcttgatgctcgactacacaggaacaataaagatgctgatctggaacagcaacttgtttgcatggtctgtgttattcagcaatccctcttatacttgcgaaagatatgcctcctgtggaccatttggttattgtgatgctgcggaggcattcccaacatgcaagtgccttgatggattcaagcctgatggtcttaacatttcaagaggatgtgtgagaaaggagcagatgaaatgtagctatggagatagtttcttgaccttgcctggcatgaaaacacctgacaagttcttgtacatcaggaacagaagccttgatgagtgcatggaagagtgcaggcacaactgctcttgcacagcatatgcttacgcgaacctgagcactgccagcatgatgggtgacacatcgaggtgcttggtttggatgggggagcttctagacctggcaaaggtcactggtggtggtgagaatctgtacctccggcttccgagcccaactgcagtcaagaaggagactgatgtagtgaagattgtccttccagttgtggctagcctactgatcctcacatgcatatgccttgtgtggatatgcaaatcaaggggcaaacagcgaagcaaggaaatccagaacaaaattatggtacaatacttgagtgcctcaaatgaacttggggctgaagatgtggattttccattcattgggtttgaagaggtcgtaattgcaacaaacaatttctccagttataatatgcttggaaaaggaggttttggcaaagtttacaagggaattctggaaggtggcaaggaagtagctgttaaaaggctcagtaagggttctgggcaaggaatagaggagtttaggaatgaagtcgtccttattgcaagattgcagcacagaaatctagttaaacttgttggttgctgcattcatgaagatgaaaagttactgatctatgaatacttgccgaacaaaagcttggatgccttcctttttgatgctacaagaaaaacagtgcttgattggccaaaccggttcaaaataattaaaggggtagcaagagggcttctttatctccaccaagattcaagattaacaattattcatagagatctcaaagcaggcaatatcttgctggacgctgaaatgagtcccaaaatatcagatttcggcatggcacggatctttggtggaaaccagcaacaagcaaacaccacccgtgttgttgggacatatgggtacatgtctcctgaatatgcaatggaaggaatcttttctgtcaagtctgacatatatagctttggtattctacttttggagatcataagtggcttcaggatcagctcaccccatctcataatgggcttcccaaaccttatagcttattcttggagcttatggaaagatggaaatgcaagggatttggtggactcgagcgttgtggagagttgtccactccatgaagttttgagatgtatccacatagcgctcttgtgcattcaggaccatccagatgataggccgctgatgtcatctgttgtgttcatgttagagaacaatactgcaccgctacctcaaccaaagcaacctatattttttgtgcacaaaaaacgcgcaactgaatatgcaagagagaatatggaaaattccgtgaatggcgtgagcattacagccttggaggggagatgaatgtttatatttgttttatccttgtctgtaaatttcggcattttctgcagctatgcgttattgtaggaatggtgattcattgcttctgcttttgaaacgaatataatccattatcaacaaattttgtatccgttgccaaatggac

SEQ ID NO: 100645 - DNA, 257 bp, Oryza sativa
  unsure (1)..(257): unsure at all n locations
  Clone ID: PAT_MRT4530_98341C.1
gcncctaccaaccgcggaagtntcgcggggtactacaacgtgcccggccgcnacgggtcccnccccgtcgcgcgcatgctggcgccgcacnacaggccgtgctcnacttcacctgcgccganatgcgggactcngagcnccgccggaagcgatnanctctccggaacggcnggtncggcttgcgctgaacccggcgtgganggagggcgtccangccgcgtncnanaaccctctgaccttgctccacnggccnggtt

SEQ ID NO: 100646 - DNA, 634 bp, Oryza sativa
  Clone ID: PAT_MRT4530_98342C.1
atggtatccgtcggaactaggattcggtcggaaactatccaacctttttttgctggatatccgaatcaaaataaacagcaaaatccaaattaaaacattgaaaaaatctcgtcgccgtccgccacacgccgtcgcttcacgccgccgagttcccgccatcgccgtcgcacgtcgcacgccggatccgctcgtcgccgtccgccgcacaccatcccctcgcgccgccgagctccctccatcgtcgtcgcctcacgacgtcggatctcgcggctctagggccaccgaccccagatccagccgcccagaggccggtgtcgccgtccgccgcacccgcacgccgtcgcctcgcgccgccgagttcccgccgtcgccatgacccggccgccccgaggtcggcgtggtcggttacgctcgtcgctgcacgccacaagtcgtcgcctcgcgccgccgaggccccgccgtcgccgtccgccctacgcggccgcgcccctgacgtcgccgtcgccgtctgccgtacgcggcccagcccccatcgtcgccgtcgccgtccgccgcacgcgggccccacccccatggtggcgtctcgcggtcgcggcctcgtgggagccgggagcccgggaggaaggacggcggc

SEQ ID NO: 100647 - DNA, 1257 bp, Oryza sativa
  Clone ID: PAT_MRT4530_98343C.1
atggccgcagccgttccgcacgagggcaaagggttggcttgacactacgtacttgtctcaaactgggaatatacgtattccacaggggaaacaaggtacatgctacatagtcttgatgttattttactgcctaacttgcagtaaggttttcacaactgaaaccatgcagcaacgcatttaaaattttgaattgtataattgattttctctttttttatgaatctacgggacagaaaattgtaatatctttatagtttgtagaaatctttgctttttcccaaacctgtttgtacttcattagcttttcaaaacaatctgtagtgcagggaaccacatttgttctccagaaaagtgcagaccaacggcaattgctgttgtcagctatatctgcaggaacaggagtaaatagaggctatagatgatctcacttcaagcagacaaggaattgaagctgatctgaacactctagcgggagaatggcagctattatggtcctcaaaggttagcatttacattttcataaacaactccaagcaatatttcatatttctaatgtctatgcatcatttgggttttgaccgagcagcattcaacttcaagtttttgccatttaaggttccatacccagtgccattcaagcttcttggagatgaggcaaagggttggcttgacactacgtacttgtctcaaactgggaatatacgtatttcaaggggaaacaagggaaccacatttgttctccagaaaagtgcagaccaacggcaattgctgttgtcagctatatctgcaggaacaggagtaaaagaggctatagatgatctcacttcaagcagacaaggaattgaagctgatctgaacactctagcgggagaatggcagctattatggtcctcaaagactgaagatgaaagctggtcatttgttgcatctgctggtctgaagggtgtccagatcataaaagaagatgggcaattgaagaatttggtaagaccctttccaggtgtcagcctcaatgcaagtggcaacatatgtaaaaatgaggatggcaataactttaacttgtccataaataaaggagctattcaagctggtgggttacagtttcccttggatgctcgaggagaatttgccatggaaatattgtatattgacaataagataaggatatctaatattaaccaacacaagcttgtccatggatctatgaagaaatcgcttgacttcatcactgagaatctttggagacttcatcactga

SEQ ID NO: 100648 - DNA, 807 bp, Oryza sativa
  Clone ID: PAT_MRT4530_98344C.1
atgggggtggggcccgcgtgcggcggacggcgacggcgacgatgggggctgggccgcgtacggcagacggcgacggcgacgtcaggggcgcggccgcgtagggcggacggcgacggcggggcctcggcggcgcgaggcgacgacttgtggcgtgcagcgacgagcgtaaccgaccacgccgacctcggggcggccgggtcatggcgacggcgggaactcggcggcgcgaggcgacggcgtgcgggtgcggcggacggcgacaccggcctctgggcggctggatctggggtcggtggccctagagccgcgagatccgacgtcgaacagccggaatcccacgacgctggcattggagatggccggttttgggcaagggggcgccggttttgcgatctacagggcgcagcgactccgttcccgtggttggaggcggcgcagacggcggcggcgaggctggcgacggcagccagaagcaggcggcggcggcggccatggcggcggtggttccggcgaactccggggagggcggcggccatggtgagcatcagtggagcaagggaagcatggtggtggcggcggctcggcctagggcggccaggagcggcggcgcgcccgtacagccggcgtcggccgaacagagcggcgtcgccgggaggcgacgccggcgatgttccggcgatggattggatggagaaagagaggggaaagggagtactcatcatggagaatccgttttttaccttcaatttcagaggatttgcgatgtatgcgacgaatttgggagctctatcaatggcgcaaatttag

SEQ ID NO: 100649 - DNA, 599 bp, Oryza sativa
  Clone ID: PAT_MRT4530_98345C.1
acccgggatcgagcaattttcaacagcacggcgtagtcaccgacccagaggcgatcgacaccctagtccgttactccatggcttgccccgccctgcccacctgtggcctagcagtcaccgagtcggaaagaattatgcccagtgttaacgcccgtctgcgggatttgttgaacagtctggatttacccaatgaaagtatcgtcacccgcatgaccggttgccccaacggttgtgcccggccctacatggcggaaattggttttgttggtagtgcccccaacagttaccaagtgtggctggggggaagtccgaaccaggaacgtttagcggcagcctatacggaaaaaatgcccctggaacagctagaaagcctttttgaacctttatttgtgtacttcaagcagagccgtaaaggtaaggaaagttttggagacttttgccatcgagtgggcttcactgccctacgggaatttagccatggttacacagcaccggccaagggcggtaaaaaccgcaaaaaccaacggcgggtcagcctgtccgatgaaatgtatgcccagcttaagggcccgtctgagcgggattattccccatgaatc

SEQ ID NO: 100650 - DNA, 234 bp, Oryza sativa
  Clone ID: PAT_MRT4530_98346C.1
atgaaggcaactgcaaaactgatgatcgtgcgaagcaaaagacagacgcacggccacgcaccaacgcgtcgccaactcgccatccacgaccgcgacgagctgacgatgccattgcatttgcacacgactttcgggctgcagggcaacttgaagatgaacacagatgccaaggacaacaagaaagaattgatgctgaggagattgcttgagcacaagaatcccttcattcactaa

SEQ ID NO: 100651 - DNA, 174 bp, Oryza sativa
  Clone ID: PAT_MRT4530_98347C.1
ctgtcaaaattgcatcatctgtaaatcccatgttgattcacactttggtttataccctgaagagcgtgcgtgatcatgtcatttgtgattattgtaaccttgtcaagaagccagtcagacttgtatgcatcaacacatatttttcataattttgtggtggtttggtccatttct

SEQ ID NO: 100652 - DNA, 536 bp, Oryza sativa
  Clone ID: PAT_MRT4530_98348C.1
ccggccgggcgttctctccgtcttcccgttatcccgtctctccttcgccactccccaacggcgcgcttctccctcgcccagcgactgcaggcgccatccactccctccctccctgatccgactgaatgagaggagggcagcggcgtggagacggcgctcccctccccttcctttctcttctccccgctcctggatcaggctgtagagggagagatggtgggggcggccaccgcaggcgacggaggtggcgctcctccctccctagctcccagatccagctggaggaaggagcgatagtggcggaggcggcgctcccttccctccctccctcccagatctggccgaaggggggagggcagcgacggcgccctccaccgtgagcagcagcgccggcggcggcgccctctcccaccacgagtggcagcggcggcggcgtcaatggcttcccccggtggatccgatggcgacggtggcgttggcggcttcacgcaaactgatctggcggcgtcgaaggctttccacagcgagattgaatt

SEQ ID NO: 100653 - DNA, 2994 bp, Oryza sativa
  Clone ID: PAT_MRT4530_98349C.1
atggggttcgacgacgacgacgaggatctcgtcgtctacgggacgccgatcgagcgggaggaggacacctccgcacgcaagcgccgggccgtcgccgaggccggccagctccgcgccctccccgcctggaagcaggaggtgagagatgaggaagggcgaagaaggtttcatggtgcatttacgggaggtttctcagctggttattacaataccgttggcacaaaagagggatggactccacagacttttacatcgtcacggaaaaatagggctgagatgaaaaagcaaagcatatacagttttctcgatgaggaagacataaaggatatgggaggtaatgccttggaaacatctcagcagtatgatacatttggttttacagctacagaacatgcccgaaagcaagcttccaaggagcagaaagagagaccatcggctatacctgggcctattcctgatgagctggtggtccctgctactacttctattgaatcgcgcagggaagcaagaaaagccttccttgcactctctggtacaaaaactggtggtcaaaaaatacaagttgattcacacaagtctgataaggatgatggtgccacagaatcatttgaggagttacatgcctctggaaatacccctgtatacgttcttcatcccaagcaggacttgcatgggttaggttttgacccattcaagcatgctcctgagtttaaagataggaaaagattgcagaagtcagcgagggaccgtaatagaagtgatgtttcaatgagggggagtcttctgatttcaaactgtacgacacagcaattttcttctgcaccatcttattctgtttctgtcgatattaagggaactgaccctagctcagtcagtgggaagagatcttatctattgtttggatcatcagcaggacaatatgctcctggctttgggattggagcacttgaggagctaggtgttgaagatgaggatatttatgcatcaggttttgcttatgaacaaatggaagttgatattgagccttcaaaaacagccagcgatagtaattataaacttgaagacaggaaaagaggtgtcttcctggcttttaaaatcgcctcaagttctgagtacaagcttgaaagatttgatcctcctgagatcccatctgattttgatggtcgccacaagtttctaactccacgacaggatgttaataacctttctgatctggctcctcctgaggttcctgctccagaagatactagcttgagattattgattgagggttgtgccgctatggttgctcgttgtgggaaacatattgaggatttttacaaagagaaaagcaaaacaaatacacagtttaatttcctcaatgaaggagatggctgtagctactatgcaaggaagttatgggagtatcagcagaaatatattgaccagcaaaagcctgatactgtgcaatccaagtcttctgacaagttgactgctgaaaatcgtggaaagattcttggtgaaaggccccttgatagaagcactaaatcatctagctcatccttccctgcaaaggaagcaattcaactgcagtccaatctggctgacaactttgtgaagccaatatctcttgacggcctaccagagtatgaaaagcctttcagaaatgatcctgcaaagcaagcaaggtttgagcaatttcttaaggataaataccaaggaggccttcgccctgcaaatcttatacctacaagtactatgtcagatgttgaccgtgcccgggaaagactagattttgaggctgctgctgagacaattgaaaagggcaaggaaaaaaaggctatggatcctttatcattgttgggtttatctggaataaatgagcaacgttttgtatcatctactgaatcagagagatctatacctgcacgagatgagaaatcaatttatccacgaagggaggaatttgaatggcgaccatcaccaatactgtgcaagcgttttgacatagttgatcctttcatgggaaagccatttcatgttcaaaggccaagaagtaagatggacagccttatcttcatgtcagaatccaccacgaggacaaacgaagtggaaagttcgagtattgctccacagcatacttctgtggcaggagcaacagagacagaagcaaagggagctgcgactgaccctgaaattgagtccagcagtgtgcagagacctgttgatctttacaaggctatcttttctgatgattcagatgatgatatggctgaacctcttgctaatcaaccagtggatccagtaaagaccagtgaagatgccaatatggttctcaatcgtcttgttgctgaggatttcctagaatcattgggtaaagaactggggttggatgttccaccagaaaagcccacaccacccaatgtcttatttagatcagaaacaccttcaacagctaatgcaattggcatatctagaaacagaaaggcaattacttgtcaggaaataaaggagaacgagagtgctcttgacaaggaggaaattgccaatgccagtgcagatgttccatcagataatgttgaagagcttggtttgaaatatgagaagcaggagcatagagctgagaaaagcaggtcacgctcttcgcaccgtcaaacccaaagtggtagtctagattcagattcgacctctgatcagcataggagtagggagagaagatcacgccataaaattcgaagtggaactccaggttctgattcttctattgagcatcataggagtaagaaaagaaagtcacattcaaagcatagaacacgcaggagtagaagtccttatgctgattccagtgacagccaatatactaagaggaaacaccgtgagaaaaggcatcaccggactcgcaatcctgatactgattctagtgatcatgaatatgaggaaagacataaatccagtagtcgaagatcatctgataaagacagatccagaaggcgttctagacaccacaaacgttga

SEQ ID NO: 100654 - DNA, 3857 bp, Oryza sativa
  Clone ID: PAT_MRT4530_9834C.1
aaaagttccctttccatccccctctcccccttgggccggctcggcccagctccctccccctccctctcctctccccgcggcccatccggcctcctccccgcgcgcgtgccgctgacgggcgggcccgcccgcctccctcgctgacgggtggggcccacccgtcatccccttcctcccgccgctcccgccgccccgccgacgatatccgatcgtggttgaacccactattcggaacatcaaggtcgcacaggtcctcatcgacggtggcagctcaatcaaccttcttttcgccagcaccctggatgcgatgggaattccgcaaagcgaattgacaccaaccgatcaaccttttcatggaattactccccaatcctcgtccagaccattgggcaagattacgttgcctgtgactttcggccaagccaacaacttccgaacggagcagatcacctttgatgtcgctgaattcgatacagcttacaacgccatcatcggcagaactgcacttgcgaagtttatggccgcatctcactacgcgtatcaagtgctcaagatgccgggaccgaagggcacaatcactattcaagggaacgcaaagttggcggtgcagtgcgacaaacggagcctcgacatggtcgagcaaacacctagcccacccgcaacgactgagccacccaagaaagtgagcaagacgaacaagacaccgaaaccggacggcgcaatcaagatcgttcaactctctagtgccaaccccgacaagactgaacttgcgctcatcaccttcctccgcgacaatgctgacgtgttcgcttagcagccgtccgacatgccgggggtccctagggaggtgattgagcacaaactcatggtgcgacccgatgccaagccagtaaagcaaagactgcggagatttgcaccagaccgaaaacaagccatacgagaagagctcgacaaacttctcaaagctggcttcatcagagaagtacttcatccagagtggctagccaatccagtcatggtgcggaaggccaacggaaaatggagaatgtgcgtcgacttcaccgacctcaacaaggcatgccccaaagatcacttccctcttcctcgaatagatcaactggtggactcaacagccggctgtgagctgttgtgttttctcgacgcttactctggctaccaccaaatcagcatggcaaaagaggacgaagagaagacagcattcatcacaccgttcggggtattttgctatattaagatgccgttcggactgataaccgcagggaataccttccagcgcacggtccagggcgcacttagcaaccagctcggcaacaatgtcgaggcatacgtcgacgacatcgtagtcaagaccaaggcaggcgactcattgatcgacgatctgtgggaaaccttcgacaacctctgatgatatcgcctcatgctcaatccagagaagtgcacgttcggagtaccgtcaggtaagctacctggtttcctcgtctctggcagagaaatagaagcaaatcccgagaagatcaaggcaatcgaaaacatgaaatcgcccataagactcaaggaagtacaaaggctaaccggatgcatggcggcactgagcaggttcgtcgctaggatgggagaacgaggacaacctttcttcgctctgctgaagaaacaagacaaatttgtatggacacaggaagccaaagaggcattcattgcactcaagcgctacctatcaaacccccctgtacttgttgctccccaacctaatgaagaattattcctctatattgccgccacaccatattccgttagcgccgtcattgttgtcgagagggagaaagtacaacgaccagtctattacgtcagcgaagctctccacgacgcaaagacaagatatccacagatccaaaagctgctttacgcagtcatcatcacatcaaggaagatacgccactactttcaagcccacagagtcacagttgtctcctcttttcctctcggtgaagttgtgagaaacaaagacgttgtcggccgcattgcgaaatgggtagtcgagctgagccagtttgatgtccactttgtgccacgaacagccatcaagtcccaggtactcaccgatttcgtagccgattggactatgcctgataacaaatcagacaaccaagtcgacaataaaacatggataatggcgttcgacggcgcactcaacagccaaggagtaggggcaggattcatcttgacgtctccctccggagatcaattcaagcacgcaatccacctcaacttcagggcgaccaataacatagccgaatacgagggactactcgccgggataagagctgcagccgcacttggggtcaagcgactaatcgtgaaaggggacttagagctagttgcaaaccaggtgcacaaagattataaatgttctaaccccgagttatccaagtatctcgcagaagtcaggaagctagagaagaggttcgatgggatcgaggtccgacatgtctaccgcaaagacaacatcgagccagatgatctagcacgacgtgcgtccagacaagaaccgctcgagcccggcacttttctggacatcctgacgaagccatcagtaaaagaggttagcggcgaagttagctcgaacgcccccgacattagctcaaaggccacaaaggcagaacgcaccgttgccaatatcgagaccacagacgactggcgcatcccactaatcaaattcattacaagcgaggagttgcccgaagacgatacagaggctgagaaaataacccgtaaagcaaaaatctactgtatggtcggcaacgatctatacaagaaagcgccaaacggggtacttctcaaatgcgtctcgtccgacgacggcagacacctcctccttgatatacatgaaggtatttgtgggtcacacgccgctggtcggacattggtcggaaaagcttttcgacaagggtttttctggccaaccgtcctcaaagatgcatgcgacatgtaaacacacaaagctacccgcgcaagcgcttcagactatccctcttacttggcctttctcgtgctgggggctagacatactcgggcctttcccacgaggacagggcggctacaggttcctattcgtggcgatcgacaaattcactaagtggatcgaagcagtacccacgggggaaatcaaggccgacaacgccatcaaattcatcaaggggatattctgcagatacggactaccgcaccgcatcataaccgacaacggctcccagttcatcagcgccgatttccaggattactgcatcgggctgggagtcaagatatgcttcgcctcggtctctcatcctcaaagcaacggacaagtcgaaagggcgaatggaatagtacgacaagggatcaaaaccctactatgggccgtacgcaccacaccgacaacgtctaataaggaaacacccttcttcctcgtgtacggctccgaggccatgctccccaacgagctacgacatcagagtacacgagtacagaagcactccgacgaggaccaggtggagcagcgagacatcgatgtaaatctactcgaggaacatcgtgaacgagttgccgtccgagcaaccagctatcaacaggccctccgccgttaccacgagaagcgcatccgagcacgcatactttcgatcggcgactacgtcctccgacgggttcaaagctaagcagggcgaaacaagctctcacccaaatgggaaggaccgtatacgatcacacaagtcttgcggccaggcgcatttaaaattgcagacggcgagggtcgcgaattagcaaattcttggaacattgaccaactacgtacattctatgta

SEQ ID NO: 100655 - DNA, 549 bp, Oryza sativa
  Clone ID: PAT_MRT4530_98350C.1
cgccgcgtcgccggaatgggccttcccccggccccgtgggccgtggcggctgcggcggcggccggctaccgacaggtacgctcccaggtcccaggttcttcccgccggccaccgccgcgtaggagcagcacgccgaggggggggtcgccgtcgaagccgccgtggcacctcccctccgaggacagctggtccagatcgatctgcggcggcggttcacatgcgctactgcctcaaagacctttcgaggctaattttcaggcggagtttctgcaggattcgactcgtgatgagtttcattcatgaagcgtgtcgtacgcctggcgtagtgtagaggagacgatagtagctgttaagtagcaccataatgtcatgctttgtatcatactaggggagatttgcacgctgtagccgtggcgcgtagttaaatcaattcgggtaagtcgatcccgacaaattcgaccattgtatcctgcaatttcttcttaatacaaaggtgtgcaagtaaaaaaaaaaaaaaaaaaaaaaaaaaaaaaaaaaaaaaaaaaaaaa

SEQ ID NO: 100656 - DNA, 243 bp, Oryza sativa
  Clone ID: PAT_MRT4530_98351C.1
ggaaataaagtgaacaaaccccttttattttactactgtcaacgttttgagcttactgttaaacccatgtcttccttttttttttcttttactccagtctgatccagaaatactacaatcacaagtctgaatccctgaacgcgggggtggacaacattgggcagtatcacacattaagttatgccactcgctacagttaggtggcaactatgtaccggtctagcggctgcgggggccgatctg

SEQ ID NO: 100657 - DNA, 356 bp, Oryza sativa
  Clone ID: PAT_MRT4530_98352C.1
gggattgtatgtgtttgttcagtgtacacattctggcacgcttcatccatatgatgcatggcgcgggggtgggcggtgaagaaaacccttgtcaagtccctttaacaaataatcgacaacaatcacttcacagagaccattgtatagcgaacatctacatcagtgatgctatctcaatagtttactgatttctccaggctgtgagcatttgaggtttttcaaacaagtcttccaggcaagtacagggcccaataggtggctatctagaggaggtccctgctgccaaaggagtcaacaaggtactggagttgcattggccatcaattatatatgttcaatcacatattacaaacagg

SEQ ID NO: 100658 - DNA, 125 bp, Oryza sativa
  Clone ID: PAT_MRT4530_98353C.1
cttttcctttatgcagacttacacagactatgttttgacaagtgcattgagaaaaggtgggatatcgtctggttaagtttcgcatagactgagttatccgtttcatgctgttattttctcatcct

SEQ ID NO: 100659 - DNA, 595 bp, Oryza sativa
  Clone ID: PAT_MRT4530_98354C.1
gatagtattcaagggaaaatcatttgattcaactgcaagttttctatgtgatcatggttgacatcccgggatactatcccattagctgaatggatttgctctgaattacatttctgcgaatctgaatcaatcactccagagatgtcaacatggggttttttttcactgtcaacccgatgcttcgacttcttgctggatatactcacagtcccggctccattttcatgttcgctattattgctccgagcaaatccatccttgagcttaccttcaaactcgcccaccctccaatctggcatcactacaaattctatccgggaccgaaactgtaccaattcaccggatttgatatcatattcaactcaggatccccagttcttgatcaatccgagagctcccaaagctggcgccgcctctgctctgctctgctctgctcctcggggtctcctgttcgcgcggtctctagaggcttccagggatttctcctgcgaatttccttttttttttcttttctctctcctcctcgcgattaaatttcctgatttttttttgaagagagaataggagagatgggtgggtcgatgggatgagggcg

SEQ ID NO: 100660 - DNA, 321 bp, Oryza sativa
  Clone ID: PAT_MRT4530_98355C.1
tccacgcgttcttaccccaccagcagcatctgcagtagctgagcttgaagcagcagagcgtggtagacatgggcgtcttcaccatggccgtatcgtccccggctctggcctgcaaggccgccgcgaaggtgtactgcgtggggcgcatcaccatgcgcaagtaggtggtaaatcccaagcccgccgagtatgtgagcccgcgtgacggtgcctaccgcgtgctctacctgatgcccgtttcttgtgagcctgggtactacctgacgcggtgagttatcctggaataatgtgagggacacctggggactcttcgcaaacttg

SEQ ID NO: 100661 - DNA, 2511 bp, Oryza sativa
  Clone ID: PAT_MRT4530_98356C.1
tttttttttttttttttttttgacatgtaacacaccccagcaatcatttaaaacagaagtacagagttggcttgttttaacaacatgaaatggtgttagttcagaaaataaaaatagttagctgaaaacagaaaaaaaaaatctatgtttgagattacacaaaatgtgagtgagaacagacacgaatggccacggcacagacgaccttctcaataattaagatacaaagctaatggtcaaaagccaatctaacttgttaaattggtgttacaagtttgcctgtacctgactaatcgactagagtagtagtacacactacacagctgctaactgcatgatcggatcaaaacggagaaaggtttgcagcaacaagtacaatattaacagtcacagttgttgaagcttcatgagataacttcagttgtttctgcaagattttgcatccatggggtctccctgccctcttggtgaatgtacagatgaagcatgcatcactctttggtttttagcagcagcctggtggttatcattatgtgactttagtgaagccgcttcatcaacagctccagtgacatgctctgatggctgatggaaaagcaacagagctatggaccgatcaattggatttgtctgtgtctcgatgctcccaggatcaacaaactttcccgaagtttctgcattttgcatgtcctttacattgtggctatctccattgttgttcattgtatttgggaagacttgcctattctgcgcacttcttgccaggcggtataacccatctcgaatgcacatttttgttttcacatccaactgactaactgcatcctgaagctgccgaaagctgttctcttcaactgagttatcagaagaaatagacgatacgaaggacccatcaactaccattgaggtgcccattgcaacatcagaatgacccaaacctctttttcctaaggacctctttccaatttcatgattctcacaaggatatgaagcccttcttgtcaatgtttgatgaccaggatgtccagtcacattatcactgataagttgtcctgatgccgaactggccactttcttctgcaccttcaagtttctctctgcaaaggaagccccagatggaatgatctggcaatttctttctggataggactcagaagttatgttacttggtgaagttgaatccaagtggttcttttggttcaataaattctgagaagagcttagttgagaacctgaagctatagaaaacttctgatcttcaggctgttccatggcattttccgatgaatatcgatttccaatcatatctaggttttcctgcccagtgtcatatctggtcgctggacaacaattccatcgcatccctttggtaagcctgttcgccataaccatcgtcagttttttgctcattgaacagataagagtcatcgaattgctcgtcacatacagcacttgaaggatcagctgttgtcagggatttatcttccgtacaattgaatgcggagaggtcatccaggataccataatcagaatacgaggattcaaaccctggttgcatagcaacatcagaagagtacatggcatctgaagaaggaatccatgacagttcatccgtgttcggaagttgctgctgaccgtacgtggaatcacacctgaataagttgtcgacgtcctcaaaattatcaatagcaggccaatcaatgtaggttagatcattatctccatagccatgaccagtttgtggagtactctgattattgagaacaggtgaaccatcattgctcagagcaaactgagaactgttccaattgtctgttggatatcttgtttcagagatagtattcaagggaaaatcatttgattcaactttgcagttttctatgtgatcatggttgacatcccgggatactatcccattagctgaatggatttgctctgaattacatttctgcgaatctgaatcaatcagtccagagatgtcaacatggggttttttttcactggcaaccccatgcttcgacttcttgctggatatactcacagtcccggctccattttcatgttcgctattattgctccgagcaaatccatccttgagcttaccttcaaactcgcccaccctccaatctggcatcactacaaattctatccgggaccgaaactgtaccaattcaccggatttgatatcatattcaactcaggatccccagttcttgatcaatccttcccaattccaaacgctctggatcaaaacccgagagctccaaagctggcgccgcctctgctctgctctgctctgctcctcggggtctcctgttcgcgcggtctctagaggcttccagggatttctcctgcgaatttcctttttttttttcttttctctctcctcctcgcgattaaatttcctgatttttttttgaagagagaataggagagatgggtgggtcgatgggatgagggcgtggagtgcaagtagcctgccgcccccggatccgccacgaggcctcgtgc

SEQ ID NO: 100662 - DNA, 457 bp, Oryza sativa
  Clone ID: PAT_MRT4530_98357C.1
atggagcggaattgcgaaaatatacctaacccacggtgcggcgatgcgggagcgacgcgtaaccgcagatcgaaggcgcgggaccagtggtcgtatcggtcacgcaggttggatgtgagggaccgacgtggtcccgcatattgcgcatgcggcatcggcgcacttccgctgggtagttcagcggcaccgcggtggtttgcgggaccgagcgacaccggctcggtcccgacgtctcggtcccgcgcctccgttctgcgcgatcggcggatcggcctggctgcccatagcacggaaccacctcggtgctgccgattggggctgcgggcccgcgccaccaacctgcattaccaaatcgctctcgcgtttccagcgtgcggagaagaatgcaacctcaaactttgcttcattattatactatccatgcattttgaaactctgcacatcgtggaatttagtg

SEQ ID NO: 100663 - DNA, 651 bp, Oryza sativa
  Clone ID: PAT_MRT4530_98358C.1
atggcgcgcgccgccgccgccaccgccgcggcgatcgctccgcatctggttccggtgattcggggcgccactccgttcgctcccgccgccgccaccgccgcggcgatctctctgcatctggttccggtgattcggggcgccactccgttctcttccgccgtcgccgctgccgccgccgccgcctccaccccggcacggtcatcctccgccctcacccagacgctctctttcccgatccaagctaccaggtccgccgccacctccaccccaccatgggcttcctccgcactcgcccagccccgctatttctccacaagagctaccaggggatgggcaaggtggaagaagagggataatttgttgaagtttgacaatgtttttcttcctgacgaagcagtcgtggaagaagagacggacgaggccggggccattgccggggtcgcggaggatggcggcgcggacgacgttgcggacgaggtcctccgccctggggcaagtatagttgtagtatccgacctgcagctgcgcctccgacaaggacaacgacgcaatggagaagaacaggatcgcccacgctatgatcaccggcgagccgtgacgacgaacaccgcgtgctgcgctgcacatctttcactgctataccgtgtgtag

SEQ ID NO: 100664 - DNA, 235 bp, Oryza sativa
  Clone ID: PAT_MRT4530_98359C.1
cacgcgtccggttgctcatgtgcaccatgctatggatgctgaaggaatcatcatccggaactgcaaaaatggttagcgagaatggagagatgatcctgatctagctgagagcacagaccgatccgcttactgtatgccgccaggtcgtgctgtgtatgtttgacgtgtaacgctcagctagcattgggattgaatctgttgtcgccacagaatacttgggttctgatgctatgtg

SEQ ID NO: 100665 - DNA, 423 bp, Oryza sativa
  Clone ID: PAT_MRT4530_9835C.1
atgggcggcaccgcgggatgtggaggcggcggcgacatggggtcgggcgcgagtcgcaggagcggctgggcgagccgaggcggctgcggcacgccgaggagggcattgcagaaggcgggctacgccgatgagtccgccgccctctcgagctccgagtcaacggcgacgagtcctcggcttaagtgggcggcgggcgtcgtcaaggtcgtcggggagggcgcgctgcaccaggagagcggaccccaaggacgggcggcgggcatggtgggggacgttgagggcgtgcggcgcagctcacgacggagctcacaagaaggaatcgatgaggccgatgcagtctcgagctccctctgcgaccctccttctttttccttcttctccgcggccggcagtggaggtcctcccgtgactctccctcactag

SEQ ID NO: 100666 - DNA, 554 bp, Oryza sativa
  Clone ID: PAT_MRT4530_98360C.1
cgggctgcaggaatcggcacgagggagaactagtcttgagtttttttttatcacaaatggatacagtccagagtccagacggtcacttcatatatgagaatatcccaaaagaacaaaaaatcagtgtacaaaggatttccagaaaccaactatttgtctcaaatcacatgtttttgcactagctacgatgtaagaaaaattgggccaataagcggtaaaaagaaggtaatgtcatcaaaggcctgtctcgataggggggggttaggtttaagtcctttagataagcagagataatgaacccattctgcatcaaaatggaaggattaaacctaatccatgcctatccaaataagccttaaaactatgatcatcacgtgacaactctttaccctgttcttcaccacgtcttcgaatggtgaagttcttttgggggtctgaagacatcactactcttgcaatgcatccctaaaagtataactacaagttctgtacaagtgtacaacagcaaaccacagcaatggccatcctatcctgtgtatttcctcaatccggat

SEQ ID NO: 100667 - DNA, 127 bp, Oryza sativa
  Clone ID: PAT_MRT4530_98361C.1
atgagcggagctacactcaccattatattgggcttcgcgctcaacgtccccgcctttcacgtcggggaaaaccttgtccccgccgcgttgcctctattgaattcctctacccccctgcggcgagagg

SEQ ID NO: 100668 - DNA, 160 bp, Oryza sativa
  Clone ID: PAT_MRT4530_98362C.1
gatgcggatgcgagctgagtcatgcatattttggaatggaattattctcagatcatcagcaattggtgtattggagattaaggtctttcctgaagctggggttatctcgttgccgctgggtgattggccaggttgagtcaatcgctgaccaagctcaact

SEQ ID NO: 100669 - DNA, 627 bp, Oryza sativa
  Clone ID: PAT_MRT4530_98363C.1
atggcgcacggccgcgccgccgccgtacgccgccccaagtcgtcgtcggcgtcgtccgcgggggcggctgccgaacggaagcggaagcgcgccgccgccgccaagaccgtttccctcaagaaccagatccgctccaccgagcgcctgctccgcaagaggcgaaagattgagaggatgatcaggcgccttgagaagcagcaacgttcaaatgccgatgatgccagcaataaactgtcaaaattaaaggaagatcttgagtatgttaggtttttcccaaagaatgagaaatatgtctcactgttttctggagggaataccccagatatgttagagaagaggaataagtggcgtaaacagataaaagaaaatttgatggctgctgcagaaaatggaaaagacttggaagagacagcaagcgatgatgatactgtggatgtgagtgatgacgacttcttcatgtcggggagttcaagtgatgaagaggctgatgatgaatggactgacaaaagtgccaaataaccagcttccagtgcttcaggtaaggcagcgtctggcatgtcaagcgatgaaaagaatcagcgtcagagagatgctcgagttcttatgccaccacctcgttcattagca

SEQ ID NO: 100670 - DNA, 648 bp, Oryza sativa
  Clone ID: PAT_MRT4530_98364C.1
gcaaattgcctgagagccgaaacgcgcgaaacgacccgcccgcccacgcggcccagcccaaccaggtcgcacaacgcaactcgcgagggcgagcgactgagaccgtctcctctcgtctcgtctccccgctagggttcaggccatggcgcacggccgcgccgccttcgtacgccgccccaagtcgtcgtcggcgtcgtccgcgggggcggctgccgaacggaagcggaagcgcgccgccgccgccaagaccgtttccctcaagaaccagatccgctccaccgagcgcctgctccgcaaggaccttcctaatgacattagggtagctcaagagaagaaactggaagaattgaagcggcaacaagagcttcagaatcaactggctattcaacgaacagttcagctgagagatagaaagataaaattctttgagaggcgaaagattgagaggatgatcaggcgccttgagaagcagcaacgttcaaatgccgatgatgccagcaataaactgtcaaaattaaaggaagatcttgagtatgttaggtttttcccaaagaatgagaaatatgtctcactgttttctggagggaataccccagatatgttagagaagaggaataagtggcgtaaacagattaaagaaatttgatg

SEQ ID NO: 100671 - DNA, 234 bp, Oryza sativa
  Clone ID: PAT_MRT4530_98365C.1
tgaagagttagcgtattggctacgcgctaatctctttcaacttcattctatactagaagacacctggctctaagcggagcactggattcatatcgatgtatgattggagctcgtgagacacagcagccaatggtgttcaggattgactctatggatagggcttgagattgcaagcatcatgtgatgtcaacaaagtgctcatggtgcatcctacgtaacacatctggaccatgc

SEQ ID NO: 100672 - DNA, 2823 bp, Oryza sativa
  Clone ID: PAT_MRT4530_98366C.1
atggcgctctaccgccgcctcctccacctccgccgcctccagcccccggccgaacacgcctcctccgtagcctcagcgactccccgctcttcccgctgctcacgccgtcgcgccccttcgccgccgtctcctcaatcccccgcgtcgagccgccgctcctcgtcgtcccctccggatgattcagctggtctaggagctacaagaaatgagcaaactgaggaaaacgctacaggtttacagcgaatcgaagatggctcagtggtctcaaatgaacacactgtcaaatggagaatcttcactgataatgctcgagattttttactgaaagcaaagcttggttcagcacttccttccctgacagggaacttatgtgtttattattggatggggagaacaaggataacttgtatccatgtgccggaccttcattctgcatttctgcttggtggagaaccctaccaagcatataacatggatctcctatctgcggaaaggaaaaagaatttcacattcttcctttcaggatgggaggattccggaagtcttattggtatcagcctatgcccagtggcttggctctcgagccatatgattgcatctcgtgttttgagtcttaaagaagtataccttcaaacaatggctttggctagaaacctagatgaagctgagaagtttttccaggcagccctacatgaagcgaaagaaggatttggactgagagatccacatgttgcgtcagcccttaacaatctggctgagttttataggttaaagaaagaatacgagaaggctgagctattgtatctggaagcaattgaaatcctggaagaatcatttggatcggacgatataaggtgcttctgtggcacttggacacaagaattggcagcaacgctggttggaactgctttgcatagtcttggaatatgctaccatcttcaacgcaagtttgctctagctcagacatgttatgagcgtgctttgaaggtactgttgaatatgtatttacctgaatttcatatagaaggacgtgttatggggattggtcatccagagtatgcaagcacaatgtaccttcttggcaaggtgttaagtcaacaaggaaaagatgcagaagcccttattgaagagtctatcaggatattggaggagtctgggcttggtgagtcaccaatatgcatacaaagaatgaggtatctctccacggggataagcccaaaactgctaggtgccagtggcgttgcgggggacaggagcatgcgcaggctgcgcgtcttcagaagcatgccttgggtgaccaacaaaagtggtatcagtcgtttaagttggttgaagaagttcgcgattggtctccatttcttcatgctgttgcgttggaatctgagcggcaccactcagcatgagaaagtgcaggttctgcaaacttggcgtcagactggctctgttgttgaatataaaaatcagtttgattctcttgtttaccaagtgcgtgtgtttgatccttcagtgggtggtatgatgttggtatctcactttattttgggactggaggatgaaattcgagctgctgtggtggttcaattaccagacactattttgggactggaggatgaaattcgagctgctgtggtggttcaattaccagacactattcaacaggctgcagctgttgctttaatgcaggaaagtgtgctgcttgagttgggaacttacaaagttaagaaactgtcatacaagccatctggtgttaaaggggaaacttctcattctagtgatgaaactctggctattaaaccagaaagggctgaattgtggaaggcaaaacaactaagagattatagatgggccagtggtctttgtttcaaatgtggtgacaaatattccccagatcatcagtgtgcagttactgggcagattaaggccatgcaaataactgagatcctacctgtctgcctcctgataggacttatgatcatgccattgccttgcttcctgatgctgctcctgtcaatagcaagccttatagatactcccctccaaaaagatgaaagagaacaccaagtcaaggagatgattgattctggccttattaccccaagcatgagtccgtttgcatccccagttttgttggtcaaaaagaaggatggcacatggcgtttttgtgtggactataggaagctcaatttgatcactgtcaaaattgataaatggagatgctatttacaaaggtgccctttcaccatcagaattgatcacaagagttcatgccatctcaatgatcaggtgctgggaactgagttacagcagaaagctatgactaaactaatgggcttacaatacaactttcagtacaagaaaggagtggagaacattgtggctgatgctttatctcgcatgcatgttcactcatctatttctgccttgacagtggttcaaccaatttggttgcaggaagcggtgaattcctatgcagtggacagtcaggctcagcatcttttaatggaattggctattaagtctcacaatgctcaagtgccattgccaattccaaaggaggcatgggttgatatctcgaaggattttattgaggggttacttaagtctgatggctacactgtcattcttgtggtggttgatcgctttactaaatttgctcacttaattcccttaagacacccatttactgcttcacaagttgcatctgcagtggacaaagctgtttttaagactcatggcattcctcattccattgtctctatcatgataagatctctaccagccggttttggggtgatttgttcaaagtgtgggacactcaattga

SEQ ID NO: 100673 - DNA, 648 bp, Oryza sativa
  Clone ID: PAT_MRT4530_98367C.1
ccggccgggcgtcgagcacgggagagtgcgagctcctcctctccatctccgccggcgaccgtacttaacccgatcggccgaccaactttctctccctctcgcccttgtctcgtttcgcggaagaaccgaggtaccccacctcggattcgccgggaacggaggcgccatctccgacgccggcgagagaagtcctcgactccgtcgcaatccgccaatcttcgggaacacgactgcgtcaactcggaacaccgtcgcgctctggacgccgctgcttcgcctttgctcgtcgcccggcttccacagttcgtgacaggctgagccacttcgccacgagtttcatcaacccctgtagatcaagaatcccgaaggaatcgacgcaaggtggaccacagtgggagatcctcttcttcttccccaactccagccgccgacgccattcctttctttctccttctctgtagaagcctgggggtacaccgtcgatgacgaccgtagcagccgcgccgtcgccgaagcagtacaccgtcgccaagacttcgccgagccgcatttgctgcttgacatttgcagccgagtctcgaggaggcctactttgtagctgagcaaggagtggaagagcaagaaatggttgcaggtgagatcctcctg

SEQ ID NO: 100674 - DNA, 492 bp, Oryza sativa
  Clone ID: PAT_MRT4530_98368C.1
ggggggatcacaaggggggggattcaaaaaccaaggcccgaaatcgggggctcacttatacccccgacaaaaacccctttaattaaacggcagggggggggggaaaaaaaaatcaaagccacaaaatcgtttaaaaaacccccctgaagggaaaaaaaaaaaaaaatcgcctaagtgccctaaagggaaaaaaaaaaaacccccaattaattaagcccagggccccacacattaaacggggccagccaaaccaggggcttttttgcttggtaggggcatgcctgccaaaaaaggatgcaaaaaattaaccatctcctcaaaaaacggtttaagggggccaccggccccggttggggttttggaaacccgggaacttggccccgacgttttcccacttggacaaaaaaaccccggtccccttggacccgagggggaagtcctggaaaaaaaccccctgggacgggaccccccacttggaaaaccccccccccc

SEQ ID NO: 100675 - DNA, 1914 bp, Oryza sativa
  Clone ID: PAT_MRT4530_98369C.1
atggcggcgtcgtcgtctgcggcggcttcaaccagctgcgccgtcgcagccgaagctaatggctcaacgtcgacgatcgtcgcgacgacgaagcccaccggccaccacatcctcaagatcgacggctactctcggactaaggccatggtcgccgccggcgacagcatcgactcctcccgcttccacgccggcgatcacgcgtggcgcatcaggtactaccccaatggcaccgaccgcagcaaccagaatcctgacgccatatccgtcatgctcgagctgcaggacgccgccgccggccgcaataatggcgccgccgccgccgccgccgtcaaggcgaagttcgtgttcaggctgctcaacaaggacggcgagccggtgccgtcgcgcacctaccgcagcagcgtgcacagcttcccttcctccgacggattcaagaattggggattcctccgattcatcacccacggcgacctcgagaagtcggggcacctcgccgacgacggcttcgccgtccggtgcgacgtcaccgtcatgggcggcatcgagctccgcgtcgagccggcgtcgtccctcgccgtgccggagccggacatgcaccgccacctcggccgccttctctccgccggggacggcgccgacgtcacgttcagggtggccggcggcgaggcgttcaccgcgcacaggtgcgtgctcgccgcccggtcgccggtgttcaaggccgagctatatagccgtggcggattcctaaggcccgccgccgccggaaggcccggaacacgcgtcatcgacgtcgacgacatggacgccggagcgttcggggcgctgctgcacttcgtgtacaccgacacgctgccggagatggcgtcggcggacgtgccggccatggcgcggcagctgatcgcggcggctgacaagtacaaagtggagaggctgaagctggtctgcgaggacaaattaagcaggcgtgtcgtcgccgacgacactagcatgacgccgacgccgatgtcgacgccgacgacgatgactgattcgacgacgaccgcatgccggtggggggcgaaatttcaaaccctgcgccagcgtccatgtcaacgcgagtgtcaagatcagctgctcgatctcgccggcgagcgggtggcacggtacagccaatccggcgacaagtgttccatctccaagaagaccgatcgatgggtttgcaatagcttcatcaagagggatgagctggagaagtccggccatgtcgtcggcaaccgcttcgccatccggtgcgacctcaccttcaacgtgcaggacctccgcgtgagggggctcgtcgccgtgcagctcccgccgcccgtcctgggctgccacctcgccgagcgcctcctgttcgacgacgagacggccgacgtgaggttcagggtccgcggcgagacgttcccggcgcaccgggcggagctcctcggctcctccatgaaggagcacgccgcgaggaccatccgcgtcgacgacatgaaggtccccgtgtttgccgcgctgctctacttcgtctacaccgacgagctgccggagatggaggacgacgagcgcacggtgattatggcgccgcaccttctcgtcccggcggacaggtacgacatggacaggctagctgaagaaggtgtgcgaggacaagatggtgaggcacctcgacgtcggcacggtggcgacgtcgctggcgttggccgagctccatggctgcccgcggctcaaggaggccatcttgaggttcctcgtcgtgtcgccgccggagaagttgaagacggtcatggcgagcgaggagtaccaacatgtgatcacggatttcccctccatagccacggagattgttcttgccatgctcgccgcaaattcggcttagcaagcgaattgacagtggagatgaggagatag

SEQ ID NO: 100676 - DNA, 344 bp, Oryza sativa
  Clone ID: PAT_MRT4530_9836C.1
gatcctgacggcgcggtctccggcggacgattcggcggcacgcaacgcaaccctccctctgtccctccggcgtcggtcaaacttacgtccggccaggacacgcccgagcagcggttcacgcacactatcctgctgaccaacccacccggaccggcggtgacgcgtgggcccccgagcccacctgtcatgagaggccggtggggccaacgatatactagtgtaaaatatattcagctcgtcggtgtcgtcgcttaccagacggctcgcctttctgtgtcccggtcgtgggtctccgctgcctctgttgcttctctcttgccctcctgtactactactaccagcag

SEQ ID NO: 100677 - DNA, 224 bp, Oryza sativa
  Clone ID: PAT_MRT4530_98370C.1
gaagcccaacacgttctccattgagtgcaaccgatcctccttctcgaccagccacagtgctgatgctgctgggcgagccgacggagcggcacatgaacccgcggtacaagctggtcgtggagctcgggcgcggacagttggatgtcacctacctgtgaagggatttttagactagcggacgcctacgcgggcaagatcatgtccaagaagaagctagccaccgc

SEQ ID NO: 100678 - DNA, 285 bp, Oryza sativa
  Clone ID: PAT_MRT4530_98371C.1
atgccgactcaagctcttgcaaatcctctcaccgaacatgccacagggaaggcatacattacccagaccccaaacagatgcaaatgcggcgagcatccagccgtcataaccagccggcagaaaaggtcgggcaagaaacagaactgccaaagaggtgacttgaggtcagccttagtcaatggtgaggaccgggactatgctcaagaggagcagaggtctattgcggtcgggataccatgtaagaagggaggagttgaggtccagacggtcgaggatatcgggtga

SEQ ID NO: 100679 - DNA, 287 bp, Oryza sativa
  unsure (1)..(287): unsure at all n locations
  Clone ID: PAT_MRT4530_98372C.1
ctgcgagaccctctgctcccgccggttctacccgccacggcctcttgttgggagaagatgtttgccctttgagtaccctatgagctgaaactgcttgaagatacgccattccctctgggattagttgccccaatgtattcccagaaatcatgagttttggatcgcccaagttggtacttggggtatttgttgactttgagncgcaccaaatcggacttgacccatttaaattttggccantttaaattatagaccctttctttgcccaaaaaaaaaaaaaaaaaaaa

SEQ ID NO: 100680 - DNA, 456 bp, Oryza sativa
  Clone ID: PAT_MRT4530_98373C.1
ccggcccggggtgggggaaaaatcatacaaggagaactctgaaccagcatcttctatcttccaaagccgcataacttcatccatgaaacagaaaaacaggcgtgtgcagatgatggaaagagagtaaacagtagcaatgatcaagattgcatgtcccttcttttgccctgaattttgaaacatagaatggtttacatgtagtgaatgaatcagttctacaatatcaaagacttagctcctgaattttgctaagatagtgtgccttacggttggattcaagtgttcgtttctttctttttggccaaattgatcagctaaattgaatcttaatttgtaccataccgaaaggattcatcttaaactttcagtcaatatatacatgtaaaatatacatatttggcaagcagagtagcatgcagtcctttttataaaaaaaaaaaaaaaaaaaaaaaaaag

SEQ ID NO: 100681 - DNA, 452 bp, Oryza sativa
  Clone ID: PAT_MRT4530_98374C.1
ctttagccatggctaacaagtttacaactaagccacatgttttgatggacttgattctccttattggtgcaaaaagatgaaagcttacattatggctgaggattatgatatttggaaaaagattgcaaatccttatgtgattcttgatgagattaaaactgctgctgtaaaaactgggtttgaaagtaattgtaaagctcacaatatcttgcttaatggaattcctcgttctgattttgatcgtctttctcattttgaaactgcacatgagatttggattgctttatacaattttcatctaggaacttcaaataacaaggaacttctcaaagatgttttcaaaaaagaatttacataaaaattgaggtgaaacatggagaggcaaagacgacctacatatccttgttcagttcggtgacttggagtaccagaaagttttccatggagaaggg

SEQ ID NO: 100682 - DNA, 1137 bp, Oryza sativa
  Clone ID: PAT_MRT4530_98375C.1
atgtcttcttcactccagtgccccgacgacccggcgccatccatgaacgtggaggccgtcctccacatgaaggaaggtgtcggcgagaccagttacgccaagaactctacgcttcagaagaagagcatggacaccgtgaagagcctcgtgacggagtccgcgagggacgtgtacgcgtcgctcaagccggaaaggttcaccctggccgacctcggctgctcgtcggggacgaacgctctcggcatggtggaggagatcgtcaggagcgtcgccgaggtgtgccgcgggtcgtcgccaccgccggagttctcggtgctcctcaacgacctccccaccaacgacttcaacaccatcttctcccgccttcccgagttcaccggcaagctcaaggccgacgccgacgccgacgccggcgacgacccgatggtgttcctgtccggcgtccccgggtccttctacgggaggctgttccccagcaagaatgtgcacttcgtctgctccttctccagcctgcactggctctctcaggttcctcccggtcttttggatgagacgaacgggcccgtgaacaaggggaagatgttcatatcgagcacgagccctccagccgtggcagcggcgtactcgaggcagttccggagagacttcagcctgttcctcaggtcacgcgccgccgaggtcgtcgccggcggccggatggtggtctccatgctcggcagggagggcgagcgccacgcggacaggaacacgaccctgctgtgggatctcctctccgagtcgttcgccgcgctggtgtcacagggggtggtggagcagggcaaggtggacgcgtacgacgcgccgttctacgcgccgtcgataggggagatcgaggaggaggtgcggcggcaggggtcgttcaggatggaggtcgcgcgggcgtacgaggcgagcctgagcggcagcggcgacgcgaggaaggacggaaggacggtgtcgatggcggtgagggccatccaggagtccatgctggggcaccacttcgggacggagatcgtcgacgcgctcttcgccaagtacaccgagctcgtcacggcgaccatggagagggaggaggtcaggagcgtccagattggagtggtcctcacgaggctgtga

SEQ ID NO: 100683 - DNA, 6019 bp, Oryza sativa
  unsure (1)..(6019): unsure at all n locations
  Clone ID: PAT_MRT4530_98376C.1
atggcggaggagctccccttccccgctaacatcgaagtgatgcgccacacgccgcggttcaagctcatgcaggcggcattccacggcgacctccgcggcttgaagcggcaggcgaagattctggatatggggaggggccgcctgaggaaggccgtagaggatgtgagggtggaaggcgtgccgggcgaggaaggtacaggggtgctgcatatggctgcctcccatggccacatggagatgtgcaagtacctggtcgaaacgcttcaggtggatgtggatgatgcggatgacaaagaaaattttaaaatagactctcttgtcagctgtttttttaacaaaaggttttggccaaatgcccaaacccataagggtggtttggcaaggcaatccacaccaggtagaacatctctacttaaggcggtacattctgggcatcggggaattgccaagtatcttcttaatcatgacgccaatccagacctagccatgtgctgtgggcttacccctctacattctgccgctggattaggtgattgtgagtccgtaaaactattgcttgcaaaaggagcttatgttgacccaatgtctacttttgggacaccacttcatcttgctgctaaagaagggcaggatggcaccatgaagatattgttggacaacaatgcagattgcaacaagatggtaaacggtataacacctctcctccttgctatgaaagctgcatcagcaaaatgtatggagctgctggttgaggctggagctgatgctacttactctgatgtcatctggaattatatgtcaactacttttatggatgatgaagatagtggttcatctgtgttctcggattctgaaccagaagagattgatgccaatcaccatattcccgtcaatgacaaacctgtgaatcgaaggaaaattgcagagtttaagtcgttagggcttgaggcagttgagaagaaggattatctttctgcagcaggattctacagtgagattccggttcctccgacgctccggtgtacttcgaaatagtcgccgaggttcctccagcagcaganaagagtttgagtatgtgtccgatggcgggttctccgaggagtaggcttcgtccgtgccgtcgaggatgcctgtggagtggtgttcccgctgccgttcaagtcaaggcttagctccagttatcttttgttttccgctgcatttctgtaagnttttataatgtttgtaagacgtggatctgtatgtcaacattgtcgtttgtgtaccccggctggtcctggacgggggttttaatacacattctgcttggaattctattcgggaatttctgggcgtgacaagggagctcttgagaagttaaaaatcgtatgaagggctctcgccagtcggcttcaaccatagctacgtcatgagtgtccgcatcttgagtagtatctctatgaggtacggtcggtgtataaaggtgttcgacgaaaacatctgagggcgccgtctcgcgcttggatccaaaattggcaagtctgtcggcggcttcattgttgtgtcgaagaacgtgactgagctcgagtccctcgaacttgtcttccaatttgcgcacctcttgtcgatatgccatcatattgtcgtcaatgcaggaccactctttcataacttggttgacaaccaactgtgaatcgcctcgaacaatcagacgctttatccctagggaaattgcaatccgtagtccatgaaggagggcctcatactcggcgacgttgtgggacgccgaaaaatgtatccaaagcacatagctcaatctttctccagttggggaaatcaaaaccactcctgctccagtgcccgaaagtcgtttggatccgtcaaaatgcatggtccagtgctccatgttctccgcgggggtatcctcctggcactcggtccattcggcgacaaaatcagctaacgcttgggacttgattgaaattcggggcttgaatgatatgtccaaagacatcaactccaaagcccacttagcaatacgtccgtttgcttcgcggttgtgcagtatatcaccgagtggaaatgatgtgaccaccgttaccgagtgaccttgaaagtagtgagatagcttcctggtagtaattagaataccatataacagcttctgaacctgagggtacctcgttttggagtcggctaggacctcgctgacaaaataaattggtcgctggactttttggacatggccttcttcctcgcgctcaacgaccaagactgtgctcacaacctgggaggtggctgatacatacagcaacaacggctcttgcgggtgtggtgaggctaagactggtggctcggtgaggagtttcttgaaatcttcgaaggccttctgtgcttcgggtccccactggaagttatctgttttcttcagcagcttaaagaaaggcatcccccgctcgccaagccttgaaacaaatcggctgagcgccgccatgcatccagtcggcttctgaacatctttctgggtacttggcggtttcatgttgaggatagcagtaactttctccgggttggcttggatgcccctatgagacaccataaaaccaagcagcttccctgacggtactccgaaggtgcacttttcagggtttaatttcatcctgaaagcgcggatgctcgcgaaggtttcttctagatccaaaatcaaatcatccttttgcttggtcttgacgactacatcatccacataggcttcaacgttgcggccaatttgtgttgagaagcatctctgaatcatacgttgataagttgctcctgcattttttagtccaaacggcatggtgacgtagcagtatgcaccaaaaggcgtgatgaatgaagtcttcaagcagtcggattccttcagtcggatctgatgataccccgagtagcaatccaaaaaactgagaagctcacagccggcggtcgagtcgactacctggtcaatgcgaggcaacccaaaaggatctttagggcaggatttgttgaggtcagtataatcaacgcacatgcgccattgccctgttttcttccgaactagaaccgggtttgccagccagtcgggatgaaggacttctttgatgaagcctgctgctaacagcttggttaattcctccttgatcgcgtctttcctgtcttgtgcaaatcggcggagtcgttgtttgataggtttggcatcttctttgacatgtaaggagtgctcaatcacctctctaggaataccgggcatatcagatggtttccacgcaaagatatctttattgttctctcgggcagacgccatctcgtgagtttgggccatgtcgcaactctccttgtcgcatgtgacggcttgcttgatgtcgctccgtagggataggactcctcggggaccaggcatcttcatcatcatgtaagtgtagtgcgggacggccatgaacttggctaacgccgggcgtccgagtatggcatggtatgctgtctcgaaatcggcgacttcaaagctgatgttctctgtgcggaagttttcccgagtgccaaaagtgactgggagggtgatctggccgagtggagttgcggataatcctggaattactccgtggaaaggcgcattgcttggttttagctcggagcgaggaatctgcatatcatccaaggtcttggcgaagaggatattgagtgcactgccaccgtcaatgagggttctgcgaagcttgacattacggaccactgggtctagtaccagggggtaccgccccgggtggaccactcggtcaggatgatccgagcggtcaaacttgattgcaatctctgaccaacgaagatactggggcgtgtcgggctgaacagcattgatctcccgttcagtcaacttctgcttccgtttagactcataagccagggggccgccgaagatatggttgagctccttgcggtgatcttgaaaacctgccggggtgtcgccgtcgtccttcttccttgacgtgctttgttcttcgtcagagttctttcgtgcagtcttggtgtattgatccgcaaattgcttgtagacgaaacaatctttggccacgtggttggagttaggatggtgcgggcattgggagttcatgatcttgtcgaacgtgttgacgcgcgaacgctgtcgagaagagtgactggcggttgcaacaagttccgcaggcttacgcttgcggtccttatgattgttacttccacctcctcccgtagccggcgtacccttgttttgcttccaactgggacccgactgctttgatgcggtgacggcgtcttcggctttggcgtactcgttggctttttcaaacataagcttgactgtcctggggggcttacgcccgaacttgccgaccaattcttcgtggcgaatccctttggtgaatgcggcgatgatgacgtcatcggtgatgtcggagatcttgttacgttgttcagaaaatcgccggatgtaatctcgaagggattctccggacttctgaatgacgttgtagaggtcgtattgtgtgccgggacgctcgaaggtgccttggaagttggcgatgaagtggtcgcttaattcagcccaagatccaattgtaccacggggcaatccatggagccaagatcgggcggaatctgctaaagccactggtaaatagttcgccatggccttgttgtctcctcctgcgtcgtacttctctattccagtcggcttgaagccggctggccaatccactcgacgcagatcgtcggtgaaggctgctactccgtcaaggtcgtcgtcgtggcggttcggcgaatgatgatggcctcgagctgctcggcgctgtatgattgtgtcgcgaagatcgacggggcggcgacgaggtggtgagcgaggccgttccactcggcgctccctatattggtcgggaggtgagtgaatggaccgctcgtcgtgacccctgctcctgcgattagatcctgcgccggtgatgctgaggcttggatgacggtagtcatgagatcggaagtgagggactcggctaccagtcggcgtgtggacgctttcggagttaactgggactgaagccgcaatcatggtcttcgtctggttcaagatgttgacgacgtggtcggattgattgagctcgttttggttgaggagggtgtcgagaagggtgatcgcggcaaccgcattctgttgaggggtgcggaaaaccggcgtcccttcaacatcttgctggccgatgagatcacgcgcccggcgccctgcttccaaagctcgctgccgtcgatcttcagcctccttcgcggtccgctcacgctcctgctgctcacgccgtaatcgttcttgttcttgtgcttgatgctcctcttccagtcggcggcgctcagtctcgcgacgcgcttcggtctcccgggcttggcgttgctcctccgtctcgttattggccatgaagacgccaaagtagagaggggtgtagttgtcatctaggcttccgtcgaagtcgtcgagatccggatcgtggtagcgagagctaaactcgtcgtactccacgatgttggtggggcgcgagtcgacggtgggagagctgtagtcgccatctagctgatccgtcgaaaccgtgccgagtggttggaggatgacgccaacttccctgaagctaggcgaaatcagtgttgaagccgacttccgcctaggcctacgggaagaagacgctgtcgcgatggagacggccaccaaatcgtcggggagcttcatcaggactggtgggtaagccccatcatcttgatctggtgtcgttggagaagatgcgatctcggccgagtggtttgaagccgactcggttgagatggttttgaagtagctttcagccgcgttcgggaatccaaacgggactgaaagccggttctctcccgactggtttgattccgagtcaaggagagagatcttgccgaagttgttggtgacgaagtcgaggctgccgaaccgaaacgtctgcccgggtgggaagacgaggtcgtcgatgccggagacggaacccat

SEQ ID NO: 100684 - DNA, 846 bp, Oryza sativa
  Clone ID: PAT_MRT4530_98377C.1
atggcatatcgacaagaggtacgcaaattggaagacaagttcgatggactcgagctcagtcacgttcttcgacacaataatgaagccgccgacagacttgccaattttggatccaagcgcgagacggcgccctcagatgttttcgtcgaacacctttatacaccgaccgtacctcataaagataccactcaagaagcagacactcgtgacatagctatggttgaagccgactggcgagagcccttcatacgatttttaacttctcaagagctccctcaagacaaagatgaagccgagcggatttcaaggcggagcaaactttacgttatgcacgaatctgagttatacaagaaaagcccttcaggatttctgcaacgctgcgtttctttagaggaagggagacaattgctgaaagacatacattctgggatatgcggaaaccatgctgccgcacgcaccattgtcggcaaagcttaccggcagggttgccagttttttgccagacaaattcatctaccagctcaagagttgcagaccatcccactgtcttggccgtttgcggtttgggggctcgacatggttggcccgtttaaaaaggcagtcggcggttacacgcacctctttgtggccattgacaaattctccaagtggattgaagctaaaccggttgtcacaatcacccagcagataacgctcgagacttcttcatcaacagtgtgcatagatttggagtgcccaatcggatcatcactgataatggcagacaattcactggcggagtttttcaagacttttgtgaggactttggaattaagatttgctatgcctcagtggcacatcccatga

SEQ ID NO: 100685 - DNA, 5970 bp, Oryza sativa
  Clone ID: PAT_MRT4530_98378C.1
atgggttccgtctccggcatcgacgacctcgtcttccctcccgggcagacgtttcggttcggcagcctcgacttcatcaccaacaacttcggcaagatttctctcctcgactcggaatcagaccagtcgggagagaaccggatttcggtcctgtttggattcccgaacgcggctgaaagctacctcaagaccatcttaaccgagtcggcttcaaaccactcggccgagatcgcatcttcttcaacgacaccagatcaagatgatggggcttacccaccagtcctgatgaagctccccgacgatttagcggccgtcttcaccacgacagcgtcttcatcccgtaggcctaggcggaagtcggcttcaacaccgatttcgcctagcttcagggaagtcggcgtcatcctccaaccactcggcacggtttcgacggatcagctggatgactacaacagctctcctaccgtcgactcacgtcctactgacatcgtggagtacgacgaatttagttctcgctacaacgacttcgacgacttcgacgacttcgacggaagcctagatgacaactacacccctctctactttggcgttttcatggccaataatgagacggaggagcaacgccaagcccgggagaccgaagaacgtcgccgactggaggaggagcatcaagcacaagaacaagaacggctacggcgtgagcagcaggaccgtgagcggatcgcgaaggaggctgaggatcgacgtcagcgagctttggaagcagggcgccgagcgcgtgatctcatcggccaacaagatgtcgaagggacaccggttttccgcacccctcaacagaatgcggttgccgcgatcacccttctcgacaccctcctcaaccaaaacgagctcaatcgatccgaccacgtcgtcaacatcttgaaccagacgaagaccatgattgcggcttcggtcccagttaactccgaaagcgtccacacgccgactggcagccgagtcccccacttccgatctcatgactactgtcatccaagcctcagcatcaccggcgccggatccaaccgcaggagcaggggacacgacgagcggtctgttcactcacctcccgaccttcatagggagcgccgagtggaacggcctcgctcaccacctcgtcgccgccccgtcgatcttcgcgacacaatcatacagcgccgagcagctcgaggccatcatcattcgccgaaccgccacgacgacgaccttgacggagtagcagccttcatcgacgatctgcgtcgagtggattggccagccggcttcaagccgactggaatagagaagtacgacggtaccactaatccagaatcgtggcttaccgtctacggtctcgcaatccgcgcagcaggaggagacaacaaagccatggcgaattatttaccagtggctttagcagattccgcccgatcttggctccatggattgccccgtggtacaattggatcttgggctgaattacgcgaccacttcatcgccaacttccaaggcaccttcgagcgtcccggcacacaatacgacctctacaacgttattcagaagtccggagaatcccttcgagattacatccggcgattttctgaacaatgcaacaagatctccgacatcaccgacgacgttatcatcgccgcattcaccaaagggattcgccacgaagaattggtcggcaagttcgggcgtaagccccccaggacagtcaagcttatgtttgaaaaagccaacgagtacgccaaagctgaagacgccgtcaccgcatcaaagcagtcgggtcccagttggaagcaaaacaagggtacgccggctacgggaggcggtggaagtaacaatcataaggaccgcaagcgtaagcctgcggaacttgttgcagccgccagtcactcttctcgacagcgttcgcgcgtcaacacgttcgacaagatcatgaactcccaatgcccgcatcatcctaactccaaccacgtggccaaagattgtttcgtctacaagcaattcgcggatcaatacaccaagactgcacggaagaactctgacgaagaacaaagcacgtcaaggaagaaagacgacggcgacaccccggcaggctttcaagatcaccgcaaggagctcaaccatatcttcggcggccccctggcttatgagtctaaacggaagcagaagttgactgaacgggagatcaatgctgttcagcccgacacgccccaatatcttcgatggtcagagatcgcaatcaagtttgaccgctcggatcatcctgaccgagtggtccacccggggcggtaccccctggtactagacccagtggtccgtaatgtcaagcttcgcagaaccctcatcgacggtggcagtgcactcaatatcctcttcgccaagaccctggatgatatgcagatccctcgctccgagttaaaaccaagcaatgcgccttttcacggagtgattccaggattatccgcatctccactcggccagatcaccctcccggtcacttttggcacgcgggaaaactttcgcacagagaatatcagctttgaagtcgccgatttcgagacagcataccatgccatactcggacgcccggcgctagccaagttcatggccgtcccgcactacacttacatgatgatgaagatgcctggtccccgaggagtcctatccctacggagcgacatcaagcaagccgtcacatgcgacaaggagagttgcgacatggcccaaactcgcgagatggcgtctgcccgagaggatatccgactggctgcagccacggcgagcgaaggagaaatacctgctaccaagacttcaaaaagtggagaaagcgaagccaagactaagaagattcccctagatccctctgatcctactaaaactgctaacaataaagatatctttgcgtggaaaccatctgatatgcccggtattcctagagaggtgattgagcactccttacatgtcaaagaagatgccaagcctatcaaacaacgactccgccgatttgcacaagacaggaaagatgcgatcaaggaggaattaaccaagctgttagcagcaggcttcatcaaagaagtccttcatcccgactggctggcaaacccggttctagttcggaagaaaacagggcaatggcgcatgtgtgtcgactatactgacctcaacaaatcttgccctaaagatccttttgggttgcctcgcattgaccaggtagtcgactcgaccgccggctgtgagcttctcagttttttggattgttactcggggtatcatcagatccgactgaaagaatccgactgcttgaagacttcattcatcacgccctttggggcatactgctatatcaccatgccgttcgggctaaaaaacgcaggagcaacctatcaacgcatgatccagagatgcttctcaacgcagatcggccgcaacgttgaagcctatgtggatgatgtagtcgtcaagaccaagcaaaaggatgatttgatctcggatctggaagaaaccttcgcgagcatccgtgctttcaggatgaaattaaaccctgaaaaatacatcttcggagtaccgtcagggaagctgcttggttttatggtgtctcataggggcatccaagccaacccggagaaagttactgctatcctcaacatgaaaccgccaagtacccagaaagatgttcagaagctgactggatgcatggcggcgctcagccgatttgtttcacgacttggcgagcgggggatgcccttctttaagctgctgaagaaaacagatgatttccagtggggacccgaagcacagaaggccttcgaagatttcaagaaactcctcaccgagccaccagtcttagcctcaccacacccgcaggagccgttgttgctgtatgtatcagccacctcccaggttgtgagcacagtcttggtcgttgagcgcgaggaagaaggccatgtccaaaaagtccagcgaccgatttattttgtcagcgaggtcctagccgactccaaaacgaggtaccctcaggttcagaagctgttatatggtattctaattactaccaggaagctatctcactactttcaaggtcactcggtaacggtggtcacatcatttccactcggtgatatactgcacaaccgcgaagcaaacggacgtattgccaagtgggctttggagttgatgtctttggacatatcattcaagccccgaatttcaatcaagtcccaagcgttagctgattttgtcgccgaatggaccgagtgccaggaggatacccccgcggaaaacatggagcactggaccatgcattttgacggatccaaacgactttcgggcattggagcaggagtggttttgatttccccaactggagaaagattgagctatgtgctttggatacatttttcggcgtcccacaacgtcgccgagtatgaggcccttcttcatggactacggattgcaatttccctagggataaagcgtctgattgttcgaggcgattcacagttggttgtcaaccaagttatgaaagagtggtcctgcattgacgacaatatgatggcatatcgacaagagcgcgagacggcgccctcagatgttttcgtcgaacacctttatacaccgaccgtacctcatagagatactactcaaaatgcggacactcataacgtagctatggttgaagccgactggcgagagcccttcatacgatttttaacttctcaagagctccctcaagataaagatgaagccgagcggatttcaaggcggagcaaactttatgttatgcatgaatctgagttatacaagaaaagcccttcaggaatcctgcaacgctgcgtatctttagaggaagggagacaattgctgaaagacatacattctgggatatgcggaaaccatgctgctgcgcgcaccattgtcggcaaagcttaccggcagggttttttctggcctactgcagtgtccgacgccgacaagattgtacgcacgtgcgaaggttgccagtttttcgccagacaaattcatctaccagctcaagagttgcagactatcccgctgtcttggccgtttgcggtttgggggctcgacatggttggcccatttaaaaaggcagtcggcggttacacgcatctctttgtggccattgacaaattctccaagtggattgaagctaaaccggttgtcacaatcacagccgataacgctcgagacttcttcatcaacattgtgcatagatttggagtgcccaatcggatcattactgataatggcacacaattcaccggtggagtttttaaagacttttgtgaagactttggaattaagatttgctatgcctcagtggcgcatcctatgagcaatggacaggtggagcgagccaatggtatgatacttcaagggattaaagcgcgtgtttttgaccggctaaaaccctatgccggcaaatgggtgcaacagctgccatcagtactttggtctttgcgaactacacccagtcgggccacaggccagtcaccttttttccttgtctatggggcagaagcaatgttgccgagtgaagttgaattcgagtctttgcgctttcgaaatttccgtgaagatcgctacgacgaggaccgagtggatgacttgaaccgattggaagaagttcgtgaagcagctttgattcggtcggctcgatacttacaagggttgcggcgttatcataatcgcaatgttcgatcccgtgcctttttagtcggcgacctggttttgaggaaaattcaaaccacacgagatcggcataagttatctcctttatgggaggggccatttatcatctctgaagtcacccggccaggttcctatcgactcaagcgcgaagacggtactctcgtcgacaactcttggaacattgaacatcttcgtcgttctatgcttaagctttatcattgtatttccctatcttga

SEQ ID NO: 100686 - DNA, 237 bp, Oryza sativa
  Clone ID: PAT_MRT4530_98379C.1
atggggatgctaccctccctactgttctggcttcccattccgcctgtcatgctggggcttgaggaggctgcggcgttgcggaagttgaaggagatcggtgggatgaactcaccagcgataggggtggcgcatcaaggcgtcaacgtcaacaggaacggtggtgtcatagaggccgaatgccttgtagagtgggcaggatgggaggcacggacgatagtgagggcagcacccccatag

SEQ ID NO: 100687 - DNA, 1864 bp, Oryza sativa
  Clone ID: PAT_MRT4530_9837C.1
ggggggaattgctccccgtgattccctctccctttcccccaaaatttccctccctctctcccttggattcgtttggaaacccctctcctaatcccgccggcgccattgatggagcccgagaacgccgcgccggtttccttccttttccggccgccctctctcgccccggccctatttaaaccctccccgcgcttcctccgtccgtttccgcctctcgccgcccttcctcctcgccggattcgagctcgcgacgtcgctctctctctccgccgtcgccgctgagctccggtccgccgccgtcgtcgccccggaccgcctcccacctcggcgccgcctccttcggcttcgccgcatcctcgccgacctcgtccacttctccgtttcggtcgccgaccgccggagcgccgctgtccccgtcgacccaagccgcgccaccgcctccctccgctccggccgcctcctccgtcgccgccatcgccccggggtgagccgtggaccgtcgcctcctttcccccttccctcccctctctcggccgccgcttcgccgcaccggtggtcgccggcggcgaccatcggggcgtgggcgcgccgcctcccgccgagtggctgccgcgtggggtccggccgtcagccgcccatgccctcgggtgcggctgacgcgtgggacccacggcgccggccggtgtgagcccgggtgcacctggtccaccgtggacccacctcggccatataaggaccggtcttcgggcctctgttgcaaagcactaccgtacttccacatgtctagtggggcaaatgaaggctacacgagctgtggcccggtagtcgagatgtcatggcacagggccggtgtcctgctgctaggggctcagtcctgcctacctgtcccggaggttccggccgtaggtggggttgggtcgatgtagacctctgatcagagtataacctattcgaatagccgcgccctcggttatgggcaagccgagcaatgtacccaagttagtattttaattcttaaaacctgcttaacattatcttccctcgttttggaactccgcggatggcgataagtgacggagggtctcatttcatcgataagaccttccgaaaatttttgcaagaacttggggacgatgaggtccccagtagccagctgcatgttgccatacgcctcgctgtgagcccgcttcgacggctccggtaactgttccaggcatcgggtggggttcctactgctgtggttgccagtggaggtccagctgggcatcagcacagccatagtgagatcacccacttccccatgatccttcttggcaattttcttagttgagatctctcttgctgtcccctttgctgccatggttgccaaacatggctggaagggccgctccccgtatccatgcagctgccgttctcgcaccacaattcctgaggctgagatccgctcttcggacaacattgccatagaagcagaggatgctggaggtggctgcatgtgatcgccagcttcatcttcacatcggccaccatcaatcacttccccatgagcttgtgcagccgccaacctccagatccacccgcctatcggcactgaaagggcagaggagaagcccaattccgatggatgttgcctgctgcttccatccacatgcccatggccatcttccacaccccaacgaggaagtgaaggcggcaacatcgagccacggcgccaaagtgcagtgcccccatggcggcggtcacctatgatcatgtggcgcttgcctccctcagcttggatgcgtggtggttggcgggggatgtggaagcgatagctcccaacagggcgctccgactccgatgaggagatccgggaaggggccat

SEQ ID NO: 100688 - DNA, 3036 bp, Oryza sativa
  Clone ID: PAT_MRT4530_98380C.1
atggcgaccccccggcaggttttcaagaccaccgcaaggagcttaaccacatcttcggtggcccccttggcttatgaatctaaaagaaagcaaaagttgaccgaacgggagattaacgctgttcagcccgacacaccccaatatcttcgatggtcagagacagcaatcaagtttgaccgctcggatcatcccgaccgagtggtccacccggggcggtaccccctggtactagacccagtggtccgtaatgtcaagcttcgcagaaccttcatcgacggtggcagtgcactaaatatcctcttcgccaaaaccttggatgacatgcagattcctcgctccgagttaaaaccaagcaatgcgccttttcacggagtcattccagggttatctgcaactccactcggccagatcacccttccggttacctttggcactcgggaaaacttccgcacggagaatatctgcttcgaagtcgccgatttcgagacagcgtaccacgccatactcagacgcccggcgttagccaagttcatggccgtcccacactacacttacatgatgatgaagatgcctggtccccgaggagtcctatccctacggagcgacatcaagcaagccgtcacatgcgacaaggaaagttgcgagatggcccagactcgcgagatggcgtctgcccgagaagatatccgactggctgcaaccacggcaagcgaaggagaagtgcccgcgaccaaggtctcaaagagcggagaaagcgaagctaagactaaaaagattcccctagatccttctgatcccactaaaactgctgtaataggcgccgaagaggtgattgagcactccttacatgtcaaagaagacgctaaacctattaaacaacgactccgccgcttcgcacaagacaggaaggacgcgatcaaggaggaattaaccaagctgttagcagcaggcttcatcaaagaagtccttcatcccgacaggctggctaacccggttctagttcggaagaaagctgggcaatggcgcatgtgtgtcgattataccgacctcaacaagtcttgccctaaagatccttttgggttgcctcgcattgaccaggagcaacttatcaacaaggatgatttaatctcggacctagaagaaacctttgcaagcatccgcgctttcaggatgaaactaaaccctgaaaaatgcaccttcggagtaccgtcagggaagctgcttggttttatggtgtctcgtagaggcatacaagccaacccggagaaagttactgctatcctcaacatgaaaccgccaagctcccagaaagacgtccagaagctgactggatgcatggcggcgctcagccgattcgtttcacgacttggcgagcgggggatgcccttcttcaaattaaagaaaacagacaatttccagtggggacccgaagctcagaaggccttcgaagatttcaagaaactcctcaccgagccaccagtcttagcctcgccacacccgcaggagccattgttactttatgtatcagccacctcccaggttgtgagcacagtcttggtcgttgagcgtgaggaagaaggccacgtccagaaagtccagcgaccgatctactttgtcagcgaggtcctagctaactccaaaacgagatatcctcaggttcagaagctgttatatggtattctgattactaccaggaaattatctcactacttccaaggtcactcggtaacggtggtcacatcgtttccgctcgtcgatatactgcacaaccgcgaagcaaacggacggattgctaaatgggctttggagttgatgtctttggacatatccttcaagccccgaacttcaatcaagctagccgacttcgtcgccgaatggaccgagtgccaggaggatacccccgcagaaaagatggagcactggaccatgcattttgacggatcaaaaaggctttcgggcactagagcgggagtggttttaatttccccaactggagaaagattaagttatgtgctttggatacatttttccgcatcccacaacgtcgcagagtatgaggcgctcctccatggactacggatcgcgatctccctagggatcaagcgtctaatagttcaaggcgattcacagctagtcgtcaaccaagttatgaaagagtggtcctgccttgacgacaacatgacggcatatcgacaaaaggcacgcaaattggaagacaacttcgatgggcttgagcttagtcacgttctccgacacaacaatgaagccaccgatagacctgccaactttggatccaagcgcgaggtggcgccctccgatgtattcgtcgaacacctttatgagccgaccgtacctcagaaagaaacaactcaagttgcggacactcatgacatagccatgattgaagccgactggagagagcccctcatacgatttttgacttctcaagaactcctccaagataaagatgaagccgagcggatttcaaggcgaagcaggctttatgttattcatgaagccgagttatacaagaaaagcccttcaggaattctgcaacgctgcgtatctctagaggaagggaggcaattgttgaaagacatacattctggaatatgcggaaaccatgccgccgcacgcaccattgtcggcaaagcttaccggcaggtcggcggttacacgcatctctttgtggccattgacaaattctccaagtggattgaggctaaaccggttgtcacaattacagcagataaagctcgagatttcttcatcaacattgtgcataggtttggagtgcctaatcggattatcaccgataatggcacacaattcactggcggagtttttaaagacttttgcgaagacttcggaattaagatttgctatgcctcagtagcgcatcccatgagcaatggacaggtcgaacgagccaacggcatgatacttcaagggataaaagcgcgagtttttgaccggctaaaaccctatgctggaaaatgggtggaacagctgccatcagtactttggtctttgtga

SEQ ID NO: 100689 - DNA, 252 bp, Oryza sativa
  Clone ID: PAT_MRT4530_98381C.1
atggcccagatctgcgtctcctccactggagttagcgaggagaaccgtggaggaggcggtggcggagtggaagagggcatggaggcggtgcacagtggagtgataggcgacggggtagatggcacggcgacagagcggcgggatgtcgccacggccggtgactgcgggtgcggcgacgacaaggagggcagcgtggctggcaatggtggagctttgaagtggtggcgacgggtgcaagagtgggtgctgtag

SEQ ID NO: 100690 - DNA, 5925 bp, Oryza sativa
  Clone ID: PAT_MRT4530_98382C.1
atgtttcggttcggcagcctcgacttcgtcaccaacaacttcggcaagatttctctccttgactcggaatcggaccagtcgggagagaaccggatctcagtcccgtttggattcccaaacgcggctgaaagctacttcaagaccatctcaaccgagtcggcttcaaaccactcggttgagatcgcatcttctccaacgacaccagatcaagatgatggggcttacccaccgatactgatgaagctccccgacgatttggcggccgtctccatcacgacagcgtctccttcccgtaggcctaggcggaagtcggcttcaacaccgatttcgcctagcttcagggaagttggcgtcatcctccaaccactcggctcggtttcgacggatcagctggatgactacaacagctcttccaccgtcgactcgcgtcccactgacatcgtggagtacgacgagtttagctctcgctacaactacgcggatcttgacgacttcgacggaagcctagatgacaattacacccctctctactttggcgtcttcatggccaataacgagacggaggagcaacgccaagcccgggagaccgaagagcgccgccgactggaggaggagcatcaagcacaagaacaagaacggttacggcgtgagcagcaggagcgtgagcggaccgcgaaggaggctgaggaccgacggcagcgagctttggaagcagggcgccgggcgcgtgatctcatcggccagcaagatgttgaagggacgccggtttttcgcacccctcaacagaatgcggttgccgcgatcaccctcctcgacaccctactcagggaaaacgagctcaatcaatctgatcacgtcgtcaacatcttgaaccagacgaagaccatgattgcagcttcggtcccagttaactccgagagcgtccacacgccgacgggcagccgagtcccccacttccgatctcatgactaccgtcatccaagcctcagcatcaccggcacaggatccaatcgcaggagcaggggacacgacgagcggtccgttcactcacctcccgatcatcatagggagcgtcgagtggaacggccccgctcaccacctcgtcgccaccccttcgatcttcgcgacacaatcatacagcgccgagcagctcgaggctatcatcactcgccggaccgccacgacgacgaccttgatggagtagcagccttcaccgacgacctgcgtcgagtggattggccagccggcttcaagccgactggaatagagaagtacgatggtaccactaacccagaatcgtggcttaccgtctacggtctcgcaatccgcgcagcaggaggagacagtaaggctatggcgaactatttaccagtggctttagcggattccgcccgatcttggctccatggattgccccgtggtacgattggatcttgggccgagttacgcgaccacttcatcgccaacttccaaggcaccttcgagcgtcccggcacacaatacgacctctacaacgtcattcagaagtccggggaatcccttcgagattacatccggcgattttctgaacaacgtaacaagatctccgacatcaccgacgacgtcatcatcgccgcattcaccaaagggattcgccacgaagaattggtcggcaagttcgggcgtaagcctcccaggacagtcaagctcatgtttgaaaaagccaacgagtacgccaaagctgaagacgccgtcatcgcatcaaagcagtctggtcccagttggaagccaaaaaaggatacgccggctacgggaggaggtggaagtaacaatcataaggaccgcaagcgtaagcctgcagaacttgttgcaaccgccagtcactcttctcgacagcgttcgcgcgtcaacacgttcgacaagatcatgaactcccaatgcccgcaccatcctaactccaaccacgtggccaaagattgtttcatctacaagcaatttgcggatcaatacaccaagaccacacggaagaactccgacgaagaacaaagcacgtcgaagaagaaagacgacggcgacgccccggcaggatttcaagaccaccgcacggagctcaaccatatcttcggcggccctctggcttatgagtctaaaaggaagcaaaagttgaccgaacgggagatcaatgctgttcagcccgacacgccccaatatcttcgatggtcagagatcgcaatcaagtttgaccgctcggatcatcctgaccgagtggtccacccggggcggtaccccctggtactagacccagtggtccgtaatgtcaagcttcgcagaaccctcatcgacggtggcagtgcactcaacatcctcttcgccaagaccctggatgatatgcagattcctcgctccgagctaaaaccaagcaatgcgccttttcacggagtaattccaggattatccgcaactccactcggccagatcaccctcccggtcacttttggcactcgggaaaatttccgcacagagaacatcagctttgaagtcgctgatttcgagacagcataccatgccatactcggacgcccggcgttagccaagttcatggccgtcccgcactacacttacatgatgatgaagatgcctggtccccgaggagtcctatccctacggagcgacatcaagcaagccgtcacatgcgacaaggagagttgcgacatggcccaaatccgcgagatggcgtctgcccgagaggatatccgactggctgcagctacggcgagcgaaggagaaatacctgctaccaagacttcaaaaagtggagaaagcgaagccaagactaagaagattcccctagatccctctgatcctactaaaactgctaacaataaagatatctttgcgtggaaaccatctgatatgcccggtattcctagagaggtgattgagcactccttacatgtcaaagaagatgccaagcctatcaaacaacgactccgccgatttgcacaagacaggaaagacgcgatcaaggaggaattaaccaagctgttagcagcaggcttcatcaaagaagtccttcatcccgactggctggcaaacccagttctagttcggaagaaaacagggcaatggcgcatgtgtgttgattataccgacctcaacaaatcctgccctaaagatccttttgggttgcctcgcattgaccagatccgactgaaagaatccgactgcttgaagacttcattcatcacgccctttggggcatactgctacgtcaccatgccgttcggactgaaaaacgcaggagcaacttatcaacgcatgatccagagatgtttctcaacacagattggacgcaacgttgaagcctatgtggatgatgtagtcgtcaagaccaagcaaaaggatgatttgatctcggatctagaagaaaccttcgcgagcatccgtgctttcaggatgaaattaaaccctgaaaagtgcaccttcggagtaccgtcagggaagctgcttggttttatggtgtctcataggggcatccaagccaacccggagaaagttaccgctatccttaacatgaaaccgccaagtacccagaaagatgttcagaagctgactggatgcatggcggcgctcagccgattcgtttcaagacttggcgagcgggggatgcccttctttaagctactgaagaaaacggatgatttccagtggggacccgaagcacagaaggccttcgaagatttcaagaaattcctcaccgagccaccagtcttagcctcaccacacccgcaggagccgttgttgctgtatgtatcagccacctcccaggttgtgagcacagttttggtcgttgagcgcgaggaagaaggccatgtccagaaagtccagcgaccaatttactttgtcagcgaggtcctagccgactccaaaacgaggtaccctcaggttcagaagctgttgtatggtattctaattactaccaggaagctatctcactactttcaaggtcactcggtgacggtggtcacatcgtttccactcggtgatatactgcacaaccgcgaagcaaatggacggattgctaagtgggctttggagttgatgtctttggacatatcattcaagccccgaatttcaatcaagtcccaagcgttagctgattttgtcgccgaatggaccgagtgccaggaggatacccccgcagagaagatggagcactggactatgcattttgacggatcaaagcgactttcaggcactggagcaggagtggttttgatttccccaactggagaaagattaagctatttactttggatacatttttcggcgtcccacaacgtcgccgagtttgaggccctccttcatggactgcggattgcaatttccctagggataaagcgtctaatagttcgtggcgattcacagctggttgtcaaccaagttatgaaagagtggtccttccttgacgacaatatgatggcatatcgacaagaggtacgcaaattggaagacaagttcgatggactcgagctcagtcacgttcttcgacacaacaatgaagccgccgacagacttgccaattttggatccaagcgcgagatggcgccctctgatgttttcgtcgaacacctttatgcgccgacagtacctcacaaagatactactcaagttgcgggcactcatgatgtagctatggttgaagccgactggcgagagcccctcatacgatttttgacttctcaagaactccctctagacaaagatgaagccgagcgaatttcaaggcggagcaaactttatgttatgcatgaagctgagttatacaagaaaagcccttcaggaattctgcaacgctgcgtatctttagaggaagggagacaattgctaaaagacatacattctgggatatgcggaaaccacgctgctgcacgcaccattgtcggcaaagcttaccggcagggttttttctggcctactgcagtgtccgacgccgacaaaattgtgcgcacgtgcgaaggttgccaatttttcgccagacaaattcatttaccagctcaagagttgcaaactattccgctgtcttggccgtttgcggtttgggggctcgacatggttggcccgtttaaaaaggcagtcggcggttacacgcatctctttgtggccattgacaaattctccaagtggattgaagctaaaccagttgtcacaatcacggcagataacgctcgagacttcttcatcaacattgtgcacagatttggagtgcccaatcggattatcactgataatggcacacaattcactggcggagtttttaaagacttttgcgaggactttggaattaagatttgctatgcttcagtggcacaccccatgagcaatggacaggtggagcgagccaatggcatgatacttcaagggattaaagcgcgtgtctttgaccggctaaaaccctatgctggcaaatgggtgcaacagctgccatcggtgctttggtctttgcgaactacacccagtcgggccacaggccaatcaccttttttccttgtctatggggcagaagcaatgttgccgagtgaagttgaattcgagtctttgcgctttcgaaatttccgtgaagaacgctacgaagaggatcgagtggatgacttgcatcgattggaagaagtccgcgaagcagctttgattcgctcggctcgatacttacaagggttgcggcgttatcataatcgcaatgttcgatcccgtgcctttttagtcggcgacctggttttgcggaaaattcaaactacacgagatcggcacaagttatctcctttatgggaggggccatttattatctctgaagtcacccggccaggctcctatcgactcaagcgcgaagacggtactctcgtcgacaactcttggaacattgaacatcttcgtcgtttctacgcttaa

SEQ ID NO: 100691 - DNA, 357 bp, Oryza sativa
  Clone ID: PAT_MRT4530_98383C.1
atggacggcggaggcgaggcagagcacgggagtggcggcaacggtgaggaggcgaatgggagaggaaaggaagggagggggaagacgggtttaaatgggcggcaatgtcggctgcggcgccctccggtgaaggcggcagcagcgaccgcacgctcccctccaccagatcccggggggaggggaggcggtgacccggcggcggcggccgtgggtagccgtgtcggcagtggtggtggagactggcgcaggcgaggtggcggccaatggcagccgccggatccggcgacaacggtggcgctacttgtggaggaggctggcccgggcgaggcggcgaccggtcgacaagagacttgttga

SEQ ID NO: 100692 - DNA, 231 bp, Oryza sativa
  unsure (1)..(231): unsure at all n locations
  Clone ID: PAT_MRT4530_98384C.1
atggagctggcttcttgtggtggcgtcggctgcgtcgccgtcttcagctgggaggccgccgccctgcttcttgcgtcggctgcggcggcttcctgtgtcccttgctggctgttctgttgtcgcccggagctcgccgctcgtgatnttcacttccccatccacggtttgttgttcgggttgagctctcgctcctcagatttgacgacggactccgtggacatctcttgctga

SEQ ID NO: 100693 - DNA, 4947 bp, Oryza sativa
  Clone ID: PAT_MRT4530_98385C.1
atgggttccatctccggcatcgacgacctcgtcttcccacccgggcagacgtttcggttcggcagcctcgacttcgtcaccaacaacttcggcaagatttctctcctcgactcggagtcagaccagtcgggagagaaccggatttcggtcccgtttggattcccgaacgcggctgaaagctacttcaagaccatcttaaccgagtcggcttcaaaccactcggccgagatcgcatcttctccaacgacaccagatcaagatgatggggcttacccaccagtcctgatgaagctccccgacgatttagcggccgtcttcaccacgacagcgtcttcatcccgtaggcctaggcggaactctcccaccgtcgactcacgtcctactgacatcgtggagtacgacgaatttagttctcgctacaacgacttcgacgacttcgacgacttcgacggaagcctagatgacaactacacccctctctactttggcgttttcatggccaataatgagacggaggagcaacgccaagctcgggagaccgaagaacgtcgccgactggaggaggagcatcaagcacaagaacaagaacggctacggcgtgagcagcaggaccgtgagcggaccgcgaaggaggctgaggatcgacgtcagcgagctttggaagcagggcgccgagcgcgtgatctcatcggccagcaagatgtcgaagggacaccggttttccgcacccctcaacagaatgcggttgccgcgatcacccttctcgacaccctcctcaaccaaaacgagctcaatcaatccgaccacgtcgtcaacatcttgaaccagacgaagaccatgattgcggcttcggtcccagttaactccgaaagcgtccacacgccgactggcagccgagttccccacttccgatctcatgactaccgtcatccaagcctcagcatcaccggcgcaggatccaaccgcaggagcaggggtcacgacgagcggtctgttcactcacctcccgaccttcatagggagcgccgagtggaacggcctcgctcaccacctcgtcaccgccccatcgatcttcgcgacacaatcatacagcgccgagcagctcgaggctaccatcactcgccggaccgccacgacgacgaccttgacggagtagcagccttcaccgacgacctgcgtcgagtggattggccagccggcttcaagccgactggaatagagaagtacgacggcaccaccaaccccgaatcgtggcttaccgtctacggtctcgcgatccgcgcagcaggaggagacagcaaggccatggcgaactatttaccagtggctttagcggattccgcccgatcttggctccatggattgccccgtggtacaattggatcttgggccgaactacgcaaccacttcatcgccaacttccaaggcaccttcgagcgtcccggcacacaatatgatctctacaacgtcattcagaagtccggagaatcccttcgagattacatccggcgattttctgaacaacgtaacaagatctccgacatcaccgacgacgtcatcatcgccgcgttcaccaaaggaattcgccacgaagaactagtcggcaagtttgggcgtaagcctcccaggacagtcaagcttatgtttgaaaaagccaacgagtacgccaaagctgaagacgccgtcaccgcatcaaagcagtcgggccccagttggaagcaaaacaagggtatgccggctacgggaggtggtggaagtaacaatcataaggaccgcaagcgtaagcctgcggaacttgttgcaaccgccagtcactcttctcgacagcgttcgcgcgtcaacacgttcgacaagatcatgaactcccaatgcccgcaccatcctaactccaaccacgtggccaaagattgtttcgtctacaagcaattcgcggatcaatacaccaagactgcacggaagaactctgacgaagaacaaagcacgtcgaggaagaaagacgacggcgacgccccggcaggatttcaagaccaccgcaaggagctcaaccatatcttcggcggccccttagcttatgagtctaaacggaagcagaagttgactgaacgagagatcaatgctgttcaacccgacacgccccagtatcttcgatggtcagaaatcgcaattaagtttgaccgctcggatcatcctgaccgagtggtccacccggggcggtaccccctggtactagacccagtggtccgtaatgtcaagcttcgcagaaccctcatcgacggattatccgcaactccactcggccggatcaccctcccggtcactttcggcactcgggaaaactttcgcacagagaatatcagctttgaagtcgccgatttcgagacagcataccatgccatactcggacgcccggcgttagccaagttcatggccgtcccgcactacacttacatgatgatgaagatgcctggtccccgaggagtgctatccctacggagtgacatcaagcaagccgtcacatgcgacaaggagagttgcgacatggctcaaacccgcgagatggcgtctgcccgagaggatatccgactggctgcagccacgacgagcgaaggagaaatacctgctaccaagacttcaaaaagtggagaaagcgaagccaagactaagaagattcccctagatccctctgatcctactaaaactgctgtaataggcgccgaagaggtgattgagcactccttacatgtcaaagaagatgccaagcctatcaaacaacgactccgccgattcgcacaagacaggaaggacgcgatcaaggaggaattaaccaagctgttagcagcaggcttcatcaaagaagtccttcatcccgactggctggcaaacccgattcgactgaaggaatccgactgcttgaagacttcattcatcacgccctttggagcttattgctatgtcaccatgccgttcggactaaaaaacgcaggagcaacttatcaacgtatgatccaaagatgcttctcaacgcagatcggccgcaacgttgaagcctatgtggatgatgtagtcgtcaagaccaagcaaaaggatgatttgatctcggatctagaagaaaccttcgtgagcatccgtgctttcaggatgaaattgaaccctgaaaaatgcaccttcggagtaccgtcagggaagctgcttggttttatggtgtctcataggggcatccaagccaacccggagaaagttactgctatcctcaacatgaaaccgccaagtacccagaaagatgttcagaagctgactggatgcatggcggcgctcagccgatttgtttcaagacttggcgagcgggggatgcccttctttaagctgctgaagaaaacagataacttccagtggggacccgaagcacaaaaggccttcgaagatttcaagaaacttctcaccgagccaccagtcttagcctcaccacacccgcaggagccgttgttgctgtacgtatcagccacctcccaggttgtgagcacagtcttggtcgttgagcgcgaggaagaaggccatgtccaaaaagtccagcggccgatttattttgtcagcgaggtcctagccgactccaaaacgaggtaccctcaggttcagaagctgttatatggtattctaattactaccaggaagctatctcactactttcaaggtcactcggtaacggtggtcacatcatttccactcggtgatatactgcacaaccgcgaagcaaacggacgtattgctaagtgggctttggagttgatgtctttggacatatcattcaagccccgaatttcaatcaagtcccaagcgttagctgattttgtcgccgaatggactgagtgccaggaggatacccctgcggagaacatggagcactggaccatgcattttgacggatccaaacgactttcgggcactggagcaggagtggttttgatttccccaactggagaaagattgagctatgtgctttggatacatttttcggcgtcccacaacgttgccgagtatgaggccctccttcatggactacggattgcaatttccctagggataaagcgtctgattgttcgaggcgattcacagttggttgtcaaccaagttatgaaagagtggtcctgcattgacgacaatatgatggcatatcgacaagaggtgcgcaaattggaagacaagttcgagggactcgagctcagtcacgttcttcgacacaacaatgaagccgccgacagacttgccaattttggatccaagcgcgagacggcgccctcagatgttttcgtcgaacacctttatacaccgaccgtacctcataaagatactactcaagatgcggacactcatgacatagctatggttgaagccgactggcgagagcccttcatacgatttttaacttctcaagagctccctcaagataaagatgaagccgagcggatttcaaggcggagcaaactttatgttatgcatgaatctgagttatacaagaaaagcccttcaggaattctgcaacgctgcgtatctttagaggaagggagacaattgctgaaagacatacattctgggatatgcggaaaccatgctgctgcacgcaccattgtcggcaaagcttaccggcagggttttttctggcctactgcagtgtccgacgccgacaaaattgtgcgcacatgtgaaggttgccaatttttcgccagacaaattcacttaccagctcaagagttgcaaactatcccgctgtcttggccgtttgcggtttgggggctcgacatggttggcccgtttaaaaaggcagtcggcggttacacgcatctctttgtggccattgataaattttccaagtggattgaagctaaaccggttgtcacaatcacagcagataatgctcgagacttcttcatcaacatttggcacaccccatga

SEQ ID NO: 100694 - DNA, 201 bp, Oryza sativa
  Clone ID: PAT_MRT4530_98386C.1
atggagctggcttcttgtggtggcgtcggctgcgtcgccgtcttcagctgggaggccgccgccctgcttcttgcatcggctgcggcggcttcctggtttgttgttcgggttgagctctcgctcctcagatttgacgacggactccgtggacatctcttgctgagcccggggatgcttactccaaaatctatggctcagtag

SEQ ID NO: 100695 - DNA, 410 bp, Oryza sativa
  Clone ID: PAT_MRT4530_98387C.1
atctggtcgatcgcccataaccgcgggcacagctattcgaatagttttactctggccagaggtgcacaactgtacccacaagacacaatccaccagcatgtcaccgcgccaggcctgacacgtcaccatgtcgagtgattgtgacaagacccttcgcataaccctcccctaaccatccacaccacgctaaggtttcacccccaccctcccaccccctaccccagaggtgggcagtcccctcgtgcaccgcggtgaatccggcagttggacaaccggacaccccggccgacccaactccatcacacccaccctcgccaccggtgcctaggaaagggtcgagctatacttcagatcaagcagttacccactcccgcttgtggtaagcattgtaagtcttccagggtttcccg

SEQ ID NO: 100696 - DNA, 222 bp, Oryza sativa
  Clone ID: PAT_MRT4530_98388C.1
atgctcccgcaacttggccggctacatccgaatccaccacgtgataaatactattttgacagcagcagaaagggcaactggccaacacctaagacacgaggaacagattgtggcatcgtagtctttgatatcgagctaccggtgtttgtaattggtgactcatgcaacccaccatctactgaagaggttcttgaacactcctacaatgcagaagacaactga

SEQ ID NO: 100697 - DNA, 744 bp, Oryza sativa
  Clone ID: PAT_MRT4530_98389C.1
tcagcaagagatgtccacggagtccgtcgtcaaatctgaggagcgagagctcaacccgaacaacaaaccgtggatggggaagtgaaaatctgcaaagcatgactgatagaaccatggcattggaagcacatgttcaggcaccagagaaaccgccgccacaacgctgacgggctgtcgcccgcaccacgagcggcgagctccgggcgacaacagaaccagccagcaagggacacaggaagccgccgcagccgacgcaagaagcagggcggcggcctcccagctgaagacggcgacgcagccgacgccaccacaagaagccagctccatccatcaaattgcccactgatcttcggatcttgcacttccaccgccaccaaccaacacctccgccgaccactccggcacccggatcacccagccgtggggatcagccacgttgggagacctccaagctttcatgacaaggcatttccaaagccgacacaggtttaccatatgccgacgagaggggtcccagaccaacaacaggttaggtcccagaccatactgtgccagtgtcacacccaccgtcgtgatcgccaagtcgccgccgttctcgtccgctccttcgccgccgccgaagaccgccggagcaccgccgttggtgccttccgttcgcgccgccgtgccgtcgttcgccggcgagcatgcaagcccgagccgccgagccgccgccgccggtggtgacgtcatcgccgacgtcat

SEQ ID NO: 100698 - DNA, 3797 bp, Oryza sativa
  Clone ID: PAT_MRT4530_9838C.1
atgccgcgctacaagcctgagtatttgtttggtgttgagggatttgtccaggagttgcgtacgatgtcttttgtcattggatttgggactgcccctttttatgcccagattcctcatgatcgtcatgaagagaagtgccgagtcaaagtcaccttgaacagtaatagcgaagatattccctcagtgatgttcgaagctggaggaagaaactacatccatgcatgtcaggaggtggcaaggatcgccataggagagcttcgcgatcgctacagtgatcagttggccgacacggagtatcgctaccatcctcgccaaccccagggaagtgaccgtggcagataccttgagactgaaggaattgagaatgatgctaccacaaggcatttggttgagatgctgtgggctatggatgaaagccttgcggagactgtgttagcagctcaagatcgtgaagaccggaatcgtggtaagatttgcaagttagaggacaaggtggatcgtttggagaaggaattagctgcgttgaagggagaagcaccgccgcagaaggccaggattcgtcttaccgcaaggaagagagctttatttgttcctcactatcaattggcgccaaaggtttgtgtggtggagaaagaagttaccccagctctagcggatcctccggtcatcatcataagtgacgatgaagaagaagaatccaagcgcacccattccaagattgagtgggtagcaactcaagatgatgaagacgagccgaacgagccttcaatcgacctccgatgctcggaagaactagagtgactttttcccccggtttctcctcttgtgccctgttcatgccagatggtgaacactcgtagcaacgggaatggccccagtaacaataacaacaacaatggagagaatcccacacttgctcaagttcttgctcaacagactcagttaatgaacatgatgatgcagcaacttcagaaccagcagaaccaaggaaataaccatgcacttccccagaacacgttagcagaatttcttcgtgtgaggccgcctattttttctagtaccacaaatcctgttgaagctggtgattggctgcataccatagagaagaagttggatttgcttcagtgcaccgatcaggagaaggtctcatttgcatcacacaagttgcatggccctgcctctgaatggtgggatcacttccgcctgaataggactaccgctgaacctatcacttggcttgagttcaccgctgctttccggaagacgcatataccatcgggagtggtgtctctcaagaagaaggagttcaggttgctcacccagggatctcgctctgttacggagtatctgcacgagttcaatcgtcttactcgttatgctccggaagatgtgcgcaatgatgaagagcgccaggagaagttcttggaaggacttaatgatgagctttcttacccactcatgactggagattattatgatttccagaagttagtggataaggctattcgccaggaggacaagtacaatcgcatggagcaaaagaaacgccggattgctcaattcaagacacaacaggggaataatcagaagccacgtcttactttaggaccccagtctatgccacagggaggttcttcgtctgttgttcgtccgcagcgtcagttcttcaacaacaatgctggcaacaacatccgcaatcaagctctacgtcctgttgcagtttcgacacagcaacaacctgccaagaaggagcaaggcagcaagcccgtggtgtgtttcaattgtggagacccaggacattacgctgacaagtgtccgaagccccgacgcgtgaaggttgtccctgcccagagcaactctaccgcaccagcatcaaaggcccgtgtcaatcatgttgctgctgcagaagctcaagatgctccagatgtgattttggtgaagttccttggtcacgtcatctcagcgggaggagttgccgttgatcctagtaatgtggaatccgtaaccaactggaaacaaccgaagacagtttcagagattcgcagtttcctaggcctcgcaggatattaccggaggtttatagagaatttttccaagattgctaagcccatgacacgactgcttcagaaagatgtgaagtacaagtggtcagaagaatccttagaagcgaagcccactctaattgatcaagttagagaagcccaaattaatgatcctgatattcaagagatcaagaagaatatgagaagaggaaaagctatcagtttcttggaagatgagcaaggaactgtatggttgggtgaaagaatctgcgtccccgacaacaaagatttaaaagatgcaattctgaaagaagctcatgataccttatactccattcaccctggtagtaccaagatgtaccaggatctcaaggaaagattttggtgggcaatcatcgtcgtcgctcgggaagaccgccatcgtgctcgccaagtcgtcgccgtcctcgtctgccgcttcgccaccgtcggagaccgccggagcatcgtcgccgtcatcaagccgaagagcgccgccatttcaacctcgtcgccgtcgccgtccgttggtcttccgccgtcgctttggtcgccggaaggtgcgctgcggtggattgtgttatgcaaggggtattgtcacaactcctttccgaggtaccgtggtggtattgaggcacatggtgacatgataggcaagcgagtggtgcggcagttggcaagcgtgacgaggggtgtgcagcgagggcagtgcagcagccacggcggccggcgagtgcccgatgagcgcattgagctggcaaccacgatgaggggatcggagcactactacagaaggcctaaatggtgccggttgagaaaccccctaagaaaaacaacacatcaagaacacatccatcaagaatacaacaagaagaatacattcatcaagaaccggatggagaggaggagggcgccactgccttctccaccgccacagacgtctccactgccaccgccgtcgtcggatggagaggaggagggcgccgctgtcttctccaccaccaccactaccactgtcgcgggaagccgctgtcgccacctcccgggctatcggaccaccgccgcctcccctcccatcgccaagccgccacagccacctcccctcccgccagatctggcggaggggagggcgccgccgctgggccatcggaccaccgccgcctccgctcccgccgtcgagccgccgcagagccaccgccgccacctcctctcccgccagatctagtggaggggagggcgccgccgccacctcccgggccgtcggaccaccgccgcctcccctcccgctgccgcacgacgttgcagcagccgcctctggatccaaaaaaaaacccctaaccctaaagctgccgccgccgccctcctcacggtcgtcatcgtcgtcgtcgccgtcgccgtctgagcccgcccacccgtcgccacctccacgggatccaggtgggggacggccgctaccgccagatccggtcggggggcagccgcctccaccagatccgggtggggggcggtcgtccgccgtcgtgcgcccgctactcccgccttccaccgagcccgtcgctcccagtcaccaccaagcccgccgttcccgcccaccgctctccatcgcctagcaccgctgcgtgcccgtcgccgagccgcgcgtcgctgtgctgggagaagtgcgatggcggggcgactgttgtgcaagaagttcatgagattgggatgcggctgatgacgctgatctctggtcattag

SEQ ID NO: 100699 - DNA, 5955 bp, Oryza sativa
  Clone ID: PAT_MRT4530_98390C.1
atgggtcctttctccggcatcgacgacctcgtcttcccacccgggcagacgtttcggttcggcagcctcgacttcgtcaccaacaacttcggcaagatttctctccttgactcggaatcggaccagtcgggagagaaccggatctcagtcccgtttggattcccaaacgcggctgaaacctacttcaagaccatctcaatcgagtcggcttcaaaccactcggccgagatcgtaccttctccaacgacaccagatcaagatgatggggcttacccaccagtcctgatgaagctccccgacgatttagcggccgtcttcaccacgacagcgtcttcatcccgtaggcctaggcggaagtcggcttcaacaccgatttcgcctagcttcagggaagtcggcgtcatcctccaaccactcggcacggtttcgacggatcaactagatgactacaacagctctcccaccgtcgactcacgtcctactgacatcgtggagtacgacgaatttagttctcgctacaacgacttcgacgacttcgacggaagccttgatgacaactacacccctctctactttggcgttttcatggccaataatgagacggaggagcaacgccaagcccgggagaccgaagaacgtcgccgactggaggaggagcatcaagcacaagaacaagagcggctacggcgtgagcagcaggaccgtgagcggatcgccaaggaggctgaagatcgacgtcagcgagctttggaagcagggcgccgagcgcgtgatctcatcggccaacaagacgtcgaagggacaccggttttccgcacccctcaacagaatgcggttgccgcgatcaccctcctcgacaccctcctcaaccaaaacgagctcaatcgttccgaccacgtcgtcaacatcttgaaccagacaaagaccatgattgcggcctcggttccagttaactccgaaagcgtccacacgccgactggcagccgagtcccccacttccgatctcatgactaccgtcatccaagcctcagcatcaccggcgcaggatccaaccgcaggagcaggggtcacgacgagcggtctgttcactcacctcccgactttcatagggagcgccgagtggaacggcctcgctcaccacctcgtcgccgccccatcgatcttcgcgacacaatcatacagcgccgagcagctcgaggctaccatcactcgccggaccgccacgacgacgaccttgatggagtagcagccttcaccgacgacctgcgtcgagtggattggccagccggcttcaaaccgactggaatagagaagtatgacggcaccactaaccctgaatcgtggcttaccgtctacagtctcgcaatccgcgcagcaggaggtgacaacaaggccatggcgaactatttaccagtggctttagcggattccgcccgatcttggctccatggactgccccgtggtacgatcggatcttgggccgaattacgcgaccacttcattgccaacttccaaggcaccttcgagcgtcctggcacacaatatgatctttacaacgttatccagaaatccggagaatcccttcgagagtatatccgacgattttctgaacaacgtaacaagatctccgacatctccgacgacgtcatcatcgccgcattcaccaaagggattcgccacgaagaattggtcggcaaatttgggcgcaaacctcccagaacagtcaagctcatgtttgaaaaagccaacgagtacgccaaagccgaagacgccgtcaccgcatcgaagcagtcgggtcccagttggaaaccgaaaaatacgccggctacgggaggaggtggaagtaacaatcataaggaccgcaagcgtaagcctgaggaacttgttgcgaccgccgctcactcttctcgacagcgttcgcgcgtcaacaccttcgacaagatcatgaactcccaatgcccgcatcacccaaactccaaccatgtggccaaagagtgcttcatctacaagcagttcgcggagcagtacaccaagtctactcggaagaactccgacgaagagcaaagcacgtccaggaagaaggatgacggcgacaccccggctggatttcaagaccaccgcaaggagctcaaccatattttcggcggccccatggcttatgagtctaaacggaagcaaaagttgactgaacgggagatcaatgctgttcagcccgacacgccccagtatcttcgatggtcagagattgcaatcaagtttgaccgctcggatcatcctgaccgagtggtccacccggggcggtaccccctggtactagacccagtggtccgtaatgtcaagcttcgcagaaccctcattgatggcggcagtgcactcaatatcctcttcgccaagaccttggatgatatgcagattcctcgctccgagctaaagccaagcaatgcgccttttcacggagtaattccaggattatccgcaactccactcggccagatcactcttccggtcactttcggcactcgggaaaacttccgcacggagaatatcagctttgaagttgccgatttcgagacagcataccatgccatactcggacgcccggcgttagccaagttcatggccgtcccgcactacacgtacatgatgatgaagatgcctggtccccgtggagtcctatccctacggagcgacatcaagcaagccgtcacatgcgacaaggagagttgcgacatggcccaaacccgcgagatggcgtctgcccgagaggaaatccgactggctgcaaccacggtgagcgaaggcgaagtgcccgctgccaagatttcaaaagatatctttgcgtggaaaccttcggatatgcccggtattcccagagaggtgattgagcactccttacatgtcaaagaagacgccaagcctattaaacaacgactccgccgatttgcacaagataggaaggacgcgatcaaggaggaattgaccaagctgttagcagcaggcttcatcaaagaagtccttcatcccgactggctggctaacccggtcctggttcggaaaaagacaggacagtggcgcatgtgtgttgattataccgacctcaacaagtcttgtcccaaagatccttttgggttgcctcgcattgaccaggtagttgactcaaccgccggctgtgagcttctcagttttttggactgctactcggggtatcatcagatccgactgaaggaatccgactgcttgaagacttcattcatcacgccttttggtgcatactgctacgtcaccatgccgtttggactaaaaaatgcaggagcaacttatcaacgtatgattcagagatgtttctcaacacaaattggccgcaacgttgaagcctatgtggatgatgtagtcgtcaagaccaagcaaaaggatgatttgatctcggatctagaagaaacctttgcaagcatccgtgctttcaggatgaaattgaatcctgaaaagtgcaccttcggagtaccgtcagggaagctgcttggttttatggtgtctcataggggcatccaagccaacccggagaaagttactgctatcctcaacatgaaaccgccaagcactcagaaagatgttcagaagctgactggatgcatggcggcgctcagccgattcgtttcaagacttggcgagcgggggatgccctttttcaagctactgaagaaaacagataatttccaatggggacccgaagcacagaaggccttcgaagatttcaaacaactcctcatcaagccaccggtcttagcttcaccacacccgcaggagccgttgttgctgtatgtatcagccacctcccaggtcgtgagcacagtcttggttgtcgagcgtgaggaagaaggccatgtccagaaagttcagcgaccaatctacttcgtcagcgaggtcctggccgactccaaaacgaggtaccctcaggttcagaagctgttatatggtattttaattactaccaggaagctgtctcattactttcaaggtcacccggtaacggtggtcacatcgtttccactcggcgatgtactgcacaaccgcgaagcaaatgggcggattgctaagtgggctttggagttgatgtctttggacatatcattcaagccccgcacttcaatcaaatctcaagcgttagctgatttcgtcgccgagtggaccgagtgccaagaggatacccccgtggagaaaatagagcactggaccatgcattttgacgggtcaaaaagactttcgggcactggagctggagtggttttaatttccccgactggagaaagactaagttatgtgctttggatacatttttcggcgtcccacaacgttgccgagtatgaagccctccttcatgggctacggattgcgatttccctagggataaagcgtttaatagttcgaggcgattcacagctggttgttaaccaagttatgaaagagtggtcttgccttgacgacaatatgatggcatatcgacaagaggtacgcaagttggaagacaagttcgatggactcgagctcagtcacgttcttcgacacaacaatgaagccgccgacagacttgccaactttggatccaagcgtgaggcggcgccctctgatgttttcgtcgaacacctttatacgccgacggtacctcacaaagataccactcaagttgcggacactcatgatgtagctatggttgaagccgactggcgagagcccttcatacgatttttaacttctcaagagctccctcaagataaagatgaagccgagcggatttcaaggcggagcaaactttatgttatgcacgaatctgagttatacaagaaaagcccttcaggaattttgcaacgctgcgtatctttagaggaagggagacaattgctgaaagacatacattctgggatatgcggaaaccatgctgctgcacgcaccattgtcggcaaagcttaccggcaaggttttttctggcctactgcagtgtctgatgccgacaagattgtgcgcacgtgcgaaggttgccaatttttcgccagacaaattcacttgccagctcaagagttacaaactatcccgctgtcttggccgtttgcggtttgggggctcgacatggttggcccgtttaaaaaggcagtcggcggttacacgcacctcttcgtggccattgacaaattttccaagtggatcgaagctaagcctgttgtcacgattacagcagataatgctcgcgatttcttcatcaacattgtgcacagatttggagtgcccaatcggatcattaccgataatggcacacaattcactggcggagtttttaaagacttttgtgaagactttggaattaagatttgctacgcttcagtggcacaccccatgagcaacggacaggtggagcgagccaatggcatgatacttcaagggattaaagcgcgtatttttgaccggctaaaaccctatgccggcaaatgggtgcaacagctgccatcagtactttggtctttgcgtactactcccagtcgggccacaggccagtcaccttttttccttgtctatggggcagaggcaatgttgccgagtgaagtcgaatttgagtctttgcgcttccgtaatttccgagaagaacgctatgaagaagaccgagtggacgacttgcaccgactggaagaggtccgcgaagcagctttgattcagtcagctcggtacttacaagggttgcgacgttatcataatcgcaatgttcgatctcgcgcctttctagtcggcgacctggttttacggaaaattcaaaccacacgagatcggcacaagttatctcctctatgggaaggaccatttattatctctgaagttacccggccaggttcatatcgactcaagcgcgaagacggcactctcgtcgacaattcttggaacattgaacatcttcgtcgtttctacgcttaa

SEQ ID NO: 100700 - DNA, 5928 bp, Oryza sativa
  Clone ID: PAT_MRT4530_98391C.1
atgggttccgtctccggcatcaacgacctcgtcttcccacccgggcagacgtttcggttcggcagcctcgacttcgtcaccaacaacttcggcaagatctctctccttgactcggagtcagaccagtcgggagagaaccggatctcagtcccgtttggactcccaaacgcggctaaaagttacttcaagaccatctcaatcgagtcggcttcaaaccactcgggcgagatcgcatcttctccaacgacaccagatcaagatgatggggcttacccaccaatcctgatgaagctccccgacgattcagcggccgtctccatcacgacagcgtctccatcccgtaggcctagacggaagtcggcttcaacaccgattttgcctagcttcagggaagtcggcgtcatcctccaaccactcggcacggtttcgacggatcagctggatggctactacagctctcccaccgtcgactcgcgtcccaccgacatcgtggagtacgacgaatttagctctcgctacaacgacccggatctcgacgacttcgacggaagcctagatgacaactacacccctctctacttcggcgtcttcatggccgataacgagacggaggagcaacgccaagcccgggaaaccgaagcacgtcgcgagactgagcgtcgccgactggaggaggagcgtcaagcacaagaacaagaacggctacggcgtgagcagcaggagcgtgagcggaccgcgaaggaggctgaggatcgacggcagcgagccttggaagcagggcgccgagcgcgtgatttcatcggccaacaagatgttgaagggacaccggttttccgcactcctcaacagaatgcggttgccgcgatcaccctcctcgacaccctcctcaaggaaaatgagctcaatcaatctgatcacgtcgtcaacatcttgaaccagacgaagaccatgattgcggcttcggtcccagttaactccgaaagcgtccgcacaccgactggcagccgagtcccccacttccgatctcatgactaccgtcatccaagcctcagcatcgccggcgtaggatccaatcgcaggagcaggggtcacgacgagcggtccgttcactcacctcccgaccatcatagggagcgccgagtggaacggcctcgctcaccacctcgtcgccgccccgtcgatcttcgcgacacaatcatacagcgccgagcagctcgaggctatcatcattcgccggaccgccacgacgacgaccttgacggagtagcagccttcaccgacgacctgcgtcgagtggattggccagccggcttcaagccgactggaatagagaagtacgacggtaccactaacccagaatcgtggcttaccgtctacggtctcgcaatccgcgcagcaggaggagacagcaaggccatggcgaactatttaccagtggctttagcggattccgcccgatcttggctccatggattgccccgtggtacaattggatcttgggctgaattacgcgaccacttcatcgccaacttccaaggcaccttcgagcgtcccggcacacaatacgacctctacaacgttattcagaagtccggagaatcccttcgagattacatccggcgattttctgaacaacgtaacaagatctccgacatcactgacgacgttatcatcgccccattcaccaaagggattcgccacgaagaattggtcggcaagttcgggcgtaagcctcccaggacagtcaagcttatgtttgaaaaagccaacgagtacgccaaagctgaagacgccgtcaccgcatcaaagcagtcgggtcccagttggaagccaaacaagggtacgccggctacgggaggaggtggaagtaacaaccataaggaccgcaagcattgtttcgtctacaagcagtttgcggagcaatacaccaagactacacggaagaactctgacgaagaacaaagcacgtcgaggaagaaggacgacggcgacaccccggcaggatttcaagaccaccgcaaggagctcaaccatatcttcggcggccccctggcttatgagtctaaaaggaagcaaaagttgactgaacgggagatcaatgctgttcagcccgacacgccccagtatcttcgatggtcagaaattgcaatcaagtttgaccgctcggatcatcctgaccgagtggtccacccggggcggtaccccctggtactagacccagtggtccgtaatgtcaagcttcgcagaaccctcatcgacggcggcagtgcactcaatatcctcttcgccaagaccttggatgatatgcagattcctcgctccgagctaaaaccaagcaatgcgccttttcacggagtaattccaggattatccgcaactccactcggccagatcaccctcccggtcacttttggcactcgggaaaacttccgcacagagaatatcagctttgaagtcgccgatttcgagacagcataccatgccatactcggacgcccggcgttagccaagtttatggccgtcccgcactacacttacatgatgatgaagatgcctggtccccgaggagtcctatccctacggagcgacatcaagcaagccgtcacatgcgacaaggagagttgcgacatggcccaaacccgcgagatggcgtcagcccgagaggatatccgactggctgcagccacggcgagcgaaggagaagtgcccgctaccaagatttcaaaaagtggagaaagcgaagccaagactaaaaagattcccctagatccttctgattctactaaaactgctaacaataaagatatctttgcgtggaaaccatctgatatgcccggtattcctagagaggtgattgagcactccttacatgtcaaagaagatgccaagcctatcaaacaacgactccgccgattcgcacaagacaggaaagacgcgatcaaggaggaattaaccaagttgttagcagcaggcttcatcaaagaagtctatcatcccgactggctggcaaacccggttctagttcggaagaaaacagggcaatggcgcatgtgtgttgattatactgacctcaacaaatcttgccctaaggatccttttgggttgcctcgcattgaccaggtagtcgactcgaccgccggctgtgagcttctcagttttttggactgctactcggggtatcatcagatccgactgaaggaatccgactgcttgaagacttcattcgtcacgccctttggagcatactgctatgtcaccatgccattcggactgaaaaacgcaggagcaacttatcaacgtatgatccagagatgcttctcaacgcagatcggtcgcaacgttgaagcctatgtggatgatgtagtcgtcaagaccaagcaaaaggatgatttgatctcggatctagaagaaaccttcgcgagcatccgcgctttcaggatgaaattaaaccctgaaaagtgcaccttcggagtaccgtcagggaagctgcttggttttatggtgtctcataggggcaaccaagccaacccggagaaagttacggctatccttaacatgaaaccgccaagtacccagaaagatgttcagaagctgactggatgcatggcggcgctcagccgatttgtttcaagacatggcgagcgggggatgcccttctttaaactactgaagaaaacagatgatttccagtggggacccgaagcacagaaggccttcgaagatttcaagaaactcctcaccgagccaccagtcttagcttcaccacatccgcaggagccgttgttgctgtatgtatcagccacctcccaggttgtgagcacagtcttggtcgttgagcgcgaggaagaaggccatgtccagaaagtccagcgaccgatttactttgtcagcgaagtcctagccgactccaaaacgaggtaccctcaggttcagaagctgttatatggtattctaattactaccaggaagctatctcactactttcaaggtcactcggtgacggtggtcacatcatttccactcggtgatatacggcacaaccgcgaagcaaacggacggattgctaagtgggccttggagttgatgtctttggacatatcattcaagccccgaatttcaatcaagtcccaagcgttagctgattttgtcgccgaatggaccgagtgccaggaggatacccccgcggagaagatggagcactggaccatgcattttgacgggtcaaaaagactttcgggcactggagcaggagtagttctaatttccccaactggagaaagattaagctatgtgctttggatacatttttcggcgtcccacaacgtcgccgagtatgaggcgctccttcatggactgcggattgcaatttccctagggataaagcgtctaatagttcgaggcgattcacagctggtcgtcaaccaagttatgaaagagtggtcctgccttgacgacaatatgatggcatatcgacaagaggtacgcaaattggaagacaagttcgatggactcgagctccgtcacgttcttcgacacaacaatgaagccgccgacagacttgccaactttggatccaagcgcgaggtggcgccctccgatgttttcgtcgaacacctttatacgccgacagtacctcacaaagatactactcaagttgcgggcactcatgatgtagctatggttgaagtcgattggcgagagcccctcatacgatttttgacttctcaagaactcccccaagacaaagatgaagccgagcggatttcaaggcggagcaaactttacgttatgcatgaagctgagttgtacaagaaaagcccttcagggattctgcaatgctgcgtatctttaggggaagggagacaattgctgaaagacatacattctgggatatgcggaaaccatgctgccgcacgcaccattgtcggcaaagcttaccggcagggtttcttttggcctactgcagtgtccgacgccgacaaaattgtgcgcacgtgcgaaggttgccaatttttcgccagacaaattcatctaccagctcaagagttgcagaccatcccactgtcttggccgtttgcggtttgggggctcgacatggttggcccgtttaaaaaggcagtcggcggttacacgcacctctttgtggccattgacaaattctccaagtggattgaagctaaaccggttgtcacaatcacagcagataacgctcgacacttcttcatcaacattgtgcatagatttggagtgcccaatcggatcatcactgataatggcagacaattcactggcggagtttttaaagacttttgtgaagactttggaattaagatttgctatgccttagtggcacatcccatgagcaatggacaggtggagcgagccaatggcatgatacttcatgggattaaagcgcgagtttttgaccggctaaaaccctatgccggcaaatgggtggaacagctgccatcagtactttggtctttgcgtactacacccagtcgggccacgggccaatcaccttttttccttgtctatggggccgaagcaatgttgccgagtgaagtcgaattcgagtctttgcgctttcgtaatttccgcgaagaacgctacgaaaaggaccgagtggatgacttgcaccgattggaagaagtccgcgaagcagctttgattcggtcggctcgatacttacaagggttgcggcgttatcataatcgcaatgttcgatcccgtgcctttttagtcggcgacctggttttgaggaaaattcaaactacacgggatcggcacaagttatctcctctatgggaggggccatttatcatctctgaagtcacccggccaggttcctatcgactcaagcgcgaagacggtactctcgtcgacaactcttggaacattgaacatcttcgtcgtttctacgcttaa

SEQ ID NO: 100701 - DNA, 282 bp, Oryza sativa
  Clone ID: PAT_MRT4530_98392C.1
atggcgaccggcggcgagatggaaggttttaggaccgacaccgagccagagatagagccggacatcaccgacccttcagaggacgagactcctgtccaccgcatcacctttgtcagaggccctcgtaccctcagcactgcccacaagagcacacgacccccgggcaagaagcccaagctagatccagagaccactacttccgagccgtggggactcagggttgcacgagccagcgaccaccctcatcctgccccaggatcctgtggatggttggaggactag

SEQ ID NO: 100702 - DNA, 340 bp, Oryza sativa
  Clone ID: PAT_MRT4530_98393C.1
cactctctccgagctctcgcctctcctcctcccccgtcttcccttcgcgcgcgccacccccacacacgcgaccatggcggcagtggcaggaggcgcagcgcgggcgctgtcgcaggcggagcaggacgtgcagatgatgctcgccggcgacgtccaccttggcaccaagaactgggactttcagaaggagcgcttcgtttaccagcgccggttcgatgggatttaccttattaaccttgggaagacatgggaaaaactggcgcttgcggggaagggggatggtggcctttgaaacccccaagaacttattggtcaattgggccggcccttagggcaaggg

SEQ ID NO: 100703 - DNA, 4343 bp, Oryza sativa
  Clone ID: PAT_MRT4530_98394C.1
cgggttattcccatttaatttgacgcgtccgggcgaattgaaagctaagcagtggtaattaagacccccgggggaaaatagggatgtctcctacgttacccataatatgtagaagtgtcgacgtaatttcatagagtcattcgatctgaatgctacatgaagaacataagccagatgacggaacgcggagacctaggatgtagaagatcataacatgagcgattcggcagatttggattcctttcctatatatccactcatgtggtacttcatcatacgattcatataagatccatctgtctagagatcgtcatatacatctagaaagccgtatgctttggaagaagcttgtacagtttgggaaggggttttttgagagaaaagaagaatctacttcaaccgatatgcccttaggcacggccatacataacatagaaatcacacgtggaaggggtgggcaattagctagagcagcaggtgctgtagcgaaactgattgcaaaagaaggtaaatcggccactttaagattaccatctggggaggtccgtttggtatcccaaaactgcttagcaacagtcggtcggttcggcagcctcgacttcgtcaccaacaacttcggcaagatctctctccttgactcggggtcaaaccagtcgggagagaaccggatttcagtcccgtttggactcccaaacgcggctaaaagttaccccaagaccatctcaatcgagtcggcttcaaaccactcgggcgagatcgcatcttctccaacgacaccagatcaagatgatggggcttacccaccggtcttgatgaagctccccgatgatttggcggccatctccatcacgacagcgtctccatcccgtaggcctaggcggaagtcggcttcaacaccgatctcgcctagcttcagggaagtcggcgtcatcctccaaccactcggcacggtttcgacggatcagctggatggctactacagctctcccaccgtcgactcgcgccccaccgacatcgtggaatacgacgagttcagctctctctacaacgacccggatctcgacgacttcgacgaaagcctagatgacaactacacccctctcttcttcggcgtcttcatggccaataacgagacggaggagcaacgccaagcccgggagaccgaagcacgtcgcgagactgagcgtcgccgactggaggaggagcatcaagcacaagaacaagaacggcaacggcgtgagcagcaggagcgtgagcggaccgcgaaggaggctgaggatcgacggcagcgagctttggaagcagggcgccgagcgcgtgatctcatcggccaacaagatgttgaaggaacgccggttttccgcacccctcaacagaatgcggttgccgcgatcaccctcctcgacaccctcctcaaagaaaacgagctcaatcaatctgatcacgtcgtcaacatcttgaaccagacgaagaccatgatcgcggcttcagtcccagtcaactccgaaagcgtctacacgccgactggcagccgagttccccacttccgatctcatgactaccgtcatccaagcctcagcatcaccggcgcaggatccaatcgcaggagcaggggtcacgacgagcggtccattcactcgcctcccgatcatcatagggagcgccgagtggaacggcctcgctcaccacctcgtcgccgccccgtcgatcttcgcgacacaatcatacaacgccgagcagctcgaggccatcatcattcgccggaccgccacgacgacgaccttgacggagtagcagccttcaccgatgacctgcgtcgagtggattggccagccggcttcaagccgactggaatagagaagtacgacggtaccactaaccccgaatcgtggcttaccgtctacggtctcgcaatccgcgcagcaggaggagacaacaaggccatggcgaactatttaccagtggctttagcagattccgcccgatcttggctccatggattgccccatggtacaattggatcttgggctgaattacgcgaccacttcatcgccaacttccaaggcaccttcgagcgtcccggcacacaatacgacctctacaacgttattcagaagtccggagaatcccttcgagattacatccggcgattttctgaacaacgtaacaagatctccgacatcaccgacgacgttatcatcgccgcatttaccaaagggattcgccacgaagaattggtcggcaagttcgggcgcaagcctcccaggacagtcaagctcatgtttgaaaaggccaacgagtacgccaaagctgaagacgccgtcaccgcatcaaagcagtcgggtcccagttggaagccaaacaagggtacgccggctacgggaggaggtggaagtaacaaccataaggaccgcaagcgtaagcctgaggaacttgttgcaaccgccactcactcttctcgacagcgttcgcgcgtcaacacgttcgacaagatcatgaactcccaatgcccgcaccatcctaactccaaccacgtggccaaagattgtttcgtctacaagcagtttgcggagcaatacaccaagactacacggaaaaactccgacgaagaacaaagcacgtcgaggaagaaggacgacggcgacaccccggcaggatttcaagaccaccgcaaggaactcaaccatatcttcggcggccccctggcttatgagtctaaaaggaagcaaaagttgaccgaacgggagatcaatgctgttcagcccgacacgccccaatatcttcgatggtcagagattgcaatcaagtttgaccgctcggatcatcctgaccgagtggtccacccggggcggtaccccctggtactagacccagtggtccgcaatgtcaagcttcgcagaaccctcatcgacggtggcagtgcactcaatatcctcttcgccaagaccttggatgatatgcagattcctcgctccgagctaaaaccaagcaatgcgccttttcacggcgtaattccaggattatccgcaactccactcggccagatcactctcccggtcacctttggcacccgggaaaacttccgcacagagaatatcagctttgaagtcgccgatttcgagacagcataccatgccatactcggacgcccggcgttagccaagtttatggccgttccgcactacacttacatgatgatgaagatgcctggtccccgaggagtcctatccctacggagcgacatcaaacaagccgtcacatgcgacaaggagagttgcgacatggcccaaacccgcgagatggcgtctgcccgagaggatatccgactggctgcagccgcgacgagcgaaggagaagtgcccgctaccaagacttcaaaaagtggagaaagcgaagccaagactaaaaagattcccctagatccctctgattctactaaaactgctaacaataaagatatctttgcgtggaaaccatctgatatgcccggtattcctagagaggtgattgagcactccttacatgtcaaagaagatgccaagcctatcaaacaacgactccgccgattcgcacaagacagaaaggacgcgatcaaggaggaattaaccaagctgttagcggcaggcttcattaaagaggtccttcatcccgactggctggcaaacccggttctagtatggaagaaaacggggcaatggcgtatgtgtgttgattatactgacctcaacaaatcttgccctaaagatccttttgggttgcctcgcattgaccaggtagtcgactcgaccgccggctgtgagcttctcagttttttggactgctactcggggtatcatcagatccgactgaaggaatccgactgcttgaagacttcattcatcacaccctttggagcatattgctacgtcaccatgccgttcggactaaaaaatgcaggagcaacttatcaacgtatgatccagagatgcttctcaacacagattggccgcaacgttgaagcctatgtggatgatgttgtcgtcaagaccaagcaaaaggatgatttgatcttggatctagaagaaaccttcgcgagcatccgcgctttcaggatgaaattaaaccctgaaaagtgcaccttcggagtaccgtcagggaagctgcttggttttatggtgtctcataggggcatccaagccaacccggagaaagttactgctatcctcaacatgaaaccgccaagtacccagaaagatgttcagaagctgactggatgcatggcggcgctcagccgatttgtttcaagacttggcgagcgggggatgcccttctttaagctactaaagaaaacagacgacttctag

SEQ ID NO: 100704 - DNA, 1504 bp, Oryza sativa
  Clone ID: PAT_MRT4530_98395C.1
atggggatgctgcggtggggagctcacctcctcctcctcctcctcgccgcggcgacgtggacgtgcgccggcgccggcgccggggtgacgagcgagtaccggcggaagctggaggcgacggtggacatgccgctcgacgccgacgtcttccgcgtgccgccgggctacaatgctccgcagcaggtgcacatcacgctgggggaccagacggggacggcgatgacggtgtcgtgggtgacggcgaacgagctggggagcaacacggtcaggtacgggagctcgccggagaagctggaccgcgcggcggaggggagccacacgaggtacgactacttcaactacacctccggcttcatccaccactgcaccctcaccggcctcacccacgccaccaagtactactacgccatgggcttcgatcacaccgtccgtaccttctccttcaccacgccgcccaagcccgctcccgacgcccccttcaagttcggcctcatcggtgacctcgggcagacgttcgactcgaacagcacgctggcgcactacgaggccaacggcggcgacgccgtcctcttcgtcggcgacctctcctacgccgacaactaccctctccacgacaacaaccgctgggacacgtgggcgcgcttcgtcgagcgcagcgtcgcgtaccagccatggatctggaccgccggcaaccacgagctggactacgcgccggagctgggcgagacggtccccttcaagcccttcacccaccggtacccgacgccgtaccgcgccgccggcagcacggagccgttctggtactccgtcaagatcgcctccgcgcacgtcatcgtgctggcctcctactccgcctacggcaagtacacgccgcagtggacatggctgcaggaggagctcgccacccgcgtcgaccgcaagctcaccccgtggctcatcgtgctcatgcactcgccgtggtacaacagcaacaactaccactacatggagggggagacgatgcgcgtccagttcgagcggtggctcgtcgacgccaaggtggacgtggtgctcgccggccacgtccactcgtacgagcgcagccggaggttcgcgaacatcgactacaacatcgtgaacggcaaggcgacgccggcggcgaacgtggacgcgccggtgtacatcacgatcggcgacggggggaacatcgaggggatcgccaacaacttcacggtgccgcagccggcctactcggcgttccgggaggccagcttcggccacgccacgctggagatcaagaaccggacgcacgcgcactacgcgtggcaccgcaaccacgacggcgccaaggccgtcgccgacgccgtctggctcaccaaccgctactggatgcccaccaacgacgatgtataattattaatcgactccaaccatctcaaacttcttaatttgtatcactgctatgctattgccattcttcttcttctttagctttggataataaatactcctactatgcaataac

SEQ ID NO: 100705 - DNA, 424 bp, Oryza sativa
  Clone ID: PAT_MRT4530_98396C.1
gggttctgatccctcatataagagtgtttacatttagggtaataagtttgaaggacagctgttcatttcgaattacttttttgttttactgaattcttcattagcatgtattttaaatccaggaagccatctaaactgatttaattataaatcaaggtcctttctgacagtttcagctataactttgtgatgtcttttaaggttccggtaaattaagcactgtgaggcatcataatgaccaacatacattcattatatgatactcttgtgatttatgatactcctttttttttgtttctattggaggttgtcatgtttatctacctttttcattataaatgtcaatttttcaaattaagatttgagatgcagttgaatattgattagtttatctgacttgtagggaacaagtttgctctcttcc

SEQ ID NO: 100706 - DNA, 200 bp, Oryza sativa
  unsure (1)..(200): unsure at all n locations
  Clone ID: PAT_MRT4530_98397C.1
agcggacgccgtgggccggaccgccgtgggccggaccgccgttgggccgggaccgccgttgggccgggaccgccgttgggttcganccttcgaggggggggggccccggttancccaatttcgnccttantaagntgaantcgnanttaacgccgccgcttcaattggcccgtcgntttaanaacgntcgtgaattggga

SEQ ID NO: 100707 - DNA, 474 bp, Oryza sativa
  Clone ID: PAT_MRT4530_98398C.1
cagaaaatcataagcaatatacaaccacgaggcattcagaagaactagagaaagagtttgtgtgacaacatcaaaagataataaaaaaacacgagcatgtacagatcacaatcttacatctccacgatgaccttcccggaggcgtggccgctcatgctcctctcccacgcctccgaggccttctcgaacggatgccgcgagtcgaccaccgtcttgagcttcccttccctcatcagctcgaggagaaaccccagctccttcttccccagcgtcaggatcaccagcgacagcctcttcctccgcgagaagagcgtcatcaccgacgccaagaagttgccgaggttgggggacacgtcgacgaccctgccaccgttgctgctcagctgcggcctgaacaccgaccacttgccgcggtcggtgaggttgatgatgtagtcgtacttcctaccggaggggctcgcgagcgcggccccc

SEQ ID NO: 100708 - DNA, 3556 bp, Oryza sativa
  Clone ID: PAT_MRT4530_98399C.1
gcacgagggcaaaaacgcaaaacaaaatgtcaatttcagacgacgaatttataaccttggtccctgcggaaaaaaatttataaccttggggctgtgtttggaaaatgggtttgggatatgatttcccaccccttaaagggtaagcttcaatcttagccacccattcttctcaccccatttcatcctatccctctattcatttccatttcccaatccgagctctcctaacccattttctaaacacaccctagaaggttagttcggtgctcgcttttctctcaaactcaaaagtagtcacattacccaaacgttgatctgaataaaccgtacagtatcatgtatgcgaatgtcaccctacagtgcacatatttacttcttgcattcccacaaaaactaacggttggggggaatttagaggggggcaatccagtatagattatgattactcatccccattaaacccagaactagttccgtgcactgactgcaaaatgcaatatcttgatcaactgtaagactactctttctcagttctttcgggaatggcaacagcaaggatctcgttgtgtgaattctgtgtatgtgagaagaacaatatttcttcagcatatgcctggttcagatatgataaaactgacgattgtctctgcgcttgggagaatctaagctcacaatgtcatcatgaaaaggtttatgtttgagccgctccccttgcctgagcaacagcactctgataaaggttttcgtactgtgaagctggagaatcccagctgaaatcaatctgcatatccttctgcactaactgtttccaaaccataggttttctgctgtagtagctgaatgccctttccaagcaactgcttagatcctgctcatcagtcctagcaaatgtaaagccattccgcagctccacaggtatagtttcatcatcaaaatcaaaaacactatcacacaatccaccagtttgtcgaacaattggcacagaaccatatctcatagctatcatctgagtaaggccacaaggctcaaacattgatggaatgataaacatgtcagatgccgcataaatacaatgagacaaagcttcatcatatttcagaattaacctaatattgttattcttctggaattggtctgcaacaccctcaaattccctctgaatatgtggaactggacttgaacccaggagtacaaactgtcctcctaactcagctgttttgtatattgcatgcctgataagatgtagacccttttgaggaactagcctcgtaatgcaggctaccagtggttgagaggcatcctcagaatacagccctagctgcttcctgagaaatgctttgtttgctgctttcccctgaagatcagtagcactatattgcacagcaagaaatctgtctgtggaagggttccatgttcctgtgtcgattccattaagtatccccacaaatttcctggaatgcattttaagtgtatcttggagaccacgaccaccctctgagcgcacttctaaagcatatgttggtgatacagttgtcacaatattggaataaacaattccacccttggcaacatttattcttccatgtgcattgtcttgcatcctgtctggtctatccaacttggtattcgaagttgtggcaagtgaaacaaattctagctgagctgaagcctcgagttgcatatatatcccaatatagaggtgcctgaaatctaagtgtaagatacaatattcttgaacacggtagagaatagttgacacccagaaaacaaatgcagtttgccagtcatggcagtggattatatcaattttcttcccagattggtaaagtaattccagtgctgcacggctaaagtatgaataacgtttaaaatcgtcatgctctccatagtattgggccctccagaagaattttgaaggatgctgtggctcaataaaatagactggaagaccttcaacagttcctgtccacacgttgttgctgaatagatttccatcaaaataggattgtatgacaacatctaaaaccttaagattagtaatctggtcaagttgcatacagtcgtatttgggaagaacaatctctactaaatgtcccttagtctgaagtgccttgccaagaccagcaactacatctgccagaccgccaacctgacacgaatctacactgtttcctgataacgatagctttaggaaagtttccataacatcactttcttttgcacccttgcaagcaaagtaggcttcacagatacggtcatctctcttccatgccatttctctcagcatacgtgcatcagtatttggtattttccgctcaaggaaccaaccatcaatcatgagcaggatgtgactccagaattctgatggcatactatttgcagaatgctccagtctgccactttcttctattagtttacctaggttatcttgaaattcctcagttaactgctgatatacttgaatgtgagtgtttgtttcttgatggcctgcttggtgatggctttttgctgctttcaacttctgttgcagaagttcaacaacataaggagaaaactcagatgttttcccttcttttagtgatgcttctagctcatcaatcttgtcatgcagatcatcatgctgatccaacaatgcagcatacttctctacatgatttttcaaacatccaagcatgtgttgcagattttctactttctccatccaaacatcatattgcagagggacaactttccagatatcagtttgagcaactagaaacctagcttccagctccctaactgtagcgtctaacagtgacctttctttctccaatttgaataggaattcctctgtttcagcaaactcaacaatctttgctttaagaaattgtgcgtcagccttaagtagcatattctcttcttttagaacagtcagctccatgaaaagtggagactcacacaaatgtgctggattgcctccacttagagcactttctatcaaaatttcttttgtaaatttctctaaatgatcaccagggatatctgtatttatgttccctttggttgcaagtgcttttgacaaattcatctctagagtgtcaacctttttctgcaaagcttccttttcagtaagaattttgtcaacatcttcaattgcttgaagacgagcttgatttaggagcagaatatcctgataggctgatataagtatatgaccaccccagtaaggcagtacctcttgctgttcattaccaatggctgcaattttttcatctatctggctaatagccccattggtatcgtcctcactggatgtactcttctgaggacgttccatagaagtcctcaaactggtacttggaagctgtccattttcctcagtagtaagcaagagttttgcatttgaagagcgctgttttggagcaatgtttttccctcgcttcttcttctgctgtgcactgaggttgccgggcggtcgagcgcggcaggagacggcgaaacggcggcgagtgataggcccacatgagagggacaggagagctgaatactccgccgccgcggcgccgcaagccgccat

SEQ ID NO: 100709 - DNA, 334 bp, Oryza sativa
  unsure (1)..(334): unsure at all n locations
  Clone ID: PAT_MRT4530_9839C.1
aaatcacgcctctcacatcgctcctctccccacgccgccacgcgctctccttcccgcaaaccgcggttcccagatcgctccgcttcccctcgcccaaccggcggcagtctggatgagctcctcgccgtgctcgactcgccgtcgctcgacgacctcgcggtgtacgcgtccaacatggcgaccaccgcgctagctgacaggtcggcatcgggtggaccgcgcgtcgcgttcacgtccggcgtgtggtgcgacgccgcgctcccgctgatcaagcacgnctaccgcgacgccgttctcggcaggtacaaccgtacaatgncgaggccatcaccgt

SEQ ID NO: 100710 - DNA, 662 bp, Oryza sativa
  Clone ID: PAT_MRT4530_983C.1
tgagaatcacccatacaaattggacatgccaaacgaccatgagtgctccacccagcaaatatcccatatgcaggaaaatcatggattgaccatagaaataaattggacacactaatttatatatatatatatatatatgtatatacatgtatatgtatatacatgtatatgtatatacatgtatatgtatatacatgtatatgtatatatatgtatatgtatgtatatacatgtatatgtatatatatgtatacatgtatatgtatatatatgtatatatatatatgtatatgtatatatatatgtatatatatatgtatatatatatatatgtatatatatatatatatatatatatctcaatctttagagagcaatatctctcacatcatatcttgtatttccaatccgtttgcaccatgaagttcataaaaaaacatatacatatatatacatatacatatatatatatgtatgtacgtatatacatgtatacatgtatgtacgttatatatacatacatacatacatacatacatacatatatagacatatatatatatatatatatatatatatatatatatatatatatatgtatatatatacacacacacacatacatacatatatacatatatacatatatatatacatatgta

SEQ ID NO: 100711 - DNA, 1583 bp, Oryza sativa
  Clone ID: PAT_MRT4530_98400C.1
ttttttttttttttttttttctgaaacaatttcacataatacacatcactgcaaaacagcaaaacaattcgtatattaagtacaagtttttacgatccaccgttacaaccccaaagcatgggtttctcatccgaactgatttattttggtcggacaacaaagtgccgttctcggaagtcgaggaactgctgagcacatagcaatgaaaaattaaacacataacaacagttctgataccgataccagtaacacaatagacggtagttctgataccgataccagtaacaccatagaagatagtcctcgtgacctcgctaccagttggtaacgagtaacgaccctgagcagttccggtgttcacttgggttacagatacaggaggaaggaccatcttggtccaacattttggacatgatgagtgaagcggacgcaataactatttatacctccaaaggccgatcaagcatagatcacgacgatgaccatagacagacacaagactgacgggacgggctacatttgttggacttgtgccagacttcaacactgggatataatcaaccacatagtagcttgatgattcttcaggagtttaggtgaacaatcatatgagtgcatcatgactaatccaaggggattagtcatcttacagagtgctggactccattccagcatccagtatatctccatgggctaatgagctgtcagatacaggatcaataatgctgtatctagagcttcaagctgcagcaatggtcgcagtcccattgagacataggatgtaaccaagcaaaactgacaagagcaaccgttgctcttggatcattgtcccatccatcggggcaacatcatgattccaggtacatctgatgaccatgataagggcaaccttatgaatgcaagggggattacttgccaggtaagaaccagtactacaaatacagcagcactgctcttttgtcctgctgcaatctaagggtacctcaaggtacaaatagccccaccagaaatggacgggctgaactggctaaatggttggctagcagtatttgctgcggatgaaactccataaattggaacatattgctgtattgcggaaccgggaatccttggtaatacccaagaggaagtgtccggtgctgaccataaccccctacataaacaccccttggaactggaacgccaaagtaggacccagctgatcttggcctcccgagaggaactgcaggctgagcgcggccaagcgacgccaggttacaattggcacgcctgccgtcgatcaccggcgtcgggtcctcgcatgccttcctcgccgactcaggatcgcggaacgtcacgaagccgtagcccttggagcggccggagtggcggtcggtgatgacgacggcctcgaggatctccccgaagcggtcgtagaagcggcggagcctctcgctggtggtctcccacgcgagcccgcccacgaacaccttggtgtaggtggtgtccccgaacggcgacgccagcaggtgcagccccgagctggagctcgacgccgacgccgaccccgaccccgacccctgctgctgctgctgctgcgccat

SEQ ID NO: 100712 - DNA, 221 bp, Oryza sativa
  Clone ID: PAT_MRT4530_98401C.1
gctgatgagttccgatgacaagatgaaggagctgggagggcatctttcatacacccatcatcgccatagatgtacacagggcagctgggccgggacaatgccggcggcatggacgaggacgatgctcaccccaggcaggcaggcagcggtctggccccaagatcgaggaggtcagactaagcgcgaaatttgctagtgatccagcagcttcaagttatctt

SEQ ID NO: 100713 - DNA, 778 bp, Oryza sativa
  unsure (1)..(778): unsure at all n locations
  Clone ID: PAT_MRT4530_98402C.1
cccgcgtccgatcccaaggtcggagagggggacagcgaagctagcccacccgcaccaccgatcctcgaagggattccagccgatcgctgcgtagctcgccggatggcgcagcagcagcagcagcaggggtcggggtcggggtcggcgtcggcgtcgagctccagctcggggctgcacctgctggcgtcgccgttcggggacaccacctacaccaaggtgttcgtgggcgggctcgcgtgggagaccaccagcgagaggctccgccgcttctacgaccgcttcggggagatcctcgaggccgtcgtcatcaccgaccgccactccggccgctccaagggctacggcttcgtcagtgcccttcgatttttcgccgctgttgatcctgctttttccgggtgtttgtttgtttgttcgtggaattgctggctgtaaacagtggttggcttatacaagtgtcatgttgaccttgtgcaggtgacgttccgcgatcctgagtcggcgaggaaggcatgcgaggacccgacgccggtgatcgacggcaggcgtgccaattgtaacctggcgtcgcttggccgcgctcagcctgcagttcctctcgggaggccaagatcagctgggtcctactttggcgttccagttccaaggggtgtttatgtagggggttatggtcagcaccggacacttcctcttgggtattaccaaggattcccggntccgcaatacaggtatgatgtgttaacttttccaatgcagctttctgctcttagatggcccattt

SEQ ID NO: 100714 - DNA, 382 bp, Oryza sativa
  Clone ID: PAT_MRT4530_98403C.1
ctaatgcagggccaacccaaatcaatcatacctattgttcctgaaccattaaacaaaattcaaacccccccttaaacaatttttcttgatagccccttttcccttacaccccgtgcactcacaaataaagtcaagggcactcccaaaattcttaaacaagggtcattcatttttaaaaacactcaaaaagaaccttcaaccccaaccataacctttttacttcaccccaaaaagcacctagaaccaacactcataaaaatttccctcggtacaaaactaccctcaaatactctccatttgccataatccctaacatctatttaaaaaaaccctttactttttttggtgaagattccatcaagaactttctttcgccaaccaa

SEQ ID NO: 100715 - DNA, 291 bp, Oryza sativa
  unsure (1)..(291): unsure at all n locations
  Clone ID: PAT_MRT4530_98404C.1
agaaaacacccgacnccccgacggacccggcgagcacagcaggagaggggaggagacccngagcnggaagaagaaggagcaccccaccagaacccagaaccccaaaccncaacacaagcagcaggaaggaacgccccctaaagcacccgggagcaaggaccaagcaggancggaagccgccgcggccaaggagccgncgnncaaggagggcgagagagagcacgcccaccacggcccgaaccaggacgaggccaaggnncaaaagaccgaaaacaaggaggaagagaggcg

SEQ ID NO: 100716 - DNA, 278 bp, Oryza sativa
  Clone ID: PAT_MRT4530_98405C.1
gcacgaggccgtcgtcgacgaaggcaggtgacggcttcgcgccgccgctcgccggtgcttggtcggatcaaacttctcaagaaacgggcagataatagcgtcaaaatacgttggttttttagggactcaaaaccgctgctcaaaaccacggggggagatagattgtaccggttttaataattagggagagttatcccacccggttttccgatcaagacatacaaattagagagaatctcttatatgccactagaaatttattagttcctttatatgcc

SEQ ID NO: 100717 - DNA, 368 bp, Oryza sativa
  Clone ID: PAT_MRT4530_98406C.1
ggaaaaatctgggctgatgctccttccaaagatgtaccagaaccacaatgatacagagggaagtttggcacctccaaatgaatcacaacttacaaacgtgctcatcgaatattgcccaaacttgaagtctttgttacattgtttcttgggacagaatgtaactcttacatctcttagagagctccacatcaacaaatgtgaaaagcttgaatatttaccattgaatggtttgatggaactagtaaacctacaaatcctagaggtgttggattgttcaatgctcaagaaaagtgggatggaagttaagcttcttccgtcatccctggaacagctctccattaaatcctgtggtgaagtggaaaacatat

SEQ ID NO: 100718 - DNA, 1551 bp, Oryza sativa
  Clone ID: PAT_MRT4530_98407C.1
atgccggtgccggggagccagaacgggcggccgaggccggcgaaggcggagaccatccacggcctcgcccgcgccggcgacctcgccggcgtccagaggaagctgcaggagaatcccgccctcatcaacgaccggaaccccgtcatgtcccaaacaccgcttcatgtcgcagctggctacaataacactggcatagtcaaattcttgcttgatttccaaggcacggataaagttgagctggaagcaaagaacatgtatggagagacacccctgcacatggctgtgaaaaacagttcttgtgaatcagcaaaattgctacttgaacgtggtgcacatatagaagccaaagcaaataatggcatggcaccattgcatttagctgtctggcatgcacttcaatctggagattgtagcacctgtactgaatcttgttctcatcacacattgccccaccaggaaggcaaaatcccttcgaatcatattcctggaggagctggtaaaacaatggttgctcggattcttggaaagcttcttcatatggttggggttctccctaccgacaaagttactgaagtacagcgaactgatcttgttggagaatttgtggggcacactggaccaaaaactaggcgaaagatacaggatgctgagggtggaattctgtttgtggatgaagcttacaggttgataccgatgcaaaaatctgatgataaggattacggtgtggaggccttggaggagataatgtctgtaatggacaatggcaagatagttgtgatatttgctggatactgtgagccaatgaagcgcgtcatcgcctccaacgacggcttctgtaggagggtcacaaagttcttttattttgacgatttcaccacaacagaattagcagagatcttacatctgaagatgaataacccaactgagagcagtttgctgtatgggttcaagctggacccaagctgcagcatcgaggtcgttggagagctgattgccagggagacaactgaacagcggcgtaaacagatgaatggtggccttgtagacacgctgctcatcaatgcccgtgagaatctagatctacgtcttgatttcaactgcgacgatgcgaatactatgatcacaatcacattggaagacctggaagctggccttaagcagatctccaaacagcggcagttgcagtgacaccaaccaatttggtgacaaatttttggttataattggaagctcatcgacatcagacaaagtttcagtcaggttcaaggattttgatggaatcaaatagtgtgatttggtccaatttttttgctggctattctttctgttgtatctattcacattggtaggtaagatttatgcccttctacaatagcactaatacgcatgtagttctttattattcccattgaggtatataagcctttgtaaatacatttcttgcattacgaagcatcttttagaggtgatgaaagtcttctccttctccaggtaaaaaaaaaaaaaaaaaaaaaaaaaaactcgagactagttctcgcccgcgccccgtgc

SEQ ID NO: 100719 - DNA, 270 bp, Oryza sativa
  Clone ID: PAT_MRT4530_98408C.1
atggcggaggaagagagagagagaggtggggagggagttggctccggcagcggtcgttctggtggcggcgcccggggagcacgccgggccgggccgtgccagcccacgtgctccacctccgtgccgtaccgggctggcctgaaggcatgggcaccttatcgtgattttttttttgaaaaatcatatgctttaggtccttcaacttacaaaaccatccgctttaggtccttcggtggttttgaccccggttttatccgacgtggcggctga

SEQ ID NO: 100720 - DNA, 498 bp, Oryza sativa
  Clone ID: PAT_MRT4530_98409C.1
atgtcggggttcggggacgggtacgtcggcacggctcaggacgccgtgaagatccggcggctggagaagcagcgggaggcggagcgccgcaagatcgaggagctcaagaacaagtcctccgatggccagcccggcctgctccagttcggctccagcacctccgagaagctaacacctaacagtatggactatgactttcagattcttgagactgcgtttaagaaggaaacagtcggtttagttacaagggagcagtatgtcgagaagggaagaagaattgcaaatgcaaaagcggaaaaagaggagaatgaacctctgacaattacttacagttactgggatggcactgggcataggagagttatccagcttttccactttgatgttcatgaggatgtgcggaccattgctgatgcaacaaaagaaaaggacgagattccctctactccatccatctccatgcaatgcacacctttctcctactaccactacacctga

SEQ ID NO: 100721 - DNA, 1584 bp, Oryza sativa
  Clone ID: PAT_MRT4530_9840C.1
atggcgaagatgttcaatattccaagagttgtcgatattagtaccgtcttcacgcttgagtcggaagaacggcgactggcccgtagcccgactgggagtggtgcgcatggaccaaagtacagacggcagctgttctacccacttgccggcatagggatgcagtcggtcaaaaactcgcgcttttattccttgaagtatcataccattggcacgttcgacttgtccattgctcatggggtgtgctacggagacataacaaattttgatgccgaagtcctcacaaaaatctttaaatactccgcctgtaaattgagtgccgttatcagtgatgatccgattgggtaccctgaaccggtgcacaatgttgatgaagaaatctctggctttgtctaccgtgattgtaatgaccggtttagcttcgatccactcggagaatttgtcaacagctacaaagagatgagtatatctaccgacagcctttttaaacgggccaaccatgtcgagcccccgaaccacgaacggccaagacaacgggatggtttgcaactcctgagccgccgcctctccctcctcgccggagcgccgtccggtcgcgccgtcgcctcctccagcatcgcagccgcctcctcttcgccggcctaccctctgttttccgcggagacctccggaagtgcctccccgccggcaaccgtggtgttgccgccacgattccgcctccggccgcctctgccgcgtcccctgtgcgccggccgacgtcgccaccacctctcccggcaccggagtgccgtcctctttcccggccaggccacggcgtcgcccgaatttcgccggaacgccgtcacccgcgccggcctctccttcctcctcgtcgacgtctcctccggcagcccccttccgccgcgcccgtgcatcagccggcgctgccgtcccctccctcggcacggtgacgtagccctccacctcgtccacccctcggtttcgcccggaagccgccgcacgtcgccgcgaacctctccatccgcctcaccggagtggttcggccgcccgtccctcctcgcccgtgcaccggtcggccgcacctccaccaccttcggcatcgcagccgcgatgtcgtcctcggcatcgcttccccttcggccgaacaccgccggtgtccgtcgtcgtcttcaccgttcatcctcgccggctcgtcgtctcgcggcgccgcctccatcgtcggcatcgcagcggcgtgttccacgccatcctcgcctccgtgcagccgctgccggctgccctcatcgtctcctcgccggccccggtcgtcgtcgtcgtcgtcctcccgtcgttcccggtcgtcgtggcgttcgtccctccatcgagccgttctcgtccgtcgtccgcgttcgtcaagcgagccgctgcagccccgtcgtcgtcttcgtcctcggctccgcatcgtcaagcgttgcgccggccgcgtctcgccttcgtccaaggatcgccgccgaagtcgtcccctcgccgttcgtctccgtcgttcccggccgcctccgccgcgcccgttcgtcgttgtcgttccctcgcctcgttgcgtggtggtaa

SEQ ID NO: 100722 - DNA, 555 bp, Oryza sativa
  Clone ID: PAT_MRT4530_98410C.1
atgaccagagaggatcacctaagcatgaagccgatgactgctattgatgttgaaattagctctgcttttagcttcataagtaccaggagtagcagatgtccaacttcattttcgcgacaagcaccaggagagcatcagtggcaacagtggcgacgcacgcgcatgcagcccatgttgctgctccctctccgtgcacggccgaggagcatcaataagttcaagcaagtgctacctcagcggcaagagtggcgagagcacgcagcgttgaactctttgaggagagagatagaaagcaaagaggagaaaagtagaaggaaggaatatgtggtggaggctggggcaaaaccttttaacacctcttattttatcaaacttagcgaaaaatttgaagggggctcaggggtatctatgggttcggtggatgcatggggcacccatgttgaatccgccccggagagaaggggtggggactggggagatagggttaccgctgaggagaggcgcaaggtcactggccccactcgttcctcttcatgcgtttaccttgatgtgtaa

SEQ ID NO: 100723 - DNA, 1381 bp, Oryza sativa
  Clone ID: PAT_MRT4530_98411C.1
gaaaacattcacagctagttgatttgaacattagttcagttacatggaattggcgttccacaaaatggtaaaaagcatacagttagagtgtgaattctttccaaacactaatgatctttggcacaaccgtacaattactgtaataactgttgcagaaatccaaagtagaaacatgcgcaggttcaaggctctcaatttctgctgtatattattatgatttttaatctccatggatcgtgtaacgctcccacttcttggtaggatcatagatctcccatcttgatgcaggaaatatatgtttgtttttctcataccagtgtctctctacgacttttcccgcatgagactcgtccttttcttttgttgcatcagcaatggtccgcacatcctcatgaacatcaaagtggaaaagcggtccactcttgccccttgctttgttgataatcaactcatagaagctatgttgatgagggataataagatcttccttcacataaagaagattctcaactgatgttgtccgcacttcacggaactcaggggcaagctgctgctgaacagcccttaggaattctccaatggagtcacctttacggacctggataactctcctatgcccagtgccatcccagtaactgtaagtaattgtcagaggttcatctcacgcgttgtttcttcacacgctctcgcttgttccctgtcaggaagaaaacttgtctcaacagtagggtccttcccaagtttgacaggaccatgtttcttttgaggttcttcatacgattctcaaattcatcctcatcacttccattctcaatctcatcacagaaagataaccgtggatctcccctcactctcctctttttccgcttttgcatttgcaattcttcttcctcttgttgcaacttttgaagcttctccttctcttcttcctcaattttggtccgtatattaaccctcttctcgacatactgctcccttgtaactaaaccgactgtttccttcttaaacgcagtctcaagaatctcggaggtgctggagccgaactggagcaggccgggctggccatcggaggacttgttcttgagctcctcgatcttgcggcgctccgcctcccgctgcttctccagccgccggatcttcacggcgtcctgagccgtgccgacgtacccgtccccgaaccccgacatctcgtcacccccgccgctcttcctcggtcagacgagggattccagagattccagagaaactcgcagccgacgcgcggccgccgcggaaggtggagacggcaaccggcggtgggattgctcgccgccgccgagagcggaaggaatagggatttggggagggaaactgctcgccgccctcctgcccgggggatcca

SEQ ID NO: 100724 - DNA, 5976 bp, Oryza sativa
  Clone ID: PAT_MRT4530_98412C.1
atgggtttcgtctccggcatcgacgacctcgtcttcccgcccgggcagacgtttcggttcggcagcctcgacttcgtcaccaacaacttcggcaagatttctctcctcgactcggaatcagaccagtcgggagagaaccggatttcggtcccgtttggattcccgaacgcggctgaaagctacttcaagaccatctcaaccgagtcggcttcaaaccactcggccgagatcgcatcttctccaacgacaccagatcaagatgatggggcttacccaccagtcctgatgaagctccccgacgatttagcggccgtttccaccacgacaacgtcttcatcccgtaggcctaggcggaagtcggcttcaacaccgatttcgcctagcttcagggaagtcggcgtcatcctccaaccactcggcacggtttcgacggatcagctggatgactacaacagctctcccaccgtcgactcacgtcctactgacatcgtggagtacgacgaatttagttctcgctacaacgacttcgacgacttcgacgacttcgacggaagcctagatgacaactacacccctctctactttggcgttttcatggccaataatgagacggaggagcaacgccaagcccgggagaccgaagaacgtcgccgactggaggaggagcatcaagcacaagaacaagaacggctacggcgtgagcagcaggaccgtgagcggaccgcgaaggaggctgaggatcgacgtcagcgagctttggaagcagggcgccgagcgcgtgatctcatcggccaacaagatgtcgaagggacaccggttttccgcacccctcaacagaatgcggttgccgcgatcacccttctcgacaccctcctcaaccaaaacgagctcaatcagtccgaccacgtcgtcaacatcttgaaccagacgaagaccatgattgcggcttcggtcccagttaactccgaaagcgtccacacgccgactggtagccgagtcccccacttccgatctcatgactaccgtcatccaagcctcagcatcaccggcgcaggatctaatcgcaggagcaggggtcacgacgagcggtccattcactcacctcccgaccaatatagggagcgccgagtggaacggcctcgctcaccacctcgtcgccgccccgtcgatcttcgcgacacaatcatacagcgccgagcagctcgaggccatcatcattcgccgaaccgccacgacgacgaccttgacggagtagcagccttcaccgacgatctgcgtcgagtggattggccagccggcttcaagccgactggaatagagaagtacgacggtaccactaatccagaatcgtggcttaccgtctacggtctcgcaatccgcgcagcaggaggagacaacaaggccatggcgaactatttaccagtggccttagcagattccgcccgatcttggctccatggattgccccgtggtacaattggatcttgggctgaattacgcgaccacttcatcgccaacttccaaggcaccttcgagcgtcccggcacacaatacgacctctacaacgttattcagaagtccggagaatcccttcgagattacatccggcgattttctgaacaacgcaacaagatctccgacatcaccgacgacgttatcatcgccgcgttcaccaaagggattcgccacgaagaattggtcggcaagttcgggcgcaagcctcccaggacagtcaagctcatgtttgaaaaagccaacgagtacgccaaagctgaagacgccgtcaccgcatcaaagcagtcgggtcccagttggaagcaaaacaagggtacgccggctacgggaggaggtggaagtaacaatcataaggaccgcaagcgtaagcctgcggaacttgttgcaaccgccagtcactcttctcgacagcgttcgcgcgtcaacacgttcgacaagatcatgaactcccaatgcccgcaccatcctaactccaaccacgtggccaaagattgtttcgtctacaagcaattcgcggatcaatacaccaagactgcacggaagaactctgacgaagaacaaagcacgtcaaggaagaaggacgacggcgacaccccggcaggttttcaagatcaccgcaaggagctcaaccatatcttcggcggccccctggcttatgagtctaaacggaagcagaagttgactgaacgggagatcaatgctgttcagcccgacacgccccagtatcttcgatggtcagagattgcaattaagtttgaccgctcggatcatcctgaccgagtggtccacccggggcggtaccccctggtactagacccagtggtccgtaatgtcaagcttcgcagaaccctcatcgacggtggcagtgcactcaatatcctcttcgccaagaccttggatgatatgcagattcctcgctccgagttaaaaccaagcaatgctccttttcacggagtaattccaggattatccgcaactccactcggccagatcaccctcccagtcacttttggcactcgggaaaacttccgcacagagaacatcagctttgaagtcgccgatttcgagacagcataccatgccatactcggacgcccggcgttagccaagttcatggccgtcccgcactacacttacatgatgatgaagatgcctggtccccgaggagtcctatccctacggagcgacatcaagcaagccgtcacatgcgacaaggagagttgcgacatggcccaaactcgcgagatggcgtctgcccgagaggatatccgactggctgcagccacggcgagcgaaggagaagtgcccgctaccaagatttcaaagagtggagaaagcgaagccaagactaagaagattcccctagatccctctgatcctactaaaactgctaacaataaagatatctttgcgtggaaaccatctgatatgcccggtattcctagagaggtgattgagcactccttacatgtcaaagaagatgccaagcctatcaaacaacgactccgccgattcgcacaagacaggaaggacgcgatcaaggaggaattaaccaagctgttagcagcaggcttcatcaaagaagtccttcatcccgactggctggcaaacccggttctagttcggaagaaaacagggcaatggcgcatgtgtgttgattatactgacctcaacaaatcctgccctaaagatccttttgggttgcctcgcattgaccagatccgactgaaggaatccgactgcttgaagacttcattcatcacgccttttggggcatactgctacgtcaccatgccgttcggactaaaaaacgcaggagcaacttatcaacgtatgatccaaagatgcttctcaacgcagatcggccgcaacgttgaagcctatgtggatgatgtagtcgtcaagaccaagcaaaaggatgatttgatctcggatctagaagaaacctttgcgagcatccgtgctttcaggatgaaattgaaccctgaaaagtgcaccttcggagtaccgtcagggaagctgcttggttttatggtgtctcataggggcatccaagccaacccggagaaagttactgctatcctcaacatgaaaccgccaagtacccagaaagatgttcagaagttgactgggtgcatggcggcgctcagccgatttgtttcaagacttggtgagcgggggatgcccttctttaagctactgaagaaaacagatgatttccagtggggacccgaagcacagaaggccttcgaagatttcaagaaactcctcaccgagccacccgtcttagcttcaccacacccgcaggagccgttgttgctgtatgtatcagccacctcccaggttgtgagcacagtcttggtcgttgagcgcgaggaagaaggccatgtccaaaaagtccagcgaccgatttattttgtcagcgaggtcctagccgactccaaaacgaggtaccctcaggttcagaagctgttatatggtattctaattactaccaggaagctatctcactactttcaaggtcactcggtaacggtggtcacatcatttccactcggtgatatactgcacaaccgcgaagtaaacggacgtattgctaagtgggctttggagttgatgtctttggacatatcattcaagccccgaatttcaatcaagtcccaagcgttagctgattttgtcgccgaatggaccgagtgccaggaggatacccccgcggagaacatggagcactggaccatgcattttgacggatccaaacgactttcgggcactggagcaggagtggttttgatttccccaactggagaaagattgagctatgtgctttggatacatttttcggcgtcccacaacgtcgccgagtatgaggccctccttcatggactgcggattgcaatttccctagggataaagcgtctaatagttcgaggcgattcacagctggttgtcaaccaagttatgaaagagtggtcctaccttgacgacaatatgatggcatatcgacaagaggtacgcaagttggaagacaagttcgatggactcgagctcagtcacgttcttcgacacaacaatgaagccgccgacagacttgccaactttggatccaagcgtgaggcggcaccctctgatgttttcgtcgaacacctttatacgccgacagtacctcacaaagatactactcaagttgcgggcactcatgacgcagctatggttgaagtagactggcgagagcccctcatacgatttttgacttctcaagaactcccccaagacaaagatgaagccgagcggatttcaaggcggagcaaactttatgttttgcatgaagccgagttatacaagaaaagcccttcaggaattctgcaacgctgcgtatctttagaggaagggagacaattgctaaaagacatacattctgggatatgcggaaaccatgccgctgcacgcaccattgttggcaaagcttaccggcagggttttttctggcctactgcagtgtccgacgccgacaagattgtgcgcacgtgcgaaggttgccaatttttcgccagacaaattcacttaccagctcaagagttgcaaactatcccgctgtcttggccgtttgcggtttgggggctcgacatggttggcccgtttaaaaaggcagtcggcggttacacgcatctctttgtggccattgacaaattctccaagtggattgaagctaaaccggttgtcacaatcacagcagataatgcgcgagacttcttcatcaacattgtgcatagatttggagtgcccaatcggatcatcactgataatggcacacaattcactggcggagtttttaaagacttttgtgaggactttggaattaagatttgctatgcctcagtggcacaccccatgagcaatggacaggtggagcgagccaatggcatgatacttcaagggattaaagcgcgtgtctttgaccggctaaaaccctatgccggcaaatgggtgcaacagctgccatcagtactttggtctttgcgaactacacccagtcgggccacaggccagtcaccctttttccttgtctatggggcagaagcaatgttgccgagtgaagttgaatttgaatctctgcgctttcggaatttccgtgaagaacgctacgaagaggaccgagtggatgacttgcaccgtttggaagaagtccgcgaagcagctttgattcggtcggctcgatacttacaagggttgcggcgttatcataatcgcaatgttcgatcccgtgcctttctagtcggcgacctggttttgaggaaaattcaaactacacgagatcggcacaagttatctcctttatgggaggggccatttatcatctctgaagtcacccgaccaggttcctaccgactcaagcgcgaagacggtactctcgtcgacaactcttggaacattgaacaccttcgtcgtttctatgcttaa

SEQ ID NO: 100725 - DNA, 615 bp, Oryza sativa
  Clone ID: PAT_MRT4530_98413C.1
atgccgacgctgcggcgcggccggcgagggagcaaggtcatcgtgacgagcaggcacgccgagcacgtcgcgggcctcgccgccgccgccgcggacaccatcaccctccgccccccgccgccggcggagtactggctcttcttcaaggcgcacgcgttcggcggcgcggacgctgaggccgacccgcggctggtggcggcggggcaggccatcgccaagcggctgcgcctcgccgcctccttcttcggcggcaagatgctcgccgcgctgctgcggtcgcgccccgacccgcgcttctggcgcaccgtgctgagcagcggcgccgccgacctgccgtgcctcggctacgccgacgacgccgtcgccggccgcctgttcccgccgcacgtcaccttgcagagcgtcaccatgtcgcgctcgccggagagaggcatcgtcagtctccaggactcctgtttggttactcctccggcgactcagtccggcgatcactgccgccgccgccgctcgccggagttgcccgtgttgctgtgcaagtcagtcttcccttcctactgcatctactacaccgctcattgcacgatcagtgacagtgacactgacaacaaacaatga

SEQ ID NO: 100726 - DNA, 5901 bp, Oryza sativa
  Clone ID: PAT_MRT4530_98414C.1
atgggtcctttctccggcatcgacgacctcgtcttcccgcccgggcagacgtttcggttcggcagcctcgacttcatcaccgacaacttcggcaagatttctctcctcgactcggaatcaaaccagtcgggagagaaccggatttcggtcccgtttggattcccgaacgcggctgaaagctacttcaagaccatctcaaccgagtcggcttcaaaccactcggccgagattgcatcttctccaatgacaccagatcaagatgatggggcttacccaccggtcctgatgaagctccccgacgatttagcggccgtctccaccacgacagcgtcttcatcccgcaggcctaggcggaagtcggcttcaacaccgatttcgcctagcttcagggaagtcggcgttatcctccaaccactcggcacggtttcgacggatcagctagatgaccactacagccctcccaccgtcgactcgcgccccaccgacatcgtggagtacgacgaatttagttctcgctacaacgacttccacgacttcgacgacttcgacggaagcctagatgacgactacacccctctctactttggcgttttcatggccaataatgagacggaggagcaacgccaagcccgggagaccgaagagcgtcgccgactggaggaggagcaccaagcacaagaacaagaacggctacggcgtgagcagcaggaccgtgagcggatcgcgaaggaggctgaggaccgacgtcagcgagctttggaagcagggcgccgagcgcgtgatctcatcggccagcaagatgtcgaagggacaccggttttccgcacccctcaacagaatgcggttgccgcgatcacccttctcgacaccctcctcaaccaaaacgagctcaatcgatccgaccacgtcgtcaacatcttgaaccagacgaagaccatgatcgcggcttcggtcccagttaactccgaaagcgtccacacgccgactggcagccgagtcccccacttccgatctcatgattaccgtcatccaagcctcagcatcaccggcgcaggatccaaccgcaggagcaggggccacgacgagcggtctgttcactcacctcccgaccttcatagggagcgccgagtggaacggcctcgctcaccacctcgtcgccgccccatcgatcttcgcgacacaatcatacagcgccgagcagctcgaggctaccatcactcgccagaccgccacgacgacgaccttgacggagtagcagccttcaccgacgacctgcgtcgagtggattggccagccggcttcaaaccgactggaatagagaagtatgacggcaccactaaccctgaatcgtggcttaccgtctacggtctcgcaatccgcgcagcaggaggtgacaacaaggccatggcgaactatttaccagtggctttagcagattccgcccgatcttggctccatggattgccccgtggtacaattggatcttgggccgaactacgcgaccacttcatcgccaacttccaaggcaccttcgagcgtcccggcacacaatatgatctctacaacgtcattcagaagtccggagaatcccttcgagattacatccggcgattttctgaacaacgtaacaagatctctgacatcaccgacgacgtcatcatcgccgcgttcaccaaagggattcgtcacgaagaactagtcggcaagtttgggcgtaaacctcccagaacagtcaagctcatgtttgaaaaagccaacgagtacgccaaagccgaagacgccgtcaccgcatcgaagcaatcgggtcccagttggaaaccgaaaaatacgccggccacgggaggaggtggaagtaacaatcataaggaccgcaagcgtaagcctgaggaacttgttgcaaccgccgctcactcttctcgacagcgttcgcgcgtcaacaccttcgacaagatcatgaactcccaatgcccgcatcatccaaactccaaccacgtggccaaagagtgcttcatctacaagcagttcgcggagcagtacaccaagtctactcggaagaactccgacgaggaacaaagcacgtcaaggaagaaggatgacggcgacaccccggctggttttcaagatcaccgcaaggagctcaaccatatctttggcggccccctagcttatgaatctaaacggaagcagaagttaactgaacgggagatcaacgctgttcagcccgacacgccccagtatcttcgatggtcagagattgcaatcaagtttgaccgctcggatcatcccgaccgagtggtccacccggggcggtaccccctggtactagacccagtggtccgtaacgtcaagcttcgcagaaccctcattgatggcggcagtgcactcaatatcctcttcgccaagactttggatgatatgcagatccctcgctccgagttaaaatcaagcaatgcgccttttcatggagtaattccaggattatccgcaactccactcggccagatcactcttccggtcacttttggcactcgggaaaacttccgcacagagaatatcagctttgaagttgccgatttcgagacagcataccatgccatactcggacgcccggcgttagccaagttcatggccgtcccgcactacacgtacatgatgatgaagatgcctggtccccgaggagtcctgaccctacggagcgacatcaagcaagctgtcacatgcgacaaggagagttgcgacatggcccaaacccgcgagatagcgtctgcccgagaggaaatccgactggctgcaaccacggaaagcgcgctcatcacctttcttcaaaataataaagatatctttgcgtggaaaccttcggatatgcccggtattcccagagaggtgattgagcactccttacatgtcaaagaagacgccaagcctattaaacaacgactccgccgatttgcacaagacaggaaggacgcgatcaaggaggaattgaccaagttgttagcagcaggcttcatcaaagaagtccttcatcccgactggctggcaaacccggttctagttcggaagaaaacagggcaatggcgcatgtgtgttgattacactgacctcaacaagtcctgccctaaagatccttttgggttgcctcgcattgaccagatccgactgaaggaatccgaatccgactgcttgaagacttcattcatcacgccttttggggcatactgctacgtcaccatgccgtttggattaaaaaacgcaggagcaacctatcagcgcatgatccagagatgcttttcaacacagatcggccgcaacgttgaagcctatgtggatgacgtagtcgtcaagaccaagcaaaaggatgatctgatcttggatctagaagaaaccttcgcgagcatccgcgccttcaggatgaaattaaaccctgaaaagtgcaccttcggagtaccgtcagggaagctgcttggttttatggtgtctcataggggcgtccaagccaacccggagaaagttaccgctatcctcaacatgaaaccgccaagcacccagaaagatgttcagaagctgactggatgcatggcggcgctcagccgattcgtttcaagacttggcgagcgggggatgcccttcttcaagctactgaagaaaacagataatttccaatggggacccgaagcacagaaggccttcgaagatctcaaacaactcctcaccaagccgccggtcttagcttcaccacacccgcaggagccgttgttgctgtatgtatcagccacctcccaggtcgtgagcacagtcttggttgtcgaacgtgaggaagaaggccatgtccagaaagttcagcgaccaatctacttcgtcagcgaggtcctggccgactccaaagcgaggtaccctcaggttcagaagctgttatatggtattttaattactaccaggaagctgtctcattactttcaaggtcactcggtaacggtggtcacatcatttccactcggcgatgtactgcacaaccgcgaagcaaatgggcggattgctaagtgggctttggagttgatgtctttggacatatcattcaagccccgcacttcaatcaagtctcaagcgttagctgattttgtcgccgagtggaccgagtgccaagaggatacccccgtggagaaaatagagcactggaccatgcattttgacgggtcaaaaagactttcgggcactggagccggagtggttttaatttccccgactggagaaagactaagttatgtgctttggatacatttttcggcgtctcataacgtcgccgagtatgaggcgctccttcatgggctacggattgcaatttccctagggataaagcgtctaattgttcgtggtgattcacagctggttgtcaaccaagttatgaaagagtggtcctgcattgacgacaatatgatggcatatcgacaagaggtgcgcaaattggaagacaagttcgatggactcgagctcagtcacgttcttcgacacaacaatgaagccgccgacagacttgccaattttggatccaagcgcgagacggcgccctcagatgttttcgtcgaacacctttatacaccgaccgtacctcataaagataccactcaagatgcagacactcgtgacatagctatggttgaagccgactggcgagagcccttcatacgatttttaacttctcaagagctccctcaagacaaagatgaagccgagcggatttcaaggcggagcaaactttacgttttgcacgaatctgagttatacaagaaaagcccttcaggaattctgcaacgctgcgtttctttagaggaagggagacaattgctgaaagacatacattctgggatatgcggaaaccatgcggctgcgcgcaccattgtcggcaaagcttaccgccagggttttttctggcctactgcagtgtccgacgccgacaaaattgtgcgcacatgtgaaggttgccaattttttgccagacaaattcacttaccagctcaagagttgcaaactatcccgctgtcttggccgtttgcggtttgggggctcgacatggttggcccgtttaaaaaggcagtcggcggttacacgcatctctttgtggcctttgataaattttccaagtggattgaagctaaaccggttgtcacaatcacagcagataatgctcgcgacttcttcatccacattgtgcatagatttggagtgcccaatcggataatcactgataatggcacacaattcactggcggagtttttaaagacttttgtgaggactttggaatcaagatttgctatgcctccgtggcacaccccatgagcaatggacaggtggagcgagccaatggcatgatacttcaagggattaaagcacgtgtttttgaccggttaaaaccctatgccggcaaatgggtgcaacagttgccatcagtactttggtctttgcgaactacacccagtcgagccacaggccagtcaccttttttccttgtctatggggcagaagcaatgttgccgagtgaagttgaattcgaatctttgcgcttccgtaatttccgtgaagaacgctatgaagatgaccgagtggacgacttgcaccgactggaagaggtccgcgaagcagctttgattcagtcagctcggtacttacaagggttgcgacgttatcataatcgcaatgttcgatctcgtgcctttctagtcggcgacctggttttacggaaaattcaaaccacacgagatcggcacaagttatctcctctatgggaagggccgtttattatctctgaagttacccggccaggttcatatcgactcaagcgcgaagacggcactctcgtcgacaactcttggaacattgaacatcttcgtcgtttctacgcttaa

SEQ ID NO: 100727 - DNA, 395 bp, Oryza sativa
  Clone ID: PAT_MRT4530_98415C.1
tgttatttggaccaccatttttctgacgggaagaaatctgccacatgattatgacaaagcaaagtgactttgagaattttaccatgcgactttctgctacaattctgaaagctcagctgcaagccaggcagccagcaatatataccgcttggccgaaggatccaaatatctaatcagcaaggatgaaaagtagtactagtacaatagtgcaaaagtatagctttgtatcagggaccaaggctggcatacaccctgtgccgtttttcacatagcatttgtctaatctgaacccatcacactcatacgtttttgcttttctcgcacgcttaagatgagaaaaacagactggattaaagctggattaactattttatctttttgggggcaacctgaga

SEQ ID NO: 100728 - DNA, 5943 bp, Oryza sativa
  Clone ID: PAT_MRT4530_98416C.1
atgggaccgaaccccaagggaggagggggcaaccgcaactccaccccgggcctgaccctcctcgggaaagtgccacgtgggtctgggcgcagcctcctccctccaaactcgcgcggcggctacagcgtcgtcgtcgtcgtcgcgctggacatggaggccgcggcggcggcggtggcgtgggaagagccagcggcggcgagggacgcggaggccgcggcggtgctggacacggaggatgcgtcgacggcggcccctccatgtgccccccgcgagatggtcgtagcctgcgtccacggcggctccccgagccccgccatctgccgcgtcgaccgacacaaggtcgtccgtcgccagccaccgcaccatccgccgcgcatcgccaccgccgactgcaccgacgcccggccgcgccacgcgacgctcgccttccaccgccgcacggccgagcgacgcccttccgcactaggatcgcgcccgcgccgtcttcccgcgtcccctcacgaccacccgctgccgcttgacctgcgtcgagatgcacagaaggacttcacgttgctgattaaggagaatttggatgtgatcggtttgtgcgtctacatgtgctgggagggcgacgccgtcgagctgctatcgccgccgcgccgcctggagctcgccggccgctccgtggtcgtcccgtaccaccagatccgcgtcgccggcctggggaggagagccgccggccgtgctgacgtcagcaaggggcagccggcgccgacacgcgggccccacacgtcagcggcactaagaaagggagaggggcggctggcaagcgggccccactggcagcggctctataggggaaaggagagggaggggtggtccaccggctggtgggccccaccgggcagtggctcaaggggaggcgagggaggcgccggccgggctcggctcggcctcaaagccgaccggcggccatggcgaccggcggcggcacgcgcggtcaccggcggtgaccggcagcgcgggagacggcggcggccggcgcgaaggcggcggcggcggccgaagacgacggcgcacgcgcggaggacggcggtgctcatgggagagagaggaaaggaaggaggagaggggattcctcaccggcgaacacggcggccggcgcgaagggagaaaacggcggcgacgaccggtgatgccgaggcgcgaacgggcggcggcggcaccctaggagagagcatagaggggttagggaagggaaggcgaccatggcggcttgaattgccggccggagacggaggggagagagggtctcaccggcgcgcgaggagaaaaaaggctccggcggtgattcgcggcaatgaagcggcggccgaggtgcgggcgggctcggtgagcgcgacggcggcgatggtgcggcgcggcggcggctctagcggcggcggctcgcggctgactgaaggcggtgtgtggcgaccgagggagcgacggcgaagccggggagcggcggatttcgaggggaagtggggcggcgtcgtgggggagagagagacgcgggaggcggcgacgtggccggattttgcggggagagtgggggaacggcgcggacgagagcggcgaggtcccacggacgagcgcgcgcgcggggtggaggaggtgggcggaaaccgcggcgtcgtggggcagctaaggcggccatggcggcggtttcggctgagggagccggaggttaggggtggccctgacaggtggggcctcggcaaggggcagccggcgccgacacgcgggccccacacgtcagcggcactaagaaagggagaggggcggctggcaagcgggccccactggcagcggctctataggggaaaggagagggaggggtggtccaccggctggtgggccccaccgggcagtggctcaaggggaggcgagggaggcgccggccgggctcggctcggcctcaaagccgaccggcggccatggcgaccggcggcggcacgcgcggtcaccggcggtgaccggcagcgcgggagacggcggcggccggcgcgaaggcggcggcggcggccgaagacgacggcgcacgcgcggaggacggcggtgctcatgggagagagaggaaaggaaggaggagaggggattcctcaccggcgaacacggcggccggcgcgaagggagaaaacggcggcgacgaccggtgatgccgaggcgcgaacgggcggcggcggcaccctaggagagagcatagaggggttagggaagggaaggcgaccatggcggcttgaattgccggccggagacggaggggagagagggtctcaccggcgcgcgaggagaaaaaaggctccggcggtgattcgcggcaatgaagcggcggccgaggtgcgggcgggctcggtgagcgcgacggcggcgatggtgcggcgcggcggcggctctagcggcggcggctcgcggctgactgaaggcggtgtgtggcgaccgagggagcgacggcgaagccggggagcggcggatttcgaggggaagtggggcggcgtcgtgggggagagagagacgcgggaggcggcgacgtggccggattttgcggggagagtgggggaacggcgcggacgagagcggcgaggtcccacggacgagcgcgcgcgcggggtggaggaggtgggcggaaaccgcggcgtcgtggggcagctaaggcggccatggcggcggtttcggctgagggagccggaggttaggggtggccctgacaggtggggcctcggcaaggggcagccggcgccgacacgcgggccccacacgtcagcggcactaagaaagggagaggggcggctggcaagcgggccccactggcagcggctctataggggaaaggagagggaggggtggtccaccggctggtgggccccaccgggcagtggctcaaggggaggcgagggaggcgccggccgggctcggctcggcctcaaagccgaccggcggccatggcgaccggcggcggcacgcgcggtcaccggcggtgaccggcagcgcgggagacggcggcggccggcgcgaaggcggcggcggcggccgaagacgacggcgcacgcgcggaggacggcggcgctcatgggagagagaggaaaggaaggaggagaggggattcctcaccggcgaacacggcggccggcgcgaagggagaaaacggcggcgacgaccggtgatgccgaggcgcgaacgggcggcggcggcaccctaggagagagcatagaggggttagggaagggaaggcgaccatggcggcttgaattgccggccggagacggaggggagagagggtctcaccggcgcgcgaggagaaaaaaggctccggcggtgattcgcggcaatgaagcggcggccgaggtgcgggcgggctcggtgagcgcgacggcggcgatggtgcggcgcggcggcggctctagcggcggcggctcgcggctgactgaaggcggtgtgtggcgaccgagggagcgacggcgaagccggggagcggcggatttcgaggggaagtggggcggcgtcgtgggggagagagagacgcgggaggcggcgacgtggccggattttgcggggagagtgggggaacggcgcggacgagagcggcgaggtcccacggacgagcgcgcgcgcggggtggaggaggtgggcggaaaccgcggcgtcgtggggcagctaaggcggccatggcggcggtttcggctgagggagccggaggttaggggtggccctgacaggtggggcctcggtgtaatgggttccgtctccggcatcgacgacttcgtcttccctcccgggcaggcgtttcggttcggcagcctcgacttcatcaccaatgacttcggcaatatctctctcctcgactcggattcgaaccagtcgggagagaaccgggtctcagccccgtttggagttccgaactcggccaagatctactccaagttcatcttgatcgagtcggcttcaaaccactcggacgagatctcatcttcttcaacgtcaccagatcgagacgatgaggcttacccactgatcctaatgaagctccccgatgatttggcggccgtcttcaccacaacgacgtcttctccccgtaggcctaggcagaggtcggcttcaacaccaatctcgcttagctccagggaagtcggcgtcattctccagccactcgcgtcttcatggccgataatgagacggaggaacaacgccaagcccgagaagccgaagcacgacgagaggccgaacgacgctgactggaggaggagcgtcaagcacaagaacaagaacggctgcggcgtgagcaacaagaacgcgagcgggccacaaaggaggctgaagaccgacgacaacgagccttggatgcaggtgacaccggttaaggggacaccggttttccgtaccccacaacagaacgctgtcgccgcgatcaccctcctcgacaccctcctcaaggaaaacgagctcaatcaatccgatcatgtcgtcaatatcttgaaccagaccaagaccacgatcgtcgcttcggtcccggttaactccggaagcgtccgcacaccgactggcagccgggtcccccattttcgatctcatgattaccaccagccaagcctcagcatcgccggcgcaggatccaatcgcaggagtaggggccacgacgagcgatctgtccactcgcctcccgaacaccacagggagcgccgggttgaacgacctcgctcgccgcctcgccgccgccccgtcgatctacgcgacacgatcattcagcgccgagcagcacgaggccaccgccattcaccggatcgctatgacgatgacctagatggagttgccgctttcaccaacgacctgcgtcgagtggattggccagccggctttaagccgactggaatagagaagtatgacggtaccaccaatccgaagtcatggcttaccgtctacggtctcgcaatccgcgcagcaggaggagatagcaaggctatggcaaattatttacctatggctttagcggattctgcccggtcctggctccatggattgccccgtggtacaattggatcttgggccgaacttcgcgaccacttcattgccaacttccaaggcactttcgagcgccccggcacacaatttgacctttacaacgttattcagaactccggagaatcccttcgagattacatccggcgcttttctgaacaacgaaacaagatctccgacattaccgacgatgtcatcatcgccgccttcaccaaaggaattcgccatgaagaattggtcggcaagttcgggcgcagacctcccaaaactgtcaaacttatgtttgaaaaagccaacgagtacgccgaagctgaagacgccgtcatcgcatcaaagcagtcgggccctagttggaaaccaaaaaaggatgcgccgactatgggagggggtggaagtaacaatcacaaggaccgcaagtgtaagcctgaggaacttgttgcaaccactacgcactcctctcgacagcgttcgcgcgtcaacacgttcgacaaaatcatgaactctcaatgtccgcatcatcccaattccaaccacgcggccaaagattgcttcgtctacaagcagttcacggaacaatacgccaagaatacacggaagaactctaacggagagcaaagcacgtcgaagaagaaggatgacgatgacgccccgacagagacaacaatcaagttcgaccgctcggatcacgctgaccgagtggtccacccggggcggtacctcctggtaatagacccagtggtccgcaacgtcaagcttcgcagaaccctcatcgatggtggcagcgcattaaatatcctcttcgccaagacccttgacgacatgcagattccccgctctgagttaaaaccgagcaacgcgccctttcacggagtcatcccagggctatctgcaactccactcggctag

SEQ ID NO: 100729 - DNA, 5961 bp, Oryza sativa
  Clone ID: PAT_MRT4530_98417C.1
atgggtcctttctccggcatcgacgacctcgtcttcccacccgggcagacgtttcggttcggcagcctcgacttcgtcaccgacaacttcggcaagatttctctctttgactcggaatcggaccagtcgggagagaaccggatctcagtcccgtttggattcccaaacgcggctgaaacctacttcaagaccatctcaatcgagtcggcttcaaaccactcggctgagatcgcatcttctccaacgacgccagatcaagatgatggggcttacccaccgatcctgatgaagctccccgacgatctagcggccgtcttcaccacgacagcgtcttcatcccgtaggcctaggcggaagtcggcttcaacaccgatttcgcctagcttcagggaagtcggcgtcatcctccaaccactcggcacggtttcgacggatcagctggatgactacaacagctctcccaccgtcgactcacgtcctactgacatcgtggagtacgacgaatttagttctcgctacaacgacttcgacgacttcaacgacttcgacggaagcctagatgacaattacacccctctctactttggcgttttcatggccaataatgagacggaggagcaacgccaagcccgggagactgaagaacgtcgccgactggaggaggagcatcaagtacaagaacaagaacggctacggcgtgagcagcaggaccgtgagcggatcgccaaggaggctgaagatcgacgtcagcgagctttggaagcagggcgccgagcgcgtgatctcatcggacaacaagacgtcgaagggacgccggttttccgtacccctcaacagaatgcggttgccgcgatcacccttctcgacaccctcctcaaccaaaacgagctcaatcgttccgaccacgtcgtcagcatcttgaaccagacgaagaccatgatcgcggcttcggtcccagttaactccgaaagcgtccacacgccgactggtagccgagtaccccacttccgatctcatgattaccgtcatccaagcctcagcatcaccggcgcaggatccaaccgcaggagcaggggtcgcgacgagcggtctgttcactcgcctcccgaacttcatagggagcgccgagtggaacggcctcgctcaccacctcgtcgccgccccatcgatcttcgcgacacaatcatacagcgccgagcagctcgagtctaccatcactcgccggaccgccacgacgacgaccttgacggagtagcagccttcaccgacgacctgcgtcgagtggattggccagccggcttcaaaccgactggaatagagaagtatgacggtaccactaatccagaatcgtggcttaccgtctacggtctcgcaatccgcgcagcaggaggagacaacaaggccatggcgaactatttaccagtggctttggcggattccgcccgatcttggctccatggattgccccgtggtacgatcggatcttgggctgaattacgcgaccacttcatcgccaacttccaaggcaccttcgagcgtcctggcacacaatatgatctttacaacgttatccagaaatccggagaatcccttcgagagtatatccgacgattttctgaacaacgtaacaagatctccgacatctccgacgacgtcatcatcgccgcattcaccaaagggattcgccacgaagaattggtcggcaaatttgggcgcaaacctcccagaacagtcaagctcatgtttgaaaaagccaacgagtacgccaaagccgaagacgccgtcaccgcatcgaagcagtcgggtcccagttggaagccgaaaaatgcgccggctaccggaggaggtggaagtaacaatcataaggaccgcaagcgtaagcctgaggaacttgttgcaaccgccgctcattcttctcgacagcgttcgcgcgtcaacaccttcgacaagatcatgaactcccaatgcccgcatcatccaaactccaaccacgtggccaaagagtgcttcatctacaagcagttcgcggagcagtacaccaagtctactcggaagaactccgacgaggaacaaagcacgtcaaggaagaaggacgacggcgacaccccggctggatttcaagaccaccgcaaggagctcaaccatatcttcggcggccccctggcttatgagtctaaacggaagcagaagttgactgaacgggagatcaatgctgttcagcccgacacgccccagtatcttcgatggtcagagattgcaatcaagtttgaccgctcggatcatcctgaccgagtggtccacccggggcggtaccccctggtactagacccagtggtccgtaatgtcaagcttcgcagaaccctcattgatggtggcagtgcactcaatatcctcttcgccaagaccctggatgatatgcagattcctcgctccgagctaaaaccaagcaatgcgccttttcacggagtaattccaggattatccgcgactccactcggccagatcaccctcccggtcacttttggcactcgggaaaatttccgcacagagaacgtcagctttgaagtcgccgatttcgagacagcataccatgccatactcggacgcccggcgttagccaagttcatggccgtcccgcactacacttacatgatgatgaagatgcctggtccccgtggagtcctgtccctacggagcgacatcaagcaagccgtcacatgtgacaaggagagttgcgacatggcccaaacccgcgagatggcgtctgcccgagaggaaatccgactggctgcaaccacggaaagcgcgctcatcacctttcttcaaaataataaagatatctttgcgtggaaaccttcggatatgcccggtattcccagagaggtgattgagcactccttacatgtcaaagaagacgccaagcctattaaacaacgactccgccgatttgcacaagacaggaaggacgcgatcaaggaggagttaaccaagctgttagcagcaggcttcatcaaagaagtccttcatcccgactggctggcaaacccggttctagttcggaagaaaacagggcaatggcgcatgtgtgttgattataccgacctcaacaagtcttgtcccaaagatccttttgggttgcctcgcattgaccaggtagttgactcaaccgccggctgtgagcttctcagttttttggactgctactcggggtatcatcagatccgactgaaggaatccgactgcttgaagacttcattcatcacgccttttggtgcatactgctacgtcaccatgccgtttggattaaaaaatgcaggagcaacttatcaacgtatgattcagagatgcttctcaacacaaattggccgcaacgttgaagcctatgtagatgatgtagttgtcaagaccaaacaaaaggatgatttgatttcggatctagaagaaacctttgcgagcatccgtgctttcaggatgaaattgaaccctgaaaagtgcaccttcggagtaccgtcagggaagctgcttggttttatggtgtctcatacgggcatccaagccaacccggagaaagttactgctatcctcaacatgaaaccgccaagcacccagaaagatgttcagaagctgactggatgcatggcggcgctcagccgattcgtttcaagacttggcgagcgggggatgcccttcttcaaactactgaagaaaacagataatttccaatggggacccgaagcacagaaggccttcgaagatttcaaacaactcctcaccaagccaccggtcttagcttcaccacacccgcaggagccgttgttgctgtatgtatcagccacctcccaggtcgtgagcacagtcttggttgtcgagcgtgaggaagaaggccatgtccagaaagttcagcgaccaatctacttcgtcagcgaggtcctggccgactccaaaacgaggtaccctcaggttcagaagctgttatatggtattttaattactaccaggaagctgtctcattactttcaaggtcacccggtaacggtggtcacatcgtttccactcggcgatgtactgcacaaccgcgaagcaaatgggcggattgctaagtgggctttggagttgatgtctttggacatatcattcaagccccgcacttcaatcaagtctcaagcgttagctgattttgtcgccgagtggaccgagtgccaagaggatacccccgcggagaacatggagcactggaccatgcattttgacggatccaaacgactttcgggcactggagcaggagtggttttgatttccccaactggagaaagattgagctatgtgctttggatacatttttcggcgtcccacaatgtcgccgagtatgaagccctccttcatgggctacggcttgcaatttccctagggataaagcgtttaatagttcgaggcgattcacagctggttgttaaccaagttatgaaagagtggtcctgcctcgacgacaacatgatggcatatcgacaagaggtacgcaagttggaagacaaatttgatggactcgaactcagtcacgttcttcgacacaacaatgaagccgccgacagacttgccaattttggatccaagcgtgaggcggcgccctcagatgttttcgtcgaacacctttatacaccgactgtacctcacaaagataccactcaagttgcgggcactcatgatgtcgctatggttgaagccgactggcgagagcccttcatgcgatttttaacttctcaagagctccctcaagataaagatgaagccgagcggatttcaaggcggagcaaactttatgttatgcacgaatctgagttatacaagaaaagcccttcaggaattctgcaacgctgtatatctttagaggaagggagacaattgctgaaagacatacattctgggatatgcggaaaccatgctgctgcgcgcaccattgttggcaaagcttaccggcagggttttttctggcctactgcagtgtccgacgccgacaaaattgtgcgcacatgtgaaggttgccaattttttgccagacaaattcatctaccagctcaagagttgcaaacaatcccgctgtcttggccgtttgcggtttgggggctcgacatggttggcccgtttaaaaaggcagtcggtggttacacgcatctctttgtggccattgataaattctccaagtggatcgaagctaaaccggttgtcacaatcacagcggacaatgctcgagacttcttcatcaacattgtgcatagatttggagtgcccaatcggatcatcaccgataatggcacacaattcactggcggagtttttaaagacttttgtgaagattttggaattaagatttgctacgcttcagtggcacatcccatgagcaatggacaggtggagcgagccaatggcatgatacttcaagggattaaagcgcgtgtttttgaccggctaaaaccctatgccggcaaatgggtgcaacagctgccatcagtactttggtctttgcgaactacacccagtcgggccacaggccagtcaccttttttccttgtctatggggcagaagcaatgttgccgagtgaagtcgaatttgagtctttgcgcttccgtaatttccgtgaagaacgctatgaagaagatcgagtggacgacttgcatcgactggaagaggtccgcgaagcagctttgattcagtcagctcggtacttacaagggttgcgacgttatcataatcgcaatgttcgatctcgtgcctttctagttggcgacctggttttacggaaaattcaaaccacacgagatcggcacaagttatctcctctatgggaagggccatttattatctctgaagttacccggccaggttcatatcgactcaagcgcgaagacggcactctcgtcgacaactcttggaacattgaacatcttcgtcgtttctacgcttaa

SEQ ID NO: 100730 - DNA, 3209 bp, Oryza sativa
  Clone ID: PAT_MRT4530_98418C.1
ttttttttttttttttgctacaatgttacatggtgtactcttatttatcacctgatgagtaacctgcagatggtacatcaatccttctgtacattatgaagtactcctaaatacatctactcaatgcaaagttttcaccacaaaaaacagctcgaggaacttacaaaaatatttacattagaactctgaactctgaattctgaagcagagaagccaaacaaaaccaaagaaacctatggccatgggagtcctcaccagtggccggttattaacggagtactcactcgatcgtcgtcgtctctacttgtcgttgcagtagaggtggccaccgagggcgtccttgatcgccgcaatggcggccaggtacctgctcctccgctccaggtacctcccctctcgcgccagccgcgccgccgcgtcgtccagccggagcagcgcctgctgctcctcccggtcctccacgacctccctcgccacggcgaacgacagcgacgacggggagcaagtcgcgcggaacggcagcggcggccggctccacccgagcttgtccgacagcgccgccacgttcttgagctgctcctccactcgctccacgaggtggcgcaccatgtcgccgccgccgtcgccgccgcgttcttggctgggcggcgcgtcggccaggggctggaccctcgcgaccacgtacggcttcgtcctgacggcgccgacgacgcggaaccggtcgccgccgacgcaggtgaggaagaaccggccgtcgacgagccgctcgcactccaccacgtgcgccacgcaccccacctcgccggccgccaccccgccccccaccccgccgccggagtacacgacgccgaacctggtgaccccctcctggagcagcgtgtgcaccatgatccggtaccggaactcgaacgcctggagctgcaccgtcgcgccggggaagaccaccgacgggaacagaacgatggggatctccaccgcctgctcctgccgcctcctcgacgccgccgcggcgccctcgtccacgcagccgtgcaggctgctgccgcccctgcattcgaggcgcctctctccggcgacacttgcggcgagccgtgccgatgcaggctttggccgcagagaaaactgagacgacgacgacgaagaagaagaagaaccgatgaagctgcggttgatcggccttgcaaagctagatggaacttgcagcgtcttgagggccatataagtgatcaaatacttcactttatttgtttcaatctgatgatgagctcgccactccgtggtcggtagaggtaactccggcatggccgcgttcgctaagcgccaaagctcggcctcggccgccatcacctttgccacttcgacccaggtcttttgctgttggttgaagaccctgttgttccgctccttccaaatagtccaagctatcaaagctgcaacggtgtcgaatcctcgtcgttgagctttggcaaccttcattctcttgtcacaaagccataagaggaaggagggttcgttgaatggcagtatgtccgacaagccaattgctcggagtgcgaaccaccacagttgacgtgactccaggcatgcgaccaggagatgatcaatcgtctcgtcaccttgatcacacaggacgcaccgatcaggatgtggtaaaccccgtctccgcaaacgatcggctgtccaacatctgtttagtgccacttggagtgcttcgcgaaccgtcctacgattccgctttcttgctacgaccgctgcatgcacagccggcgcaagggtgcggattgacgacccttggatccagttgtcttcccagaagagcacgttcattccattgccgactcgacatgtcaaagagacttggagcaggttcctctccttatcgattccctttatcacccactttggcacattgatggccatcagcagatagatcggtattgagattaataccgcatttaccatagtgactcgaccaatgggcgccatctgctctgccttccataccggcaaccgacgggctatttctgtagttccattgtatgactgtaccatatctacttgtatatgtctaacacaatgatgcctctcaccgaatgcattcagcataacatttccttttcccatttcattttcttcagacatctctgaagtctgcacctgtacgccgtagcgccgcgctcgccgagctccgccgccgccgcccatctccggccgcatgccgtcgccactagggccgccgccgcgccaagctgccgccgccgctagctccgccgccgtgtgggccatctcggccaccgcctcgcgtcgccggaaccccaccggaaccccatctccctcgcgagccggggagctatccattcccctccgtctccggccagccactttggtcgtcgcggtcgccttctccatccctaactcctctcctcccctcctctgggtgtcgccgccgctcgtccgcccctcctctcgtcgggtcgtcgtcgccgccttcgtcttccgctcgcgagcgccggccacgccgctgctccggccatgcgccgccgcctttcggccgtcgccgccgcttcccacaccgccggtcaccgccgtcggtggccgtgcctcgccgccgcctcgccttggtcggccggtcggccacaagcgggagtgggtaactgcttgatctgaagtatagctcgaccctttcctaggcaccggtggcgagggtgggcgtgatggagttgggtcggccgaggtgttcggttgtccagcagagttgaagttcttcttagttggagccgtctcagagaggttggtttcgtcgctgccgtcaaggtttgcctgtggagtggagtcgcccgctgctgaagtcaagcttcccggtttagctcgctttaatctttcccgctgcatttgtaatcttttatatttttgtaagatgtgggtctgtatgtcaacaattgtcgtttgtgtaccctggctggtccgatattgtcgatgacgtattgagagagaaaaaaaatggacacagccggcaagaggtaatgggtagcaccgcccgcggccgacacagcagggccgaggaggattccgccgccgccacctccaacaagaagcttttctttttctcgtcgccggccgggcgtcacgagcggccagctcgtctcgtggcgtgcatggatgcatgcatgctgctcacgcgtgaccgatcggtccgatcgaatcgccat

SEQ ID NO: 100731 - DNA, 1114 bp, Oryza sativa
  Clone ID: PAT_MRT4530_98419C.1
gaccagccagggtacacaaacgacaattgttgacatacagatccacgtcttacaaaaatagaaaagattacaaatgcagcggaaaagataaaagcgagctaaaccgggaagcttgacttcagcagcgggcgactccacttcacaggcaatccttgacggcagcgacgaaaccaactttgacaaaacagctccaactaggaagatcttcagctctggtgtggggaaaaagagagcaagactgagtactacccactgtactcagcaagtcataccggaagaggaggcagtgggcggtcccctcttgcgccgcggtgaatccggcagctggataaccggacaccccggccgacccaactccatcacgcccaccctcgccaccggtgcctaggaaagggtcgagctatacttcagatcaagcagttacccactcccgcttgtggcgggccccactggtcagcggcactaagggagggagagggggcggctggcaagcgggccccactggcagcggcacaaggggagagggagggggcgtcggcatgtgggccccactggtggcggctaaaagggaggggtggtccaccggctggtgggccccaccgggcagcggcacagggcgggagaggggcgtggctgttggcttggcacggctcaagccggccggccatggcgaggcgacgacggcgcacgaccgccggcggtgaccggcggcgcggggagacggcggcggccggcgcgaaggcggcggcggcagccgaagacgacrgcgcacgcgcggagggcggcggcgctcacgggggagaggaaaggaggaggaaaggggattcctcaccggcgagcacgacggccggcgggaaggcgaccatggcggcttgaattgccggccggagacggaggggagagagggtctcaccggcgcgcgaggagaaaagggctccggcggtgattcgcggcaatgaagcggcggccgaggtgcgggcgggctcggtgagcgcgacggcggcgactgcgcggcgcggcggtggctatagtggcggcggcgcgtggccggagacggcggtaggcggcggcgcaagggggcgagcggcgcggcgacgataggaagcacgggagg

SEQ ID NO: 100732 - DNA, 599 bp, Oryza sativa
  Clone ID: PAT_MRT4530_9841C.1
tccagctttgcttcttggcgttgtccttgtcgatctcctgccaggtacctgcttggcttttcaggtgaggtctcgtcaggttcgtcccgagggttgcagtgtgcgtgctggccatgttcttccccagggatcccctgtgctggccggccgtggtgtctccccgggcacccctgtgggggttggcggcggagtcttggcttacacccttttaggagttgactacaacgaatccagtggtgattgtgcttttctcatccttgatccacactatactggtgctgatgatctcaagaagatcgtgaatggtggatggtgtgggtggaagaaatccatcgacagcaaaggccgtagcttcttcctgaaagacaagttctacaaccttctgctaccccaaaggcctaatatggtgtaaaacctgcatcgctatgacacctctatggatcaaagagagtggtttgtacatcgctatgaagagagcttcttgatcagtgtaaaaacttgctaagcaaactatttttcgctgtcggagcctggtttgtacatcttatcttgcatggagaaactagagctacagttgccggcaaaaaacctcgtgcaaa

SEQ ID NO: 100733 - DNA, 1015 bp, Oryza sativa
  Clone ID: PAT_MRT4530_98420C.1
cccatgatactgcaaaggagagaaatcgtgacaagacctcggaataccctcccctaacatccacaccacgttagggtttcaccctcacccctcaaaagacagtgggtggtcccctcttgcgccgcggtgaatccggcagttggacaccgggacaccccggctgacccaactccatcacgcccaccctcgccaccggtgcataggaaagggtcgagctatacttcagatcaagcagttgcccactcccgcttgtggtaagcacgtaaatccccagggcggatgtcagcgaaagggggggcagcttggcaggcggggttcacgggtcagcggctcaaagggggtggtccaccgtggaccgggtccacggggccggggtggtgccaagccatgggatggacggccacgatcggccgagggccgatcgggcggctggggacgggcgacaccgaggccaacccgggcatggcacacggtggcgaacggcggccggtgaccggcgaccggccggtggcagcggccggcaacgcggacggcggcgcagtgcgatggcacgcatgcggggagcggcggcgcgcacgagagaggagtggaaggggaggaaaagggggtcctcaccggagaggcgacgatgaccggcgcgggaagagacgagcggcggcggcgcttcggacaatggcggacggggtcgggcacaacctgggaaaagcgatgaccgggttaggagaagggctcaccggcgtgcgagggaagcggcgcttcggcgatgtttggtggcaaaccagcgaccgccgatgtagcggccgtggttgcataacgccgcggcgaagctatcaacgacagcgcgcggtccgaggtttgccgcgggcggcggaactcggtgtgacatcctgggccccgtagggggcattggaaaggaccgccaatggggggaaccaaagaggtgacttcggggagtggatttatgggcgccggaaggccgaaaacggtggggtggccccctttttggccgggacgt

SEQ ID NO: 100734 - DNA, 246 bp, Oryza sativa
  Clone ID: PAT_MRT4530_98421C.1
atggcggtttccgtcggcgccggcggcactaggggttgcggcagcccaggacggcggtggctcccgtcggtgccggggctacggtggcccaggacggcggcggctctaggggttgcggtggctcaagacggtggcggtctgagcactttggatagtagatccttaggaatccgctcacctgaaactgatgaagatgacacaaatggaggttttcatcaacggtgcactaggggcgacagcgactag

SEQ ID NO: 100735 - DNA, 415 bp, Oryza sativa
  Clone ID: PAT_MRT4530_98422C.1
ttgtttttttttttttttttttttttttttttttttttttttttttttttttaccccattataaggactataattaagttccctcaaaagataaggtctacaattttttaaatacgaaccactccgataatttataggtggggggggtaatcacagctaagcaatggattggttggacatgatgctgtcttccacgaacgccctgttttcaccgacgaggttccggatgtcgccggcaaactccgggaagaagtaaaaggggtgtttggcctccgggaactccaccacccggaccggtttaccctttcggcgaaggatggcggggtacctccggtcccagttttgtagagggttgagggccccgacgaccaccattgggggggggaacgctttttggagctggggctccgggccc

SEQ ID NO: 100736 - DNA, 6018 bp, Oryza sativa
  Clone ID: PAT_MRT4530_98423C.1
atgggttccgtctccggcatcgacgacctcgtcttcccacccgggcagacgtttcggttcggcagcctcgacttcgtcaccaacaacttcggcaagatctctctccttgactcggtgtcggcccagtcgggagagaaccggctttcggtcccgtttggactcccaaacgcggccgaaagttacttcaagaccatctcaatcgagttggcttcaaaccactcgggcgaaatcgcatcttccccaacgacaccagatcaagatgatggggcttacccaccgatcctaatgaagctccccgacgattcggcggccgcccccatcacgacagcgtcttcatcccgtaggcctaggcggaagtcggcttcaacgccgatttcgcctagcttcagggaagtcggcgtcatcctccaaccactcggcacggtttcgacggatcagttggacggccactacagctctcccaccgtcgactcgcgccccacagacatcgtggagtacgacgagtttagctctcgctacaacgaaccggatctcgacgacttcgacgaaagcctagatgacaactacacccctctctacttcggcgtcttcatggccgataacgagacggaggagcaacgccaagcccgggagaccgaagcacgtcgcgaggctgagcgtctccgactggaggaggagcgtcaagcacaagaacaagaacggttacggcgtgagcagcaggagcgtgagcggaccgcgaaggaggctgaagatcgacgacagcgagctttggaagcagggcgccgagcgcgtgatctcatcggccaacaagatgttgaagggacaccggttttccgcacccctcagcagaatgcggttgccgcgatcaccctcctcgacaccctcctcaaggaaaacgagctcaatcaatctgatcacgtcgtcaacatcttgaaccagacgaagaccatgattgcggcttcggtcccagttaactccgaaagcgtccacacgccgactggcagccgagttccccacttccgatctcatgactaccgtcatccaagcctcagcatcaccggcgcaggatccaatcgcaggagcaagggtcacgacgggcggtccgttcactcacctcccgaccatcatggggagcgccgagtggaacggcctcgctcaccacctcgtcgccgccccgtcgatcttcgcgacacgatcatacagcgccgagcagctcgaggccatcatcattcgccggaccgccacgacgacgaccttgacggagtagcagccttcaccgacgatctgcgtcgagtggattggccagccggcttcaagccgactggaatagagaagtacgacggtaccactaacccagaatcgtggcttaccgtctacggtcttgcaatccgcgcagcaggaggagacagcaaggccatggcgaactatctaccagtggctttagcggattccgcccgatcttggctccatggattaccccgtggtacaatcggatcttgggccgaattacgcgaccacttcatcgccaacttccaaggcaccttcgagcgtcccggcacacaatacgacctctacaacgttattcagaagtccggagaatccctcagagattacatccggcgattttctgaacaacgtaataagatctccgacatcaccgacgacgttatcatcgccgctttcaccaaagggattcgccacgaagaattggttggcaagttcgggcgtaaacctcctaggacagtcaagcttatgtttgaaaaagccaacgagtacgccaaagctgaagacgccgtcaccgcatcaaagcagtcgggtcctagttggaagccaaataagggtacgccggctacgggaggaggtggaagtaacaatcataaggaccgcaagcgtaagcctgcggaacttgttgcaaccgccagtcactcttctcgacagcgctcgcgcgtcaacacgttcgacaagatcatgaactcccaatgcccgcaccatcctaactccaaccacgtggccaaagattgtttcgtctacaagcaattcgcggatcaatacaccaagactacacggaagaactccgacgaagaacaaagcacgtcgaggaagaaggacgacggcgacgccccggcaggatttcaagaccaccgcaaggagctcaaccatatcttcggtggccccttggcttatgagtctaaacggaagcaaaagttgaccgaacgggagatcaatgctgttcagcccgacacgccccagtaccttcgatggtcagagattgcaatcaagtttgaccgctcggatcatcctgaccgagtggtccacccggggcggtaccccctggtactagacccagtggtccgtaatgtcaagcttcgcagaaccctcatcgacggtggcagtgcactcaatatcctcttcgccaagaccttggatgatatgcagattcctcgctccgagctaaaacccagcaatgcaccttttcacggagtaattccaggattatccgcaactccactcggccagatcaccctcccggtcacttttggaactcgggaaaacttccgcacagagaatatcagctttgaagttgccgatttcgagacagcataccacgccatactcggacgcccggcgttagccaagtttatggccgtcccgcactacacttacatgatgatgaagatgcctggtccccgaggagtcctatccctacggagcgacatcaagcaagccgtcacatgcgacaaggagagttgcgacatggcccaaacccgcgagatagcgtctgcccgagaggatatccgactggctgcagccacgacgagcgaaggagaaatgcccgctaccaagacttcaaaaagcggagaaagcgaagctaagactaaaaagattcccctagatccctctgattctactaaaactgctaacaataaagatatctttgcatggaaaccatctgatatgcccggtattcctagagaggtgattgagcactccttacatgtcaaagaagatgcccagcctatcaaacaacgactccgccgatttgcgcaagacaggaaggacgcgatcaaggaggaattaaccaagctgttagcggcaggcttcattaaagaagtccttcatcccgactggctggcaaacccggttctagtacggaagaaaacggggcaatggcgcatgtgtgttgattatactgacctcaacaaatcttgccctaaagatccttttgggttgcctcgcattgaccaggtagtcgactcgaccgccggctgtgagcttctcagttttttggactgctactcggggtatcatcagatccgactgaaggaatccgactgcttgaagacttcattcatcacgccctttggagcatactgctacgtcaccatgccgttcggactaaaaaacgcaggagcaacttatcaacgtatgatccagagatgcttctcaacgcagatcggccgcaacgttgaagcctatgtggatgatgtagttgtcaagaccaagaaaaaggatgatttgatctcggatctagaagaaaccttcgcgagcattcgcgctttcaggatgaaattaaaccctgaaaagtgcaccttcggagtaccgtcagggaagctgcttggttttatggtgtctcataggggcatccaagccaacccggagaaagttactgctatcctcaacatgaaaccgccaagcacccagaaagatgttcagaagttgactggatgcatggcggcgctcagccgatttgtttcaagacttggtgagcgggggatgcccttctttaagctactgaagaaaacagatgatttccagtggggacccgaagcacagaaggccttcgaagatttcaagaaactcctcaccgagccaccagtcttagcttcaccacatccgcaggagccgttgttgctgtatgtatcagccacctcccaggttgtgagcacagtcttggtcgttgagcgcgaggaagaaggccatgtccagaaagtccagcgaccgacttactttgtcagcgaggtcctagccaactccaaaacgaggtaccctcaggttcagaagctgttatatggtattctaattactaccaggaagctgtctcactactttcaaggtcactcggtaacggtggtcacatcatttccactcggtgatatactgcacaaccgcgaagcaaacggacgtattgctaagtgggccttggagttgatgtctttggacatatcattcaagccccgaatttcaatcaagtcccaagtgttagctgattttgtcgccgaatggaccgagtgccaggaggatacccccgcggagaagatggagcactggaccatgcattttgacgggtcaaaacgactttcgggcattggagcaggagtggttttgatttccccaactggagaaagattaagctatgtgctttggatacatttttcggcgtcccacaacgtcgccgagtatgaggccctccttcatgtgctgcgaattgcaatttccctagggataaagcgtctaatacttcgaggcgattcacagctggtcgtcaaccaagttatgaaagagtggtcctgccttgacgacaacatgatggcatatcgaccagagctcagtcatgttcttcgacacaataatgaagccgccgacagacttgccaactttggatccaaacgcgaggcggcaccctctgatgttttcgtcgaacacctttatacgccgacggtacctcacaaagatactactcaagttgcgggcattcatgacgtagttatggttgaagccgactggcgagagcccctcatacgatttttgacttctcaagaactcccccaagacaaagatgaggccgagcggatttcgaggcggagcaaactttatgttatgcatgaagctgagttgtacaagaaaagcccttcagggattctgcaacgctgcgtatctttagaggaagggagacaattgctaaaagacatacattctgggatatgcggaaaccatgctgccgcacgcaccattgtcggcaaggcttacctgcagggtttcttttggcctactgccgtgtccgacgccgacaaaattgtgcgcacgtgcgaaggttgccaattttttgccagacaaattcatctaccagctcaagggttgcagaccatcccactgtcttggccgtttgcggtttgggggctcgacatggttggcccgtttaaaaaggcagtcggtggttacacgcacctctttgtagccatcgacaaattctccaagtggattgaagctaaaccagttgtcacaatcacagcagataacgctcgagacttcttcatcaacattgtgcatagatttggagtgcccaatcggatcatcactgataatggcagacaattcacgggcggagtttttaaagacttttgtgaagactttggaattaagatttgctatgcttcagtggcgcatcccatgagcaatggacaggtggagcgagccaatggcatgatacttcaagggattaaagtgcgtgtttttgaccggctaaaaccttatgccggcaaatgggtgaaacagctgtcatcagtactttggtctttgcgaactacacccagtcgggccacaggccagtcaccttttttccttgtttatggggcagaagcaatgttgccgagtgaagttgaattcgagtctttgcgctttcgaaatttccgtgaagaacgctacgaagaggaccgagtggatgacttgcaccgattggaagaagtccgcgaagcggctttgattcagtcggctcgatacttacaagggctgcgacgttatcataatcgcaatgttcgatcccgcgcctttttagtcggcgatctggttttgcggaaaattcaaactacacgggatcggcacaagttatctcctctatgggaggggccatttatcatctctgaagtcacccggccaggttcctatcgactcaagcgcgaagacggtactctcgtcgacaactcttggaacattgaacatcttcgtcgtttctacgcttag

SEQ ID NO: 100737 - DNA, 2898 bp, Oryza sativa
  Clone ID: PAT_MRT4530_98424C.1
atgcctcgccgcacatccgccaccgctccatttgcacaaacctccgccgaaactccccttccaccatgcacccgagtcgcatgtcgtcgccgcctgagccgatcccgcgccctgccaccaccgcagccggcttcgccgccgcgcgggcaagcccggccaccgatccctttttcccctccaccacctgaaccacctccccgccataccaccctaccggccgcctttttccgcctccgatcgccgttcgccttcaccccggctgccgctgcgacgcatcggctgcatcgccggcttcgccgcgtcccgctcttccccatccgccgcccggtcgccgcctttcgccgctgggagcccctcctccttgtcgacctgtggagcgccgccgcctccctccgccggctgctctcgccgtcgccgtgcccctcggtgagctccaccacctccctctccctcactgcccccgtttcctctcgccgcttcccgcgctgcgcgccgccgctccctgcgacgcccggcctgtgtgccgccgtcgctttggtcccggccgccgccgccgccagccttgtgtgcgcgctggccaggccgcgccgcccggccgtccccagccgtccgatcggccttggccgatctagaccgtcgggtgcgcggccgcgtggccgatcgccaccgtggactcggtccacgattactccgtactcttttggcccagagaagatcgatttctctacttatgatgagcttaacagcgaggccttacgtaacttggatccagcagtccagcacaaacttgatggcccatggaaacgtatcgcaagcgggcgatctagcgccgctctcacgcttccgccgacgccgctcccgggggcggccacccgtttttttcttttttcttccttgtcgctgtcgtcgtcgtcgtcttggagagatcgatcttcacgattgttcttcgtcgagtctagtcgtcgtcaagcagcagcaacagattgcatctcctctgccgacctccgtgcgcggcactcttgtatcgccgtcaggccgcccgtcgtcggcttcatctttagcgtccgttctgctccgccggcctcaccgacgggccctgccgtcgtcgtcgcctccactggccaacgatcgagccccgatggacagacggacgacgcagctcggctgctccacctccggcaccggtctccccctgcaacccccgactcctctgtctccagcaccaccgtcgactggggggacgagctcccggcgctgcttctccgccgccggtcctcgcctaccacctcgcatgtcctgctgagaccatcctccaccggctcaccggacgtccgccgctcgggaccactaggatctgaggccgccagtgccggcgccggcgctcgccggccactagcgcccggctacaacgacttatgcaaccgatcatcatcgagcatgcgtctacaccatcaagctttggggtgccgctgcgttcgctcccctcgggccgcagtgccgctgcctgtggtccacacctccactggttgttgcagtgctaagaggcaccctcctcagcatttctacatcaccggtggacttcttgccgctgcatcgacatggagctgcagctgtgctgtcctctcggaccgcagcttcgccgctttcgtcgtcttcatcgccgttcgcacatcaacaacctcgtcgtccgcactggtcatcgtcagccgctcaggctacctctacatggctaccaacatcgccatccaggccgttggtctcactactaggccttcgtcttcgtccagcatgattcatcgccagtgtcgccgtatctccctcgactacatttcgctcttctccggcaactgcgcgctgctccggcaattctccctctacgctgttctcgcttgtcccggggtctggcaaaccctatgtgacgtctcgtccttcacggttcgactacatcggctcttcggcgtcatcttcctcacgactgccgcgattgtgtcaccatcttcgtctccagtgcatcctcgtgcaccttggtccacgacgcccctcccgtgcgtccacgaccactctacggcgcctcatgcgctccctgcggctcggctacctcgacatcagcttcctgacttcgactacatcgaccacagctactctacgcacagcttcatcgaccacagctccctcgcacccttcgctttggctacatcgactacggcacaaagggttatcatccgtattgagtactcttgttggtttcttcttcagtccaagtgtccgcgctgctcacgcttggactgcggagggatgttagagtatatgtactcctatatataccggcccctgaggctcaatacaagtgatccacgttacgcaatattcctctccctatactatccaacactcgtgtcgctgcctgtctactgcgacgtcatcggcggtggtggccgccgcggctggacgtggtggtctacgcctgcgcctgcagccggtggcgggacgccgcggtctccatcgtgcagccgccgcttgagtgcgagcggaccatgttcccctcatcgcttaagcaggccgacgcccggcgctgaagatggactcggacgccgacgccccgacctgcttctgctccgccgacgtcctcctcccactgccgacgccctccagctccaacgtcttctccgccgatgccgccctccagctcccgcgtcgccgcgcgatgcagaatcgcagatcgactcggagcattccaacttcttccagaatcgaaactttcaactcgagaatcgagattcgaaaactttcaagtccagatttgaaaaatttgaaaactttcaatttgagattcgaaaactttcaaatcaagattcgaaaactttcaaatcgagattcgaaaactttcaaatcaagatt

SEQ ID NO: 100738 - DNA, 1095 bp, Oryza sativa
  Clone ID: PAT_MRT4530_98425C.1
atggagcaaaggcataaacccacacacccacccctctcttcacccatcccccaaattccaaacccttgcaacttcagatcttgctctcttactaccgtgccgcctgccggagacttgattccagctatgcggctccgaagagctgctaccagggtgcttcggccggcctactccaccacccaggctggagggccacgtacatcttccagcaacctctcgtcggagctagtgatgtatgtgcttcgtatgcatggtggcggcagaggtctcaacaaccctgtggttgatctagagggtgcatgcagcctgaaccaatcaccttgggatctcgcatgcgagcttgagaaccccaatcccttgctagcttcaaccttggtctttgatgctatcacataccaaaggttctttcattttgcttttgatggcatagtgtacattgaattaattgaaaatatgtgtgatttcatttatccagaggacctgttcaacaagtatctagtgcacatccctcatagggctagtttcacattcaacaacgataatgatgaagagatggaagtatatgacatgatatggaaacaacagcagggtgaggaaatgaaggatctgaacccatcccaaaaggagaaacaagatggtgagaccaaaatggtaaaggatcatatgaatgtggaacccctggtgccagaggaggacatgttagacaaggggatagaagattttggcgaaaagaaggctagtgtttggtactatcgcaagaggtggcactgccaaaacatcgtcgatgggcccaaggccttgtgtgaataccacctagcaaagagccactccaacacccctactagtgtgaaagttgcaaccgcccattctaagtcatgctgtacaattaccatgtctcatctcctgaaatctagcttcaaaccaactttaactggtgaagcatcaagtttgagggcagcatcagcaagcatacaaaagaactcccagtcacacaagaggaaggcaggcaatggcttaagtgatgatgggcaaagcgacaaagactactttgttggtggtgccaataatccccatgttaagaaagggaaacaatag

SEQ ID NO: 100739 - DNA, 802 bp, Oryza sativa
  Clone ID: PAT_MRT4530_98426C.1
cgggcagcgcacagaccggcggcggcggacgaaggcgatgtcgagcgcagggagcggcagcgcgtgcgggacagatggaaggatggaggagaggagctcctcactgtgagcacggcggccggcgcgaaggatgaagacggcggcgatgaccggcgacgcggaggcacggacgggcggcggcgacaccctaggagaagatggagaggcgttaggagaggagacgacgaccacggcggcttgaattgccggccggagatggaggggagggaaaaactcaccggctcgcgaggggagaggcgctccggtgggattccggcgacgcgaggcggcggccgggaaagctcttgcggcggcgaagctaacggcggcggcgatttggcgcggcggcgactctagcggcggcggctcacggccgaaggcggcggcaagcggcggagctcgggtgtgacggcgcgggcgcggtagggggcgtgggagaggacggcaaatgggggaaacgagggaggggactcgggggagggtttttatgggcgagagaggggcggacgtggccggggagatggccgaaaccgccggcgacgtgggggtggagagagagagaatggggggattcaaaatgaatcccgcccacttcgtgcatgcgcgcgggcgggaagggcggaggagtggggtggcgacgtgggcgcgcggcacgggcggagtggggcgtggagaatggcgggaaacggcggcggcggcatgggcggtttcgacggcagcagttggagctccggctccaacggttggaggtgggagacgaccg

SEQ ID NO: 100740 - DNA, 231 bp, Oryza sativa
  Clone ID: PAT_MRT4530_98427C.1
atgcccctctgcctctctcactcccttcatctgacacttcctccatcgtcaccgagatgcgttgcactactgtcgcgaaccgctaccgcatcagccaacgaggaggccaaggccgctagatttggtgaccccgacctcctcgctggtgaatccagttggcccgagcggatgacgcccgagaggatgacaaggagttacatgacgacacagggaaggttactgttggtgtga

SEQ ID NO: 100741 - DNA, 270 bp, Oryza sativa
  unsure (1)..(270): unsure at all n locations
  Clone ID: PAT_MRT4530_98428C.1
tccccacgcgtncgagcttgcggtgaacgtgcaggcggagctggtgcactgacggtgggcgatgctgggcgcggcgggcatcttcatcccggagttcctgaccaagatcggcattctcaacacgccgtcgtggtacaccgccggcgagcaggaatacttcaccgacaccaccaccctctttatcatcgagctcattctcattggctgggccgagggctgacggtgggctgacattatcaagcccggttgcgtaaacaaccgcccccattt

SEQ ID NO: 100742 - DNA, 201 bp, Oryza sativa
  unsure (1)..(201): unsure at all n locations
  Clone ID: PAT_MRT4530_98429C.1
cccacncgtccgaaaccaacaaaccagcagcaagaaaagaaaagaaaaaaaaaggagaagacagtgagaaaaagaggagaaagaaacatacacatgaggntccacccatcaccagccacgacctcctgcncagctgcngncnanagaaggatctccggcggctnccaccgtctacagcaaggtgctggagctgccgttccc

SEQ ID NO: 100743 - DNA, 449 bp, Oryza sativa
  Clone ID: PAT_MRT4530_9842C.1
gcacgaggctgttataatttctcccggcgatagattgatttttgctgatttcaactttagggttcagctgcattatagattgatttttgctgatttcaactttagggttcagctgcattgttgcaataaccagagtccaaattatcgacgtgtgtagcgataactgttctcaatttggggaaagtaattagggctaattaactgaatcccacgatgaacgcgaggcgccggaacgaggagacccgccgccgccgccgccgcctggccatggcgagatcgacgacgacgctggacgacatccccgacaccctcctgaagcacgtcctcgtcggcctctcctcgccggtctgcatcgtccgcgccgccgcgacgtgcaggcggtggcgccgcatcatcgcccgtagcgactacacgcgcgccctgcgcttcccgccgctcctcgacgccgg

SEQ ID NO: 100744 - DNA, 732 bp, Oryza sativa
  Clone ID: PAT_MRT4530_98430C.1
atgacggtggccggcgtggcagggaggacgtcattggcagcgaacacaagtgatgagcttcccacggagagctcgcctcgcccccgctgtcaacatccatcgatcgatcgcatctcctatggaggcggtgctgaacagcagaggggcggaggagctcgagagggggaagcggtttctctttgtcctctgccagcgtgcgcctcctcctcagccttctgcggaggcgacaaaaagcatggagataggacaccggtcaccggagctttgcccgagccgaatgcaaagagagagttgagggtgaaagatgtccggtattcagatttaggggatctacgaaggaagccagcgcgcggggtggcttgtggaggtggcgatgaggatatcgggcgagatggaagaagctcgagggtggtggatccagcagcgccgccctcgagagggttggatccgacacccttggcccctgaatgggtgacggcggagctcgagggcggcgggtccggtagtgccgccctccggaggggcggatctgccatccttagccccgggcagcaacagcagacctcgagggcagtggatccggcagtgccgccctcggcatcgagagaggcgatggcgacgacagagatcgagggcagcagatccgggggcactgtccttggtccccggaggggcgttggcgatggtggtgttcgagggcagcatatccagcagcgccaccctcagccgtag

SEQ ID NO: 100745 - DNA, 216 bp, Oryza sativa
  Clone ID: PAT_MRT4530_98431C.1
ccatatacgagcctcgctgaatattgctgtgggctggttgtctgtggaggggtgatgccagacacttgctgggcccacttgctgggatagccggatgtgtgcatactgcttgtttgtggagctcccacctttatgagccgaagctgccaagttgcacagctctcactggttgtttatagagtgtttgtaaattgcactgttggctgacccatgtgt

SEQ ID NO: 100746 - DNA, 209 bp, Oryza sativa
  unsure (1)..(209): unsure at all n locations
  Clone ID: PAT_MRT4530_98432C.1
attaattgtggacagccctaagggacgggtactttacaaaatggggctcaaatgacaagctgatagacgtatatatatatagggatgatggattggaaagtaacatatgatggttaaccctaaaggagcgccatctaaccttatggaacagtncccgttataccgcaggtgaaggtataaacggcgacaacagagcgacgagaggcctg

SEQ ID NO: 100747 - DNA, 1381 bp, Oryza sativa
  Clone ID: PAT_MRT4530_98433C.1
cgggctgcaggttgggtttatacgtgacaaatggagaaatgagtacagtagtagtagttgtacgtagttttatataaataccagagtgagatggctggctaggggtgggttccactcccaatggcatgggcgaacaccgtccggtggggtgggtcacagcacttgccatggcacacgaaaagtgcgggctatgaaaggttccagaggcgtcgatgtgagatcggacggtgcatcggaatgggtgggtccacaagtcagtctcaccgtacccgtacgtgacagaagtgagcagtgtataaataccgcgagaggagaggagattgcttgttgctacagtgttccattcaccttcttcctcctcgcctcgccgtgacaagcgattggagagcgccgaaaggcgagaatggcatgccccgaggcgcgtctgaataaggattgcaagacggcgaggaggctcgggctccccgtggaggtgctgcaggagggccagccgaaggtgctccatgacgccgtcgacaacatcgtggtgaaggccggatggattgtgcgtgtttcaagcgcctccgggctggcggcggctcttgttcaggcggagaatcatgctcctgctcctgctcctgtcgatcagcctcttagagtgttcattgtgccataccttcctccagcggaggcgcctctcatcctatccaagatcgaacaagcctccgccgacgactctgtacctggcttcatcgtgatcaatccaaatctgctggagaccaaggaaaaagcccggctggacatcatgcatgagatttcaagggtgcagaacattcgggacaagtaccgtcacccgtcgtcaccagcaacagcaacagctccactagctccagctgatgtacccaacaagcccaagcccaagcccaaggacctcaaggaactcaaggagcaatatctgcttgctcacttggttgccgggcactggaggatggcaagcaacattcttgaatacgtcgacaattttctgttccaatcattgagggaaaaagatgaggaggaagtgaggatcgcgatgcaacggcttcaagacgatctgcagaaaaaacaccatggaagtcagcacagtgtccgaaggattgctcatgaactacttggaattgccacaatgagcaagtgggaatataggaaggaactacccttaccggcagctgaggatggaatgactatgaagaagaagctcaagtgccacgcaaagaagctccggaagctcctcaccaagcacacattgatgggagtagtgccgctcgtctgggcaaagctggagccgatgccaatgatcacgtcatccgggagaaccatcaagtcgaacgcgagattcacgggtcctgagtggaccgcgtga

SEQ ID NO: 100748 - DNA, 1149 bp, Oryza sativa
  Clone ID: PAT_MRT4530_98434C.1
atgttgatcgccggcgcaatcctgtgcctggtggcgtcgacggcgccggcgccggcgttgtcggccggcaggacgacgttcagcgtgtcgtcgttcggagccgccgggaacgggatcgccgatgattcagagatagatggtgatgtgttggctcctccagggatggggtactggccaaaggccaggaggcctctgcagtggctcaacttcaagtggctggatggcttcaccatccaaggcactggcactgttgatggacagagtactttgctgagaagtgtttcacctgctaatgtttctcagcattggtatgtatcaggagtgaagcctacgctcataaggttttacagtagcttcaatgtcagcgtgcgcaatatcaggataaccaacagcccacagtgccacctgaaattcgacagctccggtggcatcaaggtgaagaacatcaccatatcatccccaggtgacagcctcaacaccgacggcatccatctccagaacaccagggatgttgacatcaggagctccagcatcggctgcggtgatgactgcatatcgatacagacgggatgctccaatgttcacatgaagaacatcaactgcaatcccggacatggaatcagcttagggggattagggaaggataacagcttggcttgcgtctctgatgtgttcgccgagcacatcaacgtggagaacgccttgtatggtgtcaggatcaagacatggcagggaggcaaaggcacggtgaggaacgtcaccttctccaacgtgagggtggcgaacgtggcgacgccgatcgccatcgaccagttctactgcgacgccggcggcggcggcgcgcggtgcgggaacaggagcgacgccgtggggatcaccggcgtggcgtaccggcgcgtcgcggggacgtacacgtaccagccggtgcgcctggcgtgcagcgacgcccggccgtgcaccggcgtcagcatggccgacgtccgcctgtcgccggcgagcgccaccggcgccggcggactgcggcagccgctctgctggaagtcgtacggcgaggcgatggggatgatcgagccgacgggcatcgcctgcctgcagaggagcaatggattcgtgatgcctttaaccaagccatttaactacacctgctga

SEQ ID NO: 100749 - DNA, 360 bp, Oryza sativa
  unsure (1)..(360): unsure at all n locations
  Clone ID: PAT_MRT4530_98435C.1
gtggaggtgttatctgagttggaacggagacgactggccaacattgccagaaacaatgagtatttacaagaattgggactcagtgcaaaatcagctcgacagacaaaacgtccacctaccggtaaagttatccagaccatgcgtatacaaaattggaaggtggaggacgagataggcgctcgacgctcttcgagaatcgctagcctacccgccacggtaaactacaccgaagaaatcctcagtcgaacacgtcccagacactctggaggcatggggccatcgcttactcatgtcgacacggatgtngtgtctgacttgacggtccggtgtcttcgttgggttnaatcccggatagtaaag

SEQ ID NO: 100750 - DNA, 591 bp, Oryza sativa
  Clone ID: PAT_MRT4530_98436C.1
atgggcgtaatttccgtgaatctagacgaatggacagatgaagaggtcaattgtttagctggttcaggtggaaatgctacggtgaacacaagatatgaggcctttttgccagagaactttaaaaagcccagacatgattgcacaacagaggagcgttgcaatttcattaggaaaaagtacgagtttcaacagtttgtgactgatccacagttttcatgccctttacgattgaataccaaacacgcaccagacaagaatcagcagcagcaaaactgcagtgcgcgacatggttttggccatgcttttaggaatagctggaagagaaaggacacagataacaaaggactaaagaaaatgacggatgtgggtatggtggaatttgttggattaattaaggttgatattagacggggcacaaatcttgctgttcgtgatgtgatgtcaagtgatccatatgttatgcttaacctaggacaccaaaccatgaaaacgaaggtgataaagaacaccctgaatcctgtatggaatgaaagactaatgctatcgatccctcacccggtgccgcctcttaaattggtacatgctctttag

SEQ ID NO: 100751 - DNA, 1177 bp, Oryza sativa
  Clone ID: PAT_MRT4530_98437C.1
atgaaagagtatcgatcaccatctttattcttctgggagatccttaatatggcgtcagcaaacaaattggtgactgaaaagcacatcaatgggtctgtttttgttcctaacactgatgaaatcatcacggtccacgccctcaagattaccattattattactattccaaaacaatgaatgaacagaatgcatgactaatttgttctagcattgccagctaataaagctatctgtcctctctttggatggccttgtagaggactttggtgacaaacttggactggaacctgaaggtggtgccgagggcagcgaccatgggtggggtgcccttgccgatgaagacatggccgaggacgttgtgcttgggcatggcgcactctccctccttcccgccggagcctcctcgcgagttgagcacgcccaggtggagctgcggcggcagagcgggaggctccttggtgaactccttgtcgtcaggagccaggaaaccgtagctggagtccggcgatggaggagccatcagctctgacacactgtccacgctatccgggacataatcatgaacatcaataagatttgaaatggtgcccataatgtcagcttcacggggacgatcaggctgaaatcttctttctccatcaacaatgaatctataacggtaaactccagatgcaagccctaacatgacgcagtgatcctttccacatttatggacgagttgctttgatttccagttatcccatgatccttctatatagacattcttccctccaagagtccacacaagcagagtaggaatcagcttgtcagggggaccatcgtgatcctcctcttgttcactcgttaatatctggttaaatactggaggaggtccatctacagctctatgcaatggagttacaggactctgcggcacgaacatgcgcggggagtgcggccgcgggggggtccccggcggggacgacgaccctccgccgccggagtaccccgctgccgacgacgggggccgcaccagtccgccgcttcccccggcgccgccgtacggcgggaggccagcacggtccatggggcgcagcgaggaggagtagtccccagcgccggcgcggttgccgcctccgccgccgtcatccatttcggcgtcggcgatgtcgtccagcctgccgctcgcgttgcccat

SEQ ID NO: 100752 - DNA, 531 bp, Oryza sativa
  Clone ID: PAT_MRT4530_98438C.1
ggatcccccgggctgcaggaatcggcacgagggagagaactagtctcgagtttttttttttgccacataagccaatgctgttctcatccatcatgtaagctgaacacagtgaatcagcacaatacagatggactccaggacacaagtgttcaattgtcaacatttctttacaagttatctaaacctacctatgatggtgaacactctgtccgtagctgcaacaaaaagggtggttatggtcttgtggaacacccataatctaccaaatggaaaggccaacaaaaaagatcaataaggatgacctgacaggagagcaaattgataatacgcagcatacttgtacagagtaccaatatttaaagtctgatagaactaattactaccggcgtccacggagttttctcctcttagttccttttaaaggttcagcattaggtgagtcatcctgctcagctgcatcctctgtactggtgtccttgtccccaatagcttcctcatcagcaggctcagactcatttgcatcctcatcaa

SEQ ID NO: 100753 - DNA, 459 bp, Oryza sativa
  Clone ID: PAT_MRT4530_98439C.1
atggaggaggaggaggaggcggccggtttcggggagttacccgccgacgcattggaggaaatccttgtgcgcatcccggcgagcgcgcggcggcgtctccgcctcgtctgccgtcactggcgcgacgtcgtcgacgaccgcacgccagagcggcggagccgcgccaagacgctagtctacgtcagccgcccggccggcgccgccgcgatggtcggcacactcaatggcctgctctgcctgtacgaagagctcgccggcgacatcgtcgtgctcaacccggtcaccggcgagacgccgctgcacatccgcgggcctgcaggcaacaggctggaccccgcggcgctcagcttcgtgtaccaggagaagacggggcagtacaagatcgtgcacctccgccgcctccctatctccctagccgcgcgcgcaggcatcgccaacgtcggcggcgccacgtactga

SEQ ID NO: 100754 - DNA, 180 bp, Oryza sativa
  Clone ID: PAT_MRT4530_9843C.1
atggggagatgggccgtgctggccctgcttgggctggatattggatttaaaagaaataagttcacttcaggtcccttctgtcgagggtacccaagatttttcacggatatcgggtctgaatacgggtcttttttgggagcggcgatgaggctgaccggtgacatgggccaacgagcatga

SEQ ID NO: 100755 - DNA, 132 bp, Oryza sativa
  Clone ID: PAT_MRT4530_98440C.1
aaacttattgtaaatataaaccgtgacctcagcgtcatcgggattgacgctaaggtccaatggcgctcagctccagcgagcatggggctaatcggccgctaccatgctaacaagtccacgtgcaaagtgtaa

SEQ ID NO: 100756 - DNA, 255 bp, Oryza sativa
  Clone ID: PAT_MRT4530_98441C.1
atgacaggcggcagcggcggaggctctagcaagccagtgcggcgaggcaaacgggcggcggcggggcaagtcctcgtggcgagccggtggcaatgggagcagctagctgcaacctgcagggcgaaaaggcggttgggcaagcaggcaaggactgcaggaggcaccggcggctccgcgtggcgagccgatgaaggcaagcagggcagcactgttagtgctcagcaacaaatttggaatgcttgtttagcttcttga

SEQ ID NO: 100757 - DNA, 5774 bp, Oryza sativa
  Clone ID: PAT_MRT4530_98442C.1
atgggtcccatctccggcatcgacgacctcgtcttcccacccgggcagacgtttcggttcggcagtctcaacttcgtcaccaacaacttcggcaagatctctctccttgactcggaatcggaccagtcgggagagaaccggatctcagtcccgttcggattcccaaacgcggctgaaagctacttcaagaccatctcaatcgagtcggcttcaaaccactcggctgagatcgcatcttcttcaacgtcaccagatcaagatgatggggcttacccaccgatcctgatgcagctccccgacgatttggcgaccgtctccatcacgacagcgtctccttcccgtaggcctgggcggaagtcggcttcaacaccgatttcacctagcttcagggaagtcggcgtcatcctccaaccactcggcacggtttcgacggatcagctggatggctaccacagctctcccaccgtcgactcgcgccccaccgacatcgtggagtacgacgagtttagctctcgctacaactacgcggatctcgacgacttcgacggaagcctagatgacaactacacccctctctacttcggcgtcttcatgggcggataacggagacggaggagcaatgccaagcccgggagaccgaagcacgtcgcgagactgaacgtcgccgactggaggaggagcatcaagcacaagaacaagaacggctacggcgtgagcagcaggagcgtgagcggaccgcgaaggaggctgaggatcgacggcagcgagctttggaagcagggcgccgagcgcgtgatctcatcggccaacaagatgttgaagggacaccggttttccgcacccctcagcagaatgcggttgccgcgatcaccctcctcgacaccctcctcaaggaaaacgagctcaatcaatctgatcacgtcgtcaacatcttaaaccagacgaagaccatgattgcggcttcggtcccagttaactccgaaagcgtccacacgccgactggcagccgagtcccccactcccgatctcatgactaccgtcatctaagcctcagcatcaccggcgcaggatccaatcgcaggagcaggggtcacgacgagcggtccgttcactcacctcccgaccatcatagggagcgccgagtggaacggcctcgctcaccacctcgtcgccgccccgtcgatcttcgcgacacaatcatacagcgccgagcagctcgaggccatcatcatgcgccggaccgccacgacgacgacctcgacggagtagcagccttcaccgacgacctgcgtcgagtggattggccagccggcttcaagccgactggaatagagaagtatgacggtaccactaacccagaatcgtggcttaccgtctacggtctcgcaatccgcgcagcaggaggagacagcaaggccatggcgaactatttaccagtggctttagcggattccgcccgatcttggctccatggattgccccgtgaaggccggagaaacccttcgagaatacatccgacgatttccgaacaacgtaacaagatctccgacatcaccgacgacgttatcatcgccgcattcaccaaagggattcgccacgaagaattggtcggcaagttcgggcgtaagcctcccaagacagtcaagcttatgttcgaaaaagccaacgagtacgccaaggccgaagacgcccgcaccgcatcaaagcagtcaggtcccagttggaagccaaacaagggtacgccggctaagggaggaggtggaagtaacaatcataaggaccgcaagcgtaagcctgaggaacttgttgcaaccgccactcactcttctcgacagcgttcgcgcgtcaacacgttcgacaagatcatgaactcccaatgcccgcaccatcctaactccaaccacgtggccaaagattgtttcgtctacaagcagtttgcggagcaatacaccaagactacacggaagaactccgacgaagaacaaaaaattgcaatcaagtttgaccgctcggatcatcctgaccgagtggtccacccggggcggtaccccctggtactagacccagtggtccgtaatgtcaagcttcgcagaaccctcatcgacggcggcagtgcactcaatatcctcttcgccaagaccttggatgatatgcagattcctcgctccgagctaaaaccaagcaatgcgccttttcacggagtaattccaggattatccgcaactccactcggccagatcaccctcccggtcacttttggcactcgggaaaacttccgcacagagaatatcagctttgaagtcgccgatttcgagacaacataccatgccatactcggacgcccggcgttagccaagtttatggccgtcccgcactacacttacatgatgacgaagatgcctggtccccgaggagtcctatccctacggagcgacatcaagcaagccgtcacatgcgacaaggagagttgcgacatggcccaaacccgcgagatggcgtcagcccgagaggatatccgactggctgcagccacggcgagcgaaggagaagtgcccgctaccaagatttcaaaaagtggagaaagcgaagccaagactaaaaagattcccttagatccttctgattctactaaaactgctaacaataaagatatctttgcgtggaaaccatctgatatgcccggtattcctagagaggtgattgagcactccttatatgtcaaagaagatgccaagcctatcaaacaacgactccgccgattcgcacaagacagaaaagacgcgatcaaggaggaattaaccaagctgttagcagcaggcttcattaaagaagtccttcatcccgactggctagcaaacccggttctagttcggaagaaaacggggcaatggcgcatgtgtgttgattatactgacctcaacaaatcttgccctaaagatccttttgggttgcctcgcattgaccaggtagtcgactcgaccgccggctgtgagcttctcagttttttggactgctactcggggtatcatcagatccgactgaaggaatccgactgcttgaagacttcattcatcacgccctttggagcatactgctatgtcaccatgccgtttggactaaaaaacgcaggagcaacttatcaacgtatgatccagagatgcttctcaacgcagatcggtcgcaacgttgaagcctatgtggatgatgtagttgtcaagaccaagcaaaaggatgatttgatctcggatctagaagaaaccttcgcgagcatccgcgctttcaggatgaaattaaaccctgaaaagtgcaccttcggagtactgtcagggaagctgcttggttttatggtgtctcataggggcatccaagccaacccggagaaaattactgctatcctcaacatgaaaccgccaagtacccagaaagatgttcagaagctgactggatgcatggcggcgctcagccgatttgtttcaagacttggcgagcgggggatgcccttctttaagctactaaagaaaacagacgacttccagtggggacccgatgcacagaaggccttcgaagatttcaagaaactcctcaccgagccaccggtcttagcctcaccacacccgcaggagccgttgttgttgtatatagcagccgcctcccaggttgtgagcacagtcttggtcgttgagcgcgaggaagaaggccatgtccagaaagtccaacgatcgatttactttgtcagcgaagtcctagccgactccaaaacgaggtaccctcaggttcagaagctgttatatggtattctaattactaccaggaagctatctcactactttcaaagtcactcggtaacggtggtcacatcatttccactcggtgatatactgcacaaccacgaagcaaacgggcggattgctaagtgggctttggagttgatgtctttggacatatcattcaagccccgaatttcaattaagtcccaagcgttagctgattttgtcgccgaatggaccgagtgccaggaggatacccccgcggagaagatggagcactggaccatgcattttgacggatcaaaacgactttcgggcactggagcaggagtggttttgatttccccaactggagaaagattaagctatgtgctttggatacatttttcggcatcccacaacgtcgccgagtatgaggcgctccttcatggactgcggattgcaatttccctaggaataaagcgtctaatagttcgaggcgattcacagctggttgtcaaccaggttatgaaagagtggtcctgccttgacgacaatatgatggcatatcgacaagaggtacgcaaattggaagacaagttcgatggactcgagcttagtcatgttcttcgacacaacaatgaagccgccgacagacttgccaactttggatccaagcgcgaggtggcgccctctgatgttttcgtcgaacacctttatacgccgaccgtacctcacaaggatactacccaaattgcgggcactcatgacgtagctctggttgaagccgattggcgagagcccctcatacgatttttgacttctcaagaactcccacaagacaaagatgaagccgagcggatttcaaggcggagcaaactttacgttatgcatgaagctgagttgtacaagaaaagcccttcagggattctgcaacgctgcgtatctttagaggaagggaggcaattgctgaaagacatacattctgggatatgcggaaaccatgctgccgcacgcaccattgtcggcaaagcttaccggcagggttttttctggcccactgcagtgtccgacgccgacaaaattgtgcgcacgtgcgaaggttgccaatttttcgccagacaaattcatctaccagctcaagagttgcagaccatcccactgtcttggccgtttgcggtttgggggctcgacatggttggcccgtttaaaaaggcagtcggcggttacacgcacctttttgtggccattgacaaattctccaagtggattgaagctaagccggttgtcacaatcacagcagataacgctcgagacttcttcatcaacattgtgcatagatttggagtgcccaatcggatcatcactgacaatggcagacaattcaccggcggagtttttaaagacttttgtgaagactttggaatcaagatttgctatgcctcagtggcacatcccatgagcaatggacaggtggaacgagccaatggcatgatacttcaagggattaaagcgcgtgtttttgaccggctaaaaccctatgccggcaaatgggtgaaacagctgccatcagtactttggtctttgcgaactacacccagtcgggccacaggccagtcaccttttttccttgtctatggggcagaagcaatgttgccgagtgaagttatattcgagtctttgcgctttcgaaatttccgtgaagaacgctacgaagaggaccgagtggatgacttgcaccgattggaagaagtccgcgaagcagctttgattcagtcggctcgatacttacaagggctgcgacgttatcataatcgcaatgttcgatcccgtgcctttctagtcggcgacctagttttgaggaaaattcaaactacacgagatcggcacaagttatctcctctatgggaagggccatttatcatctctgaagtcacccgaccaggttcctatcgactcaagcgcgaagacggtacactcgttgacaactcttggaacattgaacatcttcgtcgtttctacgcttaa

SEQ ID NO: 100758 - DNA, 1880 bp, Oryza sativa
  Clone ID: PAT_MRT4530_98443C.1
ttttgcatagatacaaaattttagcaacttatgtatcgatactggtgcctggcggctccccccatggcggatcagcttgttcacctcccccaacagctcctggttctcttgcttttcatcgcccccttcttcttcttcttcctcatccgttccattcgtcgtcgcgatggcggcagcgtccggctcccaccatctccatgggctctcccggtgatcggccacctgcaccacctcatgggcgcgctcccgccacagcacgccatgcgcaacatcgcgctgcgccacgggccgctcgtgcggctccggctcggcggcctccaagtcatcctggcctcctcggtggacgccgcgcgcgaggtcatgaggacgcacgacctcgccttcgcgacgcgcccctccacccgagtaatgcagctggtcttccccgagggctcgcaggggatcgtcttcacgccctacggggatagctggaggaacctccgcaagatctgcaccgtcgagctgctcagcgccaagcgcgtccagtctttccggccgatccgcgaggaggaggtcggccggctgctccgggcggtggcggcggcctcgccggcgcggcgcgccgtgaaccttagcgagctcatttcggcctactcggccgactcgacgatgcgcgccctgatagggagccggttcaaggaccgggacaagttcttgatgctgctagagcgcggtgtgaagctattcgccacgccgagcttgccagatctttacccatcgtcgcgcctcgccgagctgatcagtagaaggcctcgccagatgaggcggcatcgcgacgaagtgtacgagttcttggacatcattatcaaggagcatcaagagaacagatcttcctccgatgaccaggaggacttggacttggttgacgtactcctgaggatccagagaaaaggtgacttcccactatccactgataacatcaagacaacaatcggagacttgttcaatgggggcagcgagacaaccgcaacgacactgaaatggattatggctgagctcatcaggaacccaagagtgatgcaaaaggcacaagacgaggtccgacaagtgcttggaaaacatcacaaagttacagaggaagcccttagaaatctgagttacctgcacttggtcatcaaggaggggctccggctgcaccctccaggacttccgttgctcctgcgagaaagccgaaccacaagccaggtcttaggatttcatgtgccccaaggaactatgatactcgttaacatgtgggctataagtagggaccctatgtactgggaccaagcagaagagttcatcccagagagattcgagcatgtcaacattgattactatggaaccgatgtcaagtacatgccgttcggagtaggtcgacggatatgtcctggaatagcttttggtctagtgaacttggagcttgtgctagcaagtctcttgtaccatttcaactgggagcttcctgatgagacggagcttgggaaccttgatatgaaggaggagatgggggcaatagcacgacggctccatgatctttcgcttgttccagtcattcgccatccattaccggtagatatgtaatagctatcagtcagtagcttgatgatttacatcttggagggctactctgtttacacaagtttgaaccaatgcagttaaataaataatttgcaaacttgctgcattcactgcccaattacaagcgttggtccaaatatacatgtttgcattagaaaacatgtattatcgttgttaaaacacttgtacttttatatttgtaacataccactataggtgtacccagtaaattatgtgtatgaaaatgtggcaataaataaagtcagcacctctccatgtgc

SEQ ID NO: 100759 - DNA, 194 bp, Oryza sativa
  Clone ID: PAT_MRT4530_98444C.1
acgacgaagagcttaaggacgggaaggcggcgtcggccaagagagggcacgggaccgaccaggggacagcggggagaaaagaggtgcactgggctgtacttacaaggcgctggaaacctccactgacaaaggagacgccgcaaagacaaccgtgcgaggcggggaaaagtgatggcacgggaaaaaagatttag

SEQ ID NO: 100760 - DNA, 6066 bp, Oryza sativa
  Clone ID: PAT_MRT4530_98445C.1
atgggttctgtctccggcatcgacgacctcgtcttcccacccgggcagacgtttcggttcggcagcctcgatttcgtcaccaacaacttcggcaagatttctctcctcgactcggagtcagaccagtcgggagagaaccggatttcagtcccgtttggattcccaaacgcggctgaaagttacttcaagaccatctcaatcgagtcggcttcaaaccactcgggtgagatcgcatcttctccaacgtcaccagatcaagatgatggggcttacccaccgatcctgatgaagctccccgacgatttggcggccgtctccatcacgacagcgtatccttcccgtaggcctaggcggaagtcggcttcaacaccgatttcgcctagcttcagggaagtcggcgtcatcctccaaccactcggcacggtttcgacggatcagctggatggctacaacagctctcccaccgtcgactcgcgtcccaccgacatcgtggagtacgacgaatttagctctcgctacaacgacctggatctcgacgacttcgacggaagcctagatgacaactacacccctctctacttcggcgtcttcatggccggtaacgagacggaagagcaacgccaagcccgggagaccgaagcgcgccgcgagactgagcgtcgccgactggaggaggagcatcaagcacaagaacaggaacggctacggcgtgagcagcaggagcgtgagcggaccgcgaaggaggctgaggatcgacggcagcgagctttggaagcagggcgccgagcgcgtgatctcatcggccaacaagatgttgaagggacgccggttttctgcacccctcaacagaatgcggttgccgcgatcaccctcctcgacaccctcctcaaggaaaacgagctcaatcaatccgaccacgtcgtcaacatcttgaaccagacgaagaccatgattgcggcctcggtcccagttaactccgaaagcgtccacacgccgactggcagccgagtcccccacttccgatctcatgactaccgtcatccaagcctcagcatcaccggcgcaggatccaatcgcaggagcaggggccacgacgagcggtccgttcactcgcctcccgatcatcatagggagcgccgagtggaacggcctcgctcaccacctcgtcgccgccccgtcgatcttcgcgacacaatcatacagcgccgagcagctcgaggctatcatcattcgccggaccgccacgacgacgaccttgacggagtagcagccttcaccgacgacctgcgtcgagtggattggccagccggcttcaagccgactggaatagagaagtacgacggtaccactaacccagaatcgtggcttaccgtctacggtctcgcaatccgcgcagcaggaggagatagcaaggccatggcgaactatttaccagtggctttagcggattccgcccgatcttggctccatggattgccccgtggtacaattggatcttgggctgaattgcgcgaccacttcatcgccaacttccaaggcaccttcgagcgtcccggcacacaatacgacctctacaacgttattcagaagtccggagaatcccttcgagattacatccggcgattttctgaacaacgtaacaagatctccgacatcaccgacgacgttatcatcgccgcattcactaaagggattcgccacgaagaattggtcggcaagttcgggcgtaagcctcccaggacagtcaagctcatgtttgaaaaagccaacgagtacgccaaagctgaagacgccatcaccgcatcaaagcagtcgggtcccagttggaagccaaaaaaggatacgccggcttcgggaggaggtggaagtaacaatcataaggaccgcaagcgtaagcctgcggaacttgttgcaaccgccagtcactcttctcgacagcgttcgcgcatcaacacgttcgacaagatcatgaactcccaatgcccgcaccatcctaactccaaccacgtggccaaagattgtttcgtctacaagcaattcgcggatcaatacaccaagactacgcggaagaaccccgacgaagaacaaagcacgtcgaggaagaaggacgacggcgacaccccggcaggatttcaagaccaccgcaaggagctcaaccatatcttcggcggccccctggcttatgagtctaaaaggaagcaaaagttgaccgaacgagagatcaatgctgttcagcccgacacgccccaatatcttcgatggtcagagattgcaatcaagtttgaccgctcggatcatcctgaccgagtggtccacccggggcggtaccccctggtactagacccagtggtccgtaatgtcaagcttcgcagaaccctcatcgacggtggcagtgcactcaatatcctcttcgccaagaccttggatgatatgcagattcctcgctccgagctaaaaccaagcaatgcgccttttcacggagtaattccaggattatccgcaactccactcggccagatcaccctcccggtcacttttggcactcgggaaaactttcgcacagagaatatcagctttgaagtcgccgatttcgagacagcataccatgccatactcggacgcccgacgttagccaagttcatggccgtcccgcactacacttacatgatgatgaagatgcctggtccccgaggagtcctatccctacggagcgacatcaagcaagccgtcacatgcgacaaggagagttgcgacatggcccaaacccgcgagatggcgtctgcccgagaggatatccgactagctgcagccacggcgagcgaaggagaagtacctgctaccaagacttcaaaaagtggagaaagcgaagccaagactaagaagattcccctagatccttctgatcctactaaaactgctataataggcgccgagttagattatatctttgcatggaaaccatctgatatgcccggtattcctagagaggtgattgagcactccttacatgtcaaagaagatgccaagcctatcaaacaacgactccgccgttttgcacaagacaggaaagacgcgatcaaggaggaattaaccaagctgttagcagcaggcttcatcaaagaagtccttcatcccgactggctggcaaacccggttctagttcggaagaaaacggggcaatggcgcatgtgtgttgattatactgacctcaacaagtcttgccctaaagatccttttgggttgcctcgcattgaccaggtagtcgactcgaccgccggctgtgagcttctcagttttttagactgctactcggggtatcatcagatccgactgaaggaatccgactgcttgaagacttcattcatcacgccctttggagcatattgctatgtcaccatgccgttcggactaaaaaacgcaggagcaacttatcaacgtatgattcagagatgcttctcaacacagatcggtcgcaacgttgaagcctatgtggatgatgtagtcgtcaagaccaagcaaaaggatgatttgatctcggatctagaagaaaccttcgcgagcatccgtgctttcaggatgaaattaaaccctgaaaagtgcaccttcggagtaccgtcagggaagctgcttggttttatggtgtctcataggggcatccaagccaacccggagaaagttactgctatcctcaacatgaaaccgccaagtacccagaaagatgttcagaagttgactggatgcatggaggcgctcagccgatttgtttcaagacttggcgagcgggggatgcccttctttaagctactgaagaagacggatgatttccaatggggacccgaagcacagaaggccttcgaagattttaagaaactcctcaccgagccaccggtcttagcctcaccacacccgcaggagccgttgttgctgtacgtatcagccacctcccaggttgtaagcacagtcttggttgttgagcgtgaggaagaaggccatgtccagaaagtccagcgaccgatttactttgtcagcgaagtcctagccgactccaaaacgaggtaccctcaggttcagaagctgttatatggtattctaattactaccaggaagctatctcactattttcaaggtcactcggtaacggtggtcacatcatttccactcggtgatatactgcacaatcgcgaagcaaacggacggattgctaagtgggctttggagttgatgtctttggacatatcattcaagccccgtatttcaattaagtcccaagcgttagctgattttgtcgccgaatggaccgagtgccaggaggatacccccgtggagaagatggaacactggaccatgcattttgacggatcaaagcgactttcaggcactggagcaggagtggttctaatttccccaactggagaaagattaagctatgtgctttggatacatttttcggcgtcccacaacgtcgccgagtatgaggcgctccttcatggactgcgaattgcgatctccctagggataaaacgtctaatagttcgaggcgattcacagctggtcgtcaaccaagttatgaaagagtggtcctgccttgatgacaacatgatggcatatcgacaagaggtacgcaaattggaagacaagttcgatggactcgagctcagtcacgttcttcgacacaataatgaagccgccgacagacttgccaacttcggatccaagcgcgaggcggcaccctctgatgttttcgtcgaacacctttatacgccgacagtacctcacaaagatactactcaatttgcggacactcatgacgtagctatggttgaagcagactggcgagagcccctcatacgatttttgacttctcaagaactcccccaagacaaagatgaagccgagcggatttcaaggcggagcaaactttatgttatgcatgaagctgagttatacaagaaaagcccttcaggaattctgcaacgctgcgtatctttagaggaagggagacaattgctgaaagacatacattctgggatatgcggaaaccatgctgctgcacgcaccattgtcggcaaagcttaccggcagggttttttctggcctactgcagtgtccgacgccgacaaaattgtgcgcacatgtgaaggttgtcaatttttcgccagacaaattcatctaccagctcaagagttgcagactatcccgctgtcttggccgtttgcggtttgggggctcgacatggttggcccgtttaaaaaggcagtcggcggttacacgcatctctttgtggccattgataaattttccaagtggattgaggctaaaccggttgtcacgatcacagcagataacgctcgagatttcttcatcaacattgtgcatagatttggagtgcccaatcggatcatcactgataatggcagacagttcactggcggagtttttaaagacttttgtgaagacttcggaattaagatttgctatgcctcagtggcacaccccatgagcaatggacaggtggagcgagccaatggcatgatacttcaagggattaaagcgcgtgtttttgaccggctaaaaccctatgccggcaaatgggtgcaacagctgccatcagtactttggtctttgcgaactacacccagtcgggccacaggccagtcaccttttttccttgtctatggggcagaagcaatgttgccgagtgaagtcgaatttgagtctttgcgctttcgtaatttccgcgaagaacgctacgaggaggaccgagtggatgacttgcaccgactggaagaagtccgcgaagcagctttgattcggtcggctcgatacttacaagggttgcggcgttatcataatcgcaatgttcgatcccgtgcctttttagtcggcgacctggttttgaggaaaattcaaactacacgagatcggcacaagttatctcctctatgggaggggtcgtttatcatctctgaagtcacccggccaagttcctatcgactcaagcgcgaagacggtactctcgtcgacaactcttggaacattgaacatcttcgtcgtttctacgcttaa

SEQ ID NO: 100761 - DNA, 5988 bp, Oryza sativa
  Clone ID: PAT_MRT4530_98446C.1
atgggttccatctccggcatcgacgacctcgtcttcccacccgggcagacgtttcggttcggcagcctcgacttcgtcaccaacaacttcggcaagatctctctccttgactcggaatcggaccagtcgggagagaaccagatttcggccccgtttggactcccaaacacggctgaaagttacttcaagaccatctcgaccgagtcggcttcaaaccactcgggcgagatcgcatcttcaccaacgtcaccagatcaagatgatggggcttacccaccgatcctgatgaagctccccgacgatttggcggccgtctccatcacgacagcgtctccttcccgtaggcctaggcggaagtcggcttcaacaccgatttcgcctagcttcagggaagttggcgtcatcctccaaccactcggcacggtttcgacggatcagctagatggcgactacagctctcccaccgtcgactcgcgccccaccgacatcgtggagtacgacgagtttagctctcgctaccacgacccggatctcgacgacttcgacggaagcctagatgacaactacacccctctctactttggcgtcttcatggccaataacgagacggaggagcaacgccaagcccgggagaccgaagcgcgtcgcgagactgagcgccgccgactggaagaggagcatcaagcacaagaacaagaacggctacggcgtgagcagcaggagcgcgagcggattgcgaaggaggctgaggatcgacggcagcgagctttggaagcagggcgccgagcgcgtgatctcatcggccaacaagatgttgaggggacaccggttttccgcacccctcaacagaatgcagttgccgcgatcaccctcctcgacaccctcctcagggaaaacgagctcaatcaatctgaccacgtcgtcaacatcttgaaccagacgaagaccatgattgcggcttcggtcccagttaactccgaaagcgtccacacgccgactggcagccgagtcccccacttccgatctcatgactaccgtcatccaagcctcagcatcaccggcgcaggatccaaccgcaggagcaagggtcacgacgagcggtctgttcactcacctcccgatcctcatagggagcgccgagtggaacggcctcgctcaccacctcgtcgccgccccgtcgatcttcgcgacacaatcatacagcgccgagcagctcgaggctatcaccactcgccggaccgccacgacgacgaccttgacggagtagcagccttcaccgacgacctgcgtcgagtggattggccagccggcttcaagccgactggaatagagaagtacgatggtaccaccaacccagaatcgtggcttaccgtctacggtctcgcaatccgcgcagcaggaggagacagcaaggccatggcgaattatttaccagtggctttagcggattccgcccgatcttggctccatggattgccccgtggtacaattggatcttgggccgagttacgcgaccacttcatcgccaacttccaaggcaccttcgagcgtcccggcacacaatacgacctctacaacgtcattcagaagtccggagaatcccttcgagattacatccggcgattttctgaacaacgtaacaagatctctgacatcaccgacgacgttatcatcgccgcattcactaaagggattcgtcacgaagaattggtcggcaagttcgggcgtaagcctcccaggacagtcaagctcatgtttgaaaaagccaacgagtacgccaaagctgaagacgccgtcaccgcatcaaagcagtcgggtcccagttggaagccaaaaaaggatatgccggcttcgggaggaggtggaagtaacaatcataaggaccgcaagcgtaagcctgcggaacttgtcgcaaccgccaaccactcttctcgacagcgttcgcgcgtcaacacgttcgacaagatcatgaattcccaatgcccgcaccatcctaattccagccacgtggccaaagattgtttcgtctacaagcaattcgcggatcaatacaccaagactacgcggaagaaccccgacgaagaacaaagcacgtcgaggaagaaggacgacggcgataccccggcaggatttcaagaccaccgcaaggagctcaaccatatcttcggcggccccctggcttatgagtctaaaaggaagcaaaagttgaccgaacgggagatcaatgctgttcagcccgatacgccccaatatcttcgatggtcagagattgcaatcaagtttgaccgctcggatcatcctgaccgagtggtccacccggggcggtaccccctggtactagacccagtggtccgtaatgtcaagcttcgcagaaccctcattgacggtggcagtgcactcaacatcctcttcgccaagaccttggatgatatgcagattcctcgctccgagctgaaaccaagcaatgcgccttttcacggagtaattccaggattatccgcaactccactcggccagatcaccctcccggtcacttttggcactcgggaaaactttcgcacagagaatatcagctttgaagtcgccgatttcgagacagcataccatgccatactcggacgcccggcgttagccaagttcatggccgtcccgcactacacttacatgatgatgaagatgcctggtccccgaggagtcctatccctacggagtgacatcaagcaagccgtcacatgcgacaaggagagttgcgacatggcccaaacccgcgagatggcgtctgcccgagaggatatccgactggctgcagccacggcgagcgaaggagaaatacctgctaccaagacttcaaaaagtggagaaagcgaagccaagactaagaagattcccctagatccctctgatcctactaaaactgctaacaataaagatatctttgcgtggaaaccatctgatatgcccggtattcctagagaggtgattgagcactccttacatgtcaaagaagatgccaagcctatcaaacaacgactccgccgatttgcacaagacaggaaagacgcgatcaaggaggaattaaccaagctgttagcagcaggcttcatcaaagaagtccttcatcccgactggctggcaaacccagttctagttcggaagaaaacaaggcaatggcgcatgtgtgttgattacactgacctcaacaaatcctgccctaaagatccttttgggttgcctcgcattgaccagatccgactgaaggaatccgactgcttgaagacttcattcatcacgccctttggggcatactgctacgtcaccatgccgttcggactaaaaaacacaggagcaacttatcaacgtatgatccagagatgcttctcaacgcagatcggccgcaacgttgaagcctatgtggatgatgtagtcgtcaagaccaagcaaaaggatgatttgatctcggatctagaagaaaccttcgcgagcatccgtgctttcaggatgaaattaaaccctgaaaagtgcaccttcggagtaccgtcagggaagctgcttggttttatggtgtctcatagaggcatccaagccaacccggagaaagttactgctatcctcaacatgaaaccgccaagtacccagaaagatgttcagaagctgactggatgcatggcggcgctcagccgatttgtttcaagacttggcgagcgggggatgcccttctttaagctactaaagaaaacagacgacttccagtggggacccgaagcacagaaggccttcgaagatttcaagaaactcctaaccgagccaccagtcctagcttcaccacatccgcaggagccgttgttgctgtatgtatcagccacctcccaggttgtgagcacagtcttggttgttgagcgcgaggaagaaggccatgtccagaaagtccagcgaccgatttattttgtcagcgaggtcctagccgactccaaaacgaggtaccctcaggttcagaagctgttatatggtattctaattaccaccaggaagttatctcactactttcaaggtcactcggtaacggtggtcacatcatttccactcggtgatatattgcacaaccgcgaagcaaacggacggatcgctaagtgggctttggagttgatgtctttggacatatcattcaagccccgaatttcaatcaagtcccaagcgttagctgattttgtcgctgaatggaccgagtgccaggaggatacccccgtggagaagatggaacactggaccatgcattttgacgggtcaaaaagactttcgggcactggagcaggagtggttttaatttccccaactggagaaagattaagctatgtgctttggatacatttttcggcgtcccacaacgtcgccgagtatgaggcgctccttcatggactgcgaattgcaatttccctagggataaagcgtctaatagttcgaggcgattcacagctggttgtcaaccaggttatgaaagagtggtcctgccttgatgacaatatgatggcatatcgacaagaggtacgcaaattggaagacaagttcgatggactcgaactcagtcacgttcttcgacacgacaatgaagccgccgacagacttgccaattttagatccaagcgcgagatggcgccctctgatgttttcgtcgaacacctttatacgccgacgatacctcacaaagatactactcaagttgcgggcactcatgacgtagctatgattgaagccgactggcgagagcccctcatacgatttttgacttctcaagaactccctcaagacaaagatgaagccgagcggatttcaaggcggagcaaactttatgttatgcatgaagctgagttatacaagaaaagcccttcaggaattctgcaacgctgcgtatctttagaggaagggagacaattgctgaaagacatacattctgggatatgcggaaaccatgctgctgcgcgcaccattgtcggcaaagcttaccggcagggttttttctggcctactgcagtgtccgacgccgacaaaattgtgcgcacatgtgaaggttgccaatttttcgccagacaaattcatctaccagctcaagagttgcagactatcccgctgtcttggccgtttgcggtttgggggctcgacatggttggcccgtttaaaaaggcagtcggcggttacacgcatctctttttagctattgacaaattctccaagtggattgaagctaaaccggttatcacaatcacagcagataacgctcgagacttcttcatcaacattgtgcacagatttggagtgcccaatcggatcatcactgataatggcacacaattcactggcggagtttttaaagacttctgtgaggactttggaattaagatttgctatgcctcagtggcacaccccatgagcaatggacaggtggagcgagccaatggcatgatacttcaagggattaaagcgcgtgtttttgaccggctaaaaccctatgccggcaaatgggtgcaacagctgccatcggtactttggtctttgcgaactacacccagtcgggccacaggccagtcaccttttttccttgtctatggggcagaagcaatgttgccgagtgaagttgaattcgagtctttgcgctttcgaaatttccgtgaagaacgctacgaagaggaccgagtggatgacttgcaccgattggaagaagtccgcgaagcagctttgattcggtcggctcgatacttacaagggttgcggcgttatcataatcgcaatgttcgatcccgtgcttttttagtcggcgacctggttttgaggaaaattcaaactacacgggatcggcacaagttatctcctttatgggaggggccatttattatttctgaagtcacccggccaggttcctatcgactcaagcgtgaagatggtacgcttgtcgacaactcttggaacatcgaacatcttcgtcgtttctacgcttag

SEQ ID NO: 100762 - DNA, 6039 bp, Oryza sativa
  Clone ID: PAT_MRT4530_98447C.1
atgggtcctttctccggcatcgacgacctcgtcttcccacccgggcagacgtttcggttcggcagcctcgacttcgtcaccgacaacttcggcaagatttctctctttgactcggaatcggaccagtcgggagagaaccggatctcagtcccgtttggattcccaaacgcggctgaaacctacttcaagaccatctcaatcgagtcggcttcaaaccactcggctgagatcgcatcttctccaacgacaccagatcaagatgatggggcttacccaccagtcctgatgaagctccccgacgatttagcggccgtctccaccacgacagcgtcttcatcccgtaggcctaggcggaagtcagtttcaacaccgacttcgcctagcttcagggaagtcggcgtcatcctccaaccactcggcacggtttcgacggatcagctagatgaccattacagctctcccaccgtcgactcgcaccccaccgacatcgtggagtacgatgagtttagctctcgctaccacgacccggatctcgacgacttcgacggaagcctagatgacaactacacccctctctactttggcgttttcatggccaataacgagacggaggagcaacgccaagcccgggagaccgaagaacgtcgccgactggaggaggagcatcaagcacaagaacaagaacggctacggcgtgagcagcaggaccgtgagcggatcgccaaggaggctgaagatcgacgtcagcgagctttggaagcagggcgccgagcgcgtgatctcattggacaacaagacgtcgaagggacaccggttttccgcacccctcaacagaatgcggttgccgcgatcacccttctcgacaccctcctcaaccaaaacgagctcaatcgttccgaccacgtcgtcaacatcttgaaccagacgaagaccatgatcgcggcttcggtcccagttaactccgaaagcgtccacacgccgactggcacccgagtcccccacttccgatctcatgactaccgtcatccaagcctcagcatcaccggcgcaggatccaaccgcaggagcaggggtcacgacgagcggtctgttcactcacctcccgaccttcatagggagcgccgagtggaacggcctcgctcaccacctcgtcgccgccccatcgatcttcgcgacacaatcatacagcgccgagcagctcgaggctaccatcactcgccggaccgccacgacgacgaccttgacggagtagcagccttcaccgacgacctgcgtcgagtggattggccagccggcttcaaaccgactggaatagagaagtatgacggcaccactaaccccgaatcgtggcttaccgtctacggtctcgcaatccgcgcagcaggaggagacaacaaggctatggcgaactatttaccggtggctttagcagattccgcccgatcttggctccatggattgccccgtggtacaattggatcttgggccgaactacgcgaccacttcatcgccaacttccaaggcaccttcgagcatcccggcacacaatatgatctctacaacgtcattcagaagtccggagaatcccttcgagattacatccggcgattttctgaacaacgtaacaagatctccgacatcaccgacgacgtcatcatcgccgcgttcaccaaagggattcgccacgaagaactagtcggcaagtttgggcgtaagcctcccaggacagtcaagcttatgtttgaaaaagccaacgaatacgccaaagctgaagacgccgtcaccgcatcaaagcagtcgggtcccagttggaagcaaaacaagggtacgccggctacgggaggaggtggaagtaacaatcataaggaccgcaagcgtaagcctgcggaacttgttgcaaccgccagtcactcttctcgacagcgttcgcgcgtcaacacgttcgacaagatcatgaactcccaatgcccacaccatcctaactccaaccacgtggccaaagattgtttcgtctacaagcaatttgcggatcaatacaccaagactgcacggaagaacaccgacgaagaacaaagcacgtcgaggaagaaggacgacggcgacaccccggcaggttttcaagatcaccgcaaggagctcaaccatatcttcggcggccccctggcttatcagtctaaacggaagcagaagttgactgaacgggagatcaatgctgttcagcctgacacgccccagtatcttcgatggtcagaaattgcaatcaagtttgaccgctcggatcatcctgaccgagtggtccacccggggcggtaccccctggtactagacccagtggtccgtaatgtcaagcttcgcagaaccctcattgacggtggcagcgcactcaacatccttttcgccaagaccttggatgatatgcagattcctcgctccgagctgaaaccaagcaatgcgccttttcacggagtaattccaggattatccgcaactccactcggccagatcaccctcccggtcacttttggcactcgggaaaactttcgcacagagaatatcagcttcgaagtcgccgatttcgagacagcttaccatgccatactcggacgcccggcgttagccaagttcatggccgtcccgcactacacttacatgatgatgaagatgcctggtccccgaggagtgctatccctacggagcgacatcaagcaagccgtcacatgcgacaaggagagttgcgacatggcccaaactcgcgagatggcgtctgcccgagaggacatccgactggctgctgccacggcgagcgaaggagaaatacctgccaccaagacttcaaaaagtggagaaagcgaagccaagactaagaagattcccctagatccctctgattctactaaaactgctaataataaagatatctttgcgtggaaaccatcggatatgcccggtattcctagagaggtgattgagcactccttacatgtcaaagaagatgccaagccgatcaaacaacgactccgccgattcgcacaagacaggaaggacgcaatcaaggaggaattaaccaagctgttagcagcaggcttcatcaaagaagttcttcatcccgattggctggcaaacccggttctagttcggaagaaaacagggcaatggcgcatgtgtgttgattataccgacctcaacaagtcttgccccaaagatccttttgggttgcctcgcattgaccaggtagttgactcaaccgccggctgtgagcttctcagttttttggactgctactcggggtatcatcagatccgactgaaggaatccgactgcttgaagacttcattcatcacgccttttggggcatactgctacgtcaccatgccgttcggactaaaaaacgcaggagcaacttatcaacgtatgatccaaagatgcttctcaacgcagatcggccgcaacgttgaagcctatgtggatgacgtagtcgtcaagaccaagcaaaaggatgatttgatctcggatctagaagaaacctttgcgagcatccgtgctttcaggatgaaattgaaccctgaaaagtgcaccttcggagtaccgtcaggaaagctgcttggctttatggtgtctcataggggcatccaagccaacccggagaaagttactgctatcctcaacatgaaaccaccaagtacccagaaagatgttcagaagctgactggatgcatggcggcgctcagccgatttgtttcacgacttggcgagcgggggatgcccttctttaagctgctgaagaaaacagatagcttccggtggggacccgaagcacagaaggccttcgaagatttcaaaaaactcctcaccgagccaccagtcttagcctcaccacgcccgaaggagccgttgttgctgtatgtatcagccacctctcaggttgtgagcacagtcttggtcgttgagcgcgaggaagaaggccatgtccagaaagtccagcgaccgatttactttgtcagcgaggtcctagccgactccaaaacgaggtaccctcaggttcaaaagctgttatatggtattctaattactaccaggaagctatctcactactttcaaggtcactcggtaacggtggtcacatcatttccactcggtgatatactgcacaaccgcgaagcgaacggacgtattgctaagtgggctttggagttgatgtctttggacatatcattcaagccccgaatttcaatcaagtcccaagcgttagctgattttgtcgccgaatggaccgagcgccaagaggatacctccgcggagaacatggagcattggaccatgcattttgacggatccaaacgactttcgggcactggagcaggagtggttttgatttccccaactggagaaagattaagctatgtactttggatacatttttcggcgtcccacaatgtcgccgagtatgaggccctccttcatggactacggattgcaatttccctagggataaagcgtctaatagttcgagttgattcacagctggttgtcaaccaagttatgaaagagtggtcctgccttgacgacaatatgatggcatatcgacaagaggtgcgcaaattggaagacaagttcgatggactcgagctcagtcacgttcttcgacacaacaatgaagccgccgacagacttgccaattttggatccaagcgcgagacggcgccctcagatgttttcgtcgaacacctttacacaccgaccgtacctcataaagatactattcaagatgcggacactcatgacgtggctatggttgaagccgactggcgagagcccttcatacgatttttaatttctcaagaactccctcaagataaagatgaagccgagcggatttcaaggcggagcaaactttatgttatgcatgaatctgagctatacaagaaaagcccttcaggaattctgcaacgctgcgtatctttagaggaagggagacaattgctgaaagatatacattctgggatttgcggaaaccatgccgctgcacgcaccattgtcggcaaagcttaccggcagggttttttctggcctactgcagtgtccgacgccgacaagattgtgcgcacgtgcgaaggttgccaatttttcgccagacaaattcatctaccagctcaagagttgcagactatcccgctgtcttggccgtttgcggtttgggggcttgacatggttggcccgtttaaaaaggcagtcggcggttacacgcatctctttgtggccattgacaaattctccaagtggattgaagctaaaccggttgtcacaatcacagcagataatgctcgagacttcttcatcaacattgtgcatagatttggagtgcccaatcggataatcactgataatggcacacaattcactggcggagtttttaaagacttttgtgaggactttggaattaagatttgctacgcctcagtggcacaccccatgagcaatggacaggtggagcgagctaatggcatgatacttcaagggattaaagcgcgtgtctttgaccggctaaaaccctatgccggcaaatgggtacaacagctgccatcggtactttggtctttgcgaactacacccagtcgggccacaggccagtcaccttttttccttgtctatggggcagaagcaatgttgccaagtgaagttgaattcgagtctttgcgctttcgaaatttccgtgaagatcgctacgaagaggaccgagtggatgacttgcaccgattggaagaagtccgcgaagcagctttgattcggtcggctcgatatttacaagggttgcggcgctatcataatcgcaatgttcgatctcgtgcctttttagtcggtgatctggttttgaggaaaattcaaactacacgagatcggcacaagttatctcctctatgggaagggccatttattatctctgaagtcacccggccaggttcttatcgactcaagcgcgaagacggtactcttgtcgacaactcttggaacattgaacatcttcgtcgtttctatgcttaa

SEQ ID NO: 100763 - DNA, 526 bp, Oryza sativa
  unsure (1)..(526): unsure at all n locations
  Clone ID: PAT_MRT4530_98448C.1
tttggccaggtaattggtgngaaaaggggnngaanaattaaaattttttttccnttntccccaaanaagattggggggtttttnaaaaaacaggatcaaaannggncggggggcggttaaaagaaattccccagnaaaaatggtgntatgggggngangtgtagcttcggacctggatcgggnaaagaatttgcagcggtggtngcaacggattttttggntttgggntgccnccnngggtntttaagttataccnggacccatntccatgtaaagnaaanntcaattgcactgttgngtttgttgnaagttantaantttttagggnccctnngnataaanaaaataggnaatttaaataagttccatccanttttgnaatttnaaaanaccngcccnganacctngngnggnattttgngtanatttagnagnaaanttattntttttaaaaaaaaaaaaaaaaaaaaaaaaaaaaaaaaaaaaaaaaaaaaaaaaaaaaaaaaaaaaaaaaaaaaaaaaaaaa

SEQ ID NO: 100764 - DNA, 5628 bp, Oryza sativa
  Clone ID: PAT_MRT4530_98449C.1
atgggttccgtctccggcatcgacgacctcgtcttccaacccgggcaggcgtttcggttcggcagcctcgacttcgtcaccaataacttcggcaagatctctctcctcgactcggaatcggaccagtcgggagagagccggatctcagtcccgtttggagttccaaacgcggctgaaatctactccaagtccatctcaatcgagtcggcttcaaaccactcgggcgagattgcatcttctccaacgtcatcagatcgagatgatggggcttacccaccgatcctaatgaagctccccgacgatttggcggccgtcttcaccaccacagcgtccccatcccgtaggcctaggcggaaatcggcttcaacaccgatctcgcctagctccagggaagtcggcgtcatccaccagccactcggctcagtttcgacggaccagctggatggctactggagctctcccgccgtcgactcgcgtccgaccgagatcgtggagtacaatgagttcggctttcgcaacaacgacccggatctcgacgacttcgatgaaagcctagaagacaactacacccctctctatttcggcgtctttatggccgataacgagacggaggagcaacgccaagcccgggaaaccgaagcacgacgcgagtccgagcgatgccgactggaggaggagcgtcaagtacaagaacaagaacggctacggcgtgagcaacaggagcgtgagcgggctgcaaaggaggctgaagaccggcggctacgagccttggaaacagggcaccgagcgcgagatcttatcggccaacaagacgttgaggggacaccagttttccgcaccccacaacagaatgctgttgccgcgatcaccctcctcgacaccctcctcaaggaaaacgagctcaatcaatctgaccacgtcgtcaacatcttgaaccagacaaagaccatgattgcggcttcggtcccagttaactccggaagcgtccgcacgccgagcggcagccgagtccctcatcttcgatctcacgactaccaccagccaagcctcagcatcgctggcgcgggatctaatcgcaggagcaggggtcacgacgagcgatctgtccactcgcctcccgaccatcatagggagcgccgagtggaacgacctcgttcgccacctcgtcgtcgccccgtcgatcttcgcgagacgatcatacaacgccgggcagctcgaggccatcatcattcggcggatcgccacgacaacgaccttgacggagtagccgctttcaccaacgacctgcgtcgagtggattggccagccggctttaagccgactagaatagagaagtatgacggtaccaccaacccggaatcatggcttaccgtctacggtctcgcgatccgcgcagcaggaggagatagcaaggccatggcgaactatttaccagtggctttagcagattccgcccggtcctggctccatggattgccccgtggtacaatcggatcttgggccgaattacgcaaccacttcatcgccaacttccaaggcaccttcgagcgccccagcacacaattcgacctctacaacaactctaacatcaccgacgatgttatcatcgccgcattcaccaaaggaattcgccacgaagaattggtcggcaagttcgggcgtaagcctcccaaaacagtcaaacttatgtttgaaaaagccaacgagtacgccaaggctgaagacgccgtcatcgcatcaaagcagtcgggctccagttggaagccaaaaaaggatacgccggctacgggagggggtggaagtaacaatcataaggaccgcaagcgtaagcctgaggaacttgttgcaactgctactcactcttctcgacagcgttcgcgcgtcaacacattcgacaagatcatgaactcccaatgcccgcatcatcctaactccaaccacgcggccaaagattgtttcgtctacaaacagttcgcggaacaatacaccaagactacacggaagaactccgacgaagaacaaagcacgtcgaagaagaaggacgatggcgaccccccggcaggttttcaagaccaccgcaaggagcttaaccacatcttcggcggccccttggcttatgaatctaaaagaaagcaaaagttgaccgaacgggagattaacgccgttcagcccgacacaccccaatatcttcgatggtcagagacagcaatcaagtttgaccgctcggatcatcccgaccgagtggtccacccggggcggtaccccctggtactagacccagtggtccgtaatgtcaagcttcgcagaaccctcatcgacggtggcagcgcactaaatatcctcttcgccaaaaccttggatgacatgcagattcctcgctccgagttaaaaccaagcaatgcgccttttcacggagtcattccagggttatctgcaactccactcggccagatcacccttctggtcacctttggcactcgggaaaacttccgcacggagaatatctgcttcgaagtcgccgatttcgagacagcgtaccacgccatactcggacgcccggcgttagccaagtttatggccgtcccgcactacacttacatgatgatgaagatgcctggtccccgaggagtcctatccctacggagcgacatcaagcaagccgtcacatgcgacaaggaaagttgcgagatggcccagactcgcgagatggcgtctgcccgagaagatatccgactggctgcaaccacggcaagcgaaggagaagtgcccgcgaccaagatcttaaagagcggagaaagcgaagccaagactaaaaagattcccctagatccttctgatcccactaaaactgctgtaataggcgccgagttagattggtatcatcagatccgactgaaggaatccgactgcttgaagacttcattcatcacacccttcggggcctattgctacatcaccatgccattcggactaaaaaatgcaggagcaacttatcaacgtatgattcagagatgcttctcgatgcaaattagccgcaatgtcgaagcgtacgtggatgatgtagtcgtcaagactaagcagaaggatgatttaatctcggatctagaagaaacctttgcaagcatccgcgctttcaggatgaaactaaaccctgaaaaatgcaccttcggagtaccgtcagggaacctgcttggttttatggtgtctcatagaggcatacaagccaacccggagaaagttactgctatcctcaacatgaaaccgccaagctcccagaaagacgtccagaagctgactggatgcatggcggcgctcagccgattcgtttcacgacttggcgagcgggggatgcccttcttcaagctattaaagaaaacagacgatttccagtggggacccgaggcacagaaggccttcgaagatttcaagaaactcctcaccgagccaccagttttggcctcaccacacccgcaggagccgttgttactatatgtatcagccacctcccaggttgtgagcacagtcttggtcgttgagcgtgaggaagaaggccacgtccagaaagtccagcgaccgatttgctttgtcagcgaggtcctagccgactccaaatcgagatatcctcaggttcagaagctgttatatggtattctgattactaccaggaaattatctcactacttccaaggtcactcggtaacggtggtcacatcgtttccgctcggcgatatactgcacaaccgcgaagcaaacggacggattgctaaatgggctttggagttgatgtctttggacatatccttcaagccccgaacttcaatcaagtctcaagcattagccgacttcgtcgccgaatggaccgagtgccaggaggatacccccgcagaaaagatggagcactggaccatgcattttgacggatcaaaaaggctttcgggcactggagcgggagtggttttaatttccccagctggagaaagattaagttatgtgctttggatacatttttccgcatcccacaacgtcgccgagtatgaggcgctcctccatggactacggatcgcaatctccctagggataaagcgtctaatagttcgaggcgattcacagctggtcgtcaaccaagttatgaaagagtggtcctgccttgacgacaacatgacggcatatcgacaagaggtacgcaaattggaagacaagttcgacggacttgagcttagtcacgttctccgacacaacaatgaagccgccgaaagacttgccaactttggatccaagcgcgaggtggcgccttctgatgtattcgttgaacacctttatgagccgaccgtacctcagaaagaaacagctcaagttgcggacactcataacatagctatgattgaagccgactggagagagcccctcatacgatttttgacttctcaagaactcccccaagataaagatgaagccgagcggatttcaaggcgaagcaggctttatgttattcatgaagccgagctatacaagaaaagcccttcaggaattctgcaacgctgcgtatctctagaggaagggagacaattgttgaaagacatacattctggaatatgtggaaaccatgccgccgcacgcaccattgtcggcaaagcttaccggcagagttttttctggcctactgcagtgtccgacgccgacaaaattgtgcgcacgtgcgaaggttgccaatttttcgccagacaaatccatttaccagctcaagagttgcaaacaatcccactgtcttggccgtttgcggtttgggggctcgacatggttggcccgttcaaaaaggcagtcggcggttacacgcatctctttgtggccattgacaaattctccaagtggattgaagctaaaccggttgtcacaatcacagcagataaagctcaagatttcttcatcaacattgtgcataggtttggagtgcctaatcggattatcaccgataatggcacacaattcactggcggagtttttaaagacttttgcgaagacttcggaattaaaatttgctatgcctcagtagcgcatcccatgagcaatggacaggtcgaacgagccaacggcatgatacttcaagggataaaagcgcgagtttttgaccggctaaaaccctatgctggaaaatgggtggaacagctgccatcagtactttggtccttgtgtactacacccagtcgggccacaggccagtcaccttttttccttgtctacggggcagaagcaatgttgcctagtgaagttgaattcgaatctttgcgctttcgcaattttcgcgaagaacgctacgaagaggaccgagtggatgatctgcaccgattggaagaagtccgcgaagcagctttaattcagtcggcccgatatttacaagggttgcgacgttatcataatcgcaatgttcgatcccgtgctttcctagtcggcgacctggttttgaggaaaattcaaactacacgagatcagcacaagttatctcctttatgggaagggccatttatcatctctgaagtcacccggccaggttcctatcgactcaagcgcgaagatggtacactcattgacaattcttggaatatcgaacatcttcgtcgtttctacgcttaa

SEQ ID NO: 100765 - DNA, 219 bp, Oryza sativa
  Clone ID: PAT_MRT4530_9844C.1
tcgtgcacgcgtccggcggagtaaacgttatgcatactgcatggcactatgttatacaaaccttgattacacatgtaagctgcgtgtctacgtggctagacacgtaagatacatctggatcgtgtgcaataatctggtgaaatcgcattagagtattatgctaaaagtgttacacctctttatgaagtcgtgccatagttgggttacaagcatacgaac

SEQ ID NO: 100766 - DNA, 1610 bp, Oryza sativa
  Clone ID: PAT_MRT4530_98450C.1
cagaataaatgcaagggaatacaagggaattatactataaaggctcagaagcactatacttctgaaaagggggaataatagcaaggctgagtacaaccaccgtactcagcaagccacaccaacgatgcagacgtgcaaggggaacacaaggatggtttcacccccacccctcaaaaggcagtgggcggtcccctcttgcgccgcggtgaatccggcagctggacaaccggacaccccggccgacccaactccatcacgcccaccctcgccaccggtgcctaggaaagggtcgagctattcttcagatcaagcagttacccactcccgcttgtggcaagcgctgaaatggacctcgctgacgtcagcaaaggggcggccggcgccgacacgcgggccccacatgtcagcgagtcaaagggggagggcgcacggtggacatggtccacacgtggcctcgggtgcgcgtccaccacgtggacggcccagatcggcctgagccgatcggacggctggggacggccgagcggccgcgagggcgcgcccgagggcggcctcgccggcacggccgacgggagcggcgcgcacccgcgccccgatggtcaccgccggcgaccaccggcgcggcggagcggcacccgagagagaggagggaagggggaaacgaacggagcggtccacggctcaccccgagacagcgaaggcggcggaaacgacggccggagcggaggaagacggcggcgcggttcgggatgacgagggcgacggtgctccggcggtcggcgggcgaaacgaaggggcggacggagtcggcgacgacgcggcgaagccgatggaggtggcgccgagtcgggaagaggtccggagcggcgacggcggcgaaccgaaggtcggcggcgacggcggagagagaggtgaacggcgcgagggcacgggcgcggcggcggcgggaggagggcgatcggcggccgaggtgctcctcggcgctgcgaagcgagcggcagcgacagcgcgacttggggtggctaggagcggcgccaagcggcggctggagtcggcggcggcggtggaaggaggtggtgcgcgtggcgacggtgcttcggaggcggggaggggaaatggagcggacgccggggtgcggcacggtatggcgaagctgatggcacacttggtgaggcgcggcgacggcgggagcagcggcggtgcgcggctggagatcgccggcgagcggcggcgatggggatcggcgtggagagctcggtagaggacgtgggggactcgggaaaacggggaaaaaggaagaggaggccacggggagtggggagtggggcggcgtcgtggcgggtgtggcggctcggcgtggcgtcgattcccgcggggagagagggggagtggggcgggatgtggtcgcgaggtggaaggggactcgggtccacgccggttgggacgaggggaggcgcgggatcggcggagggagtggacggcgtggccgacggttggagctggccggaggttgccacaaactaagccttacccattagacatgtggaagtacggtagtgctttgcaacagaggcccgagcttaatccttatagtggccggggtgctactt

SEQ ID NO: 100767 - DNA, 680 bp, Oryza sativa
  Clone ID: PAT_MRT4530_98451C.1
gggcgtgttcctgtctgccctctgcttgctgctctgctttcccctgctctcttcccccctgtgcaagagagagagcgccagactctccccacctgaggatccagccttgaaggcggccaaccttgccgggcgccgccaagcccgacgccgagctggctgggaagagctagggctcggttaagggggggggcgagggccctaacgggaacgccggcaggggccccaacaagcccatgaaggctccctgcgctttcttagcccttatggaggagttccgccggagtctacgagatctatccccaagaatatatccgtcgctgctgtaggataagcatgccgcgcgatatggtggatagtccactgacacgagagctgggcaatgagctcctctatgccagcgctaggctcaacatacctcatggcgcgagtacaacaaggctcttgctgcctacaccgagggcgagagcgctgccaataatgcacccgcccaggacgaagaggaggacgacgaggaggaatctgacaagtacaagtccgctgtctccgatgaggctggcgacggggccctcgatgaggatgaatactatgacgagtgagccttccggtggaccagatgtgagcagcgagacgctgagggcggcgggcgttctaaggagcctatccatgatcatcatcggcta

SEQ ID NO: 100768 - DNA, 5418 bp, Oryza sativa
  Clone ID: PAT_MRT4530_98452C.1
atgacctatagacttagcaactatttcttgtatgaacagatggctgatcgcgatgaggaacagatattgtacgatacaatcgcggagggaagcagccagtactggaacgaagaagaggggaacgaggatccaaaccagtacttgaacgaggaagggaacgtggagagggatgcggaggggaaccaggaggggcacgtggagagggatgtggaggggaacctggaggaggaggctagtggaagtcaaccctccgcaggacagaagagggcacgcgggcaacgaggtgccgtgaagaagcttgagggtcggcacatcataacggaagtggacgaagacggccgacctagtgccccggcggaagcagccaagaactacacaccgaacttcgacacattcccaaagctaagggatcactgggacgagttcgttgcatataagacaagtcaacaagggcaggcgatgttggaaagaaacaaagaaaatgccgctaagaagaagtaccatcaccacttggggtcaggcggctatagcgtcgcgatgccgaagtgggaggagatggaggcaagcttgcttgagaggggtatcaaaccggccactgctaaatggccagatcgatcgaagttctggtactatgctcacggtggaacgctcaacccagttgatggctccctggtcttcagcgatcagatacgcgaggctgcgcgtcgactaacggacgcagtggaagcctcttctcagggcacgttccgacctgacagcgagaaggacgagctgtcactcgccctgcagactccagagcatccaggacgaacacgagggaaaggggtgattccttggaagattgggttcagggaggacatccacacgtacaggattcggatgaggagcaagagagataccgaggcgaagattgtagatcttgagtacagggtatcgagctacgagctcagcatgcaagaggaggtggcaaggaaggttgatgaacgcatggccgcacatcggtcccatgatccccagccgaccattcctcctgcaatggtgagcccttcaggaaatcgtagcagctgcgcctcaacggggcaggtaggatcacagagcatggacgccatgcaaacccaggacgaaaccacctgccccgttgatgacatcactcagcggataccatgtgagctgcatattcccttaaagaacttatcaataaaggtggcgtcgggcatggccatcccaatggacccttcaggtacttaccactgcaggccgattccagcaggatactccaaggtcgaagttcagttggtcgaaggcgcgtacgaggacctcgagttggattaccctagaggagacggtgagacgcatctacgagacacaagccacgccattatactatggcgcaagtgcaccgtctccacctcaggctcctgcaccgactcctcctcaggctcctgcaccgactcctccgcaagctcctcgtccgacaccttccaagtcaagggctccccaagctccaccgactgcccccacaagggcaacgaagaaggcgaaaaagtcaggagacaattgaagcctcgaagtccagaaaagaagattcctatagacccgagtgtcaggaacttcttcaggggtatgtctgcacctgccaaggaggccataaagctatcggactatgagcgaacactcaagaaagcatcttctagaaagtccaaaccagtccctcagcttggagagcaaccaaaccaggagatcgagccgttggtgaccggtgaagattttggaatacaagaatttattaatgacaccaagctaactacggatcaattgctacgaggcgcaccaatcgaaaaggcggaagtgaaatacatgtacgaactcggtaaaccgcttgtcaagcctgagcagttgcagtccctacccacacaaatgtacaagttccatcaactgtacatggagatgagcgccaccggtagagagatgatcggagcgaggatcagggacacagacttcttgcaaggagatgacattctctggatcaatttcaagggtatctacgaactataccagctggacgccctcgacgtctctattatgagttgctggattttaatggagattcaaagggcccgacggtggggggttttcgatactggattcatcgaccctcagaaagtaaacgtcgcaatgctcgaccagtatccgcaagccacagaggaaaatctcatccatctcctgaaggcgcagcattacaagacgttcatactgttgccgtacaacacagacggccgctcgctcctcactgcactgtttctgcagcagatactactactgcaagaattcgccgagtttgacgcccgcgatgatcattgtcagatccctcgctccgagttaaaaccaagcaatgcgccttttcacggagtgattccaggattatccgcaactccactcggccagatcaccctcccagtcacttttggcactcgggaaaactttcgcacagagaacatcagctttgaagtcgctgatttcgagacagcataccatgccatactcggacgcccggcgttagccaagttcatggccgtcccgcactacacttatatgatgatgaagatgcctggtccccgaggagtcctatccctacggagtgacatcaagcaagccgtcacatgcgacaaggagagttgcgacatggcccaaactcgcgagatggcgtctgcccgagaggatatccgactggctgcagccacggcgagcgaaggagaagagcccgctaccaagatttcaaagagtggagaaagcgaagccaagactaagaagattcccctagatccctctgatcctactaaaactgctgtaataggcgccgaagaggtgattgagcactccttacatgtcaaagaagatgccaagcctatcaaacaacgactccgccgattcgcacaagacaggaaggacgcgatcaaggaggaattaaccaagctgttagcagcaggcttcatcaaagaagtccttcatcccgactggctggcaaacccggttctagttcggaagaaaacagggcaatggcgcatgtgtgttgattataccgacctcaacaaatcctgccctaaagatccttttgggttgcctcgcattgaccaggtagtcgactcgaccgccggccgtgagcttctcagttttttggattgctactcggggtatcatcagatccgactgaaggaatccgactgcttgaagacttcattcatcacgccttttggggcatactgctacgtcaccatgccgttcggactaaaaaacgcaggagcaacttatcaacgcatgattcagagatgcttctcaacgcagatcggccgcaacgttgaagcctatgtggatgacgtagtcgtcaagaccaagcaaaaggatgatttgatctcggatctagaagaaacctttgcgagcatccgtgctttcaggatgaaattgaaccctgaaaagtgcaccttcggagtaccgtcagggaagctgcttggctttatggtgtctcataggggcatccaagccaacccggagaaagttactgctatcctcaacatgaaaccgccaagtacccagaaagatgttcagaagctgactggatgcatggcggcgctcagccgatttgtttcacgacttggcgagcggggggacaaaggatttagacaggttcaggccctctcaatgagagacgagacgaccggcggtgaagaagataaggccaatcaacactggcagaatcatgcagccatggaagtgaagaaaccagtcggcagccatggcaaacgcggtgacaccagtcagcagcggatgcggcggccggtcggtgaagacgtagacgcccaacaacggcagcataataagtctgccgtgcaggcggaagcaccaatcggtagcggcgaaggcaagccggcggaaacaccagtcggcggcggcgaaggcaagccggtcggtgaagacgtaggcgcccaacaacgacggcataataggccagccgtgcaggcgaggacaccagtcggcggcagcgaaggtaagccggtcggtgaagacgtaggcgcccaacaacggcggcataataggccagccgtgcaggcgaggacaccagtcggcggcggcgaaggcgagccggtcggtgaagacgtaggcgcccaacaacggcggcataataggccagccgtgcaggcgaggacaccagtcggcggcggcgaaggcgagccggtcggtgaagacgtaggcgcccaacaacggcggcataataggccagccgtgcaggcgaggacaccagtcggcggcgacgaaggcgagccggtcggtgaagacgtaggcgcccaacaatggcggcataataggccagccgtgcaggcgaggacaccagtcggcggcgacgaaggcgagccggtcggtgaagacgtagacgcccaacaacggcggcataaaggccagccgtgcaggcgaggacaccagtcggcggcgacaaaggcgagccggtcggtgaagacgcgcccaacaacggcgcataataggccagctgtgcaggcgaggacaccagtcggcggcgacgaaggcgagccggtcggtgaagacgcgaggacaccagtcggcggcgacaaaggcgagccggtcggtgaagacgtaggcgcccaacaacggcgacataataggccagccgtgcaggcgtggacaccagtcggcggcgacgaaggcaagccggtcggtgaagacgtaggcgcccaacaacggcggcataataggccagctgtgcaggtggaagcaccaatcggcagcggcgaaggcaagccggtcggtgaagacgtagacgcccaacaacggtggcataataagtcagccgtgcaggcggaagcggaaacaccagtcggcggcggcgaaggcaagccggtcggtgaagacgtagacgcccaacaacggtggcataataggccagccgtgcaggcggaaacaccagtcggccgcggcgaaggcaagccggtcggtgaagacgtagacgcccaacaacggcggcataataggccagccgtgcaggcggaagcaccaatcggcagcggcgaaggcaagccggtcggtgaagacgtagacgcccaacaacggcggcataataagtcagccgtgcaggcggaagcggaaacaccagtcggcagcggcgaaggcaagccgatcggtgaagacgtagacgcccaacaacggcggcataaaggccagccgtgcaggcggaaacaccagtcggcggtgacgaaggcaagccggtcggcggaaacaccagtcggcggcgacgaaggcaagccggtcggtgaagacgtagacgcccaacaacggcggcataaaggccagccgtgcaggcggaaacaccagtcggcagcggcgaaggcaagccagtcggtgaagacgtag

SEQ ID NO: 100769 - DNA, 496 bp, Oryza sativa
  Clone ID: PAT_MRT4530_98453C.1
tgcagtgagagtcgccaccaccgtgaccggagaggtgacaggccgatgagctcgccgcgagtggcgatggggtcgcgcggctgccacgtgaggccagggccctggccctgccgtgcctgccgcgtggagtgcggccatccgccgggcgtgcacgcggccggccggaggcaagtggaggctggccgtccgctgggcctgacgtcgatgaggtgcagccgcctcccggtgcggaagaggtgcgtgcgcgccactgtgcttcatcaattttgctgtgtgttcccctttcagttgggtgctttggctctgttgctcgattagtgctagctgttggattagctagcatatgttcagtataattggcgagatgtaattagtgtttcctgtgctactggattcaagagtggtttactgttggagaatgtgggctgcacttgtagagcaaactgagaagtagtagtaggaaataaatacccgttcaatccttttgcatctgatg

SEQ ID NO: 100770 - DNA, 5709 bp, Oryza sativa
  Clone ID: PAT_MRT4530_98454C.1
atgggttccgtcaccggcatcgacgacctcgtcttcccacccgggcaggcgtttcggttcggcagcctcgacttcatcaccagcaacttcggcaaaatttctctccttgactcggaatcgaaccagtcgggagagaaccggatctcagccccgtttggattcccaaacgcggctgaaacctacttcaagaccatctcaatcgagtcggcttcaaaccactcggctgagattgcatcttctccaacgacacaagatcaagaggatggggcttacccaccagtcctgatgaagctccccgacgatttagcggccgtcttcaccacgacagcgtcttcatcccgtaggcctaggcggaagtcggcttcaacaccgatttcgcctagcttcagggaagtcggcgtcatcctccaaccactcggcacgacggaggagcaacgtcaagcccgggagaccgaagaacgtcgccgactggaggaggagcatcaagcacaagaacaggaacggctacggcgtgagcagcaggaccgcgagcggatcgccaaggaggctgaggatcgacgtcagcgagctctggaagcagggcgccgagcgcgtgatctcatcggccaacaagatgtcgaagggacaccggttttccgcacccctcaacagaatgcggttgccgcgatcacccttctcgacaccctactcaaccaaaacgagctcaatcgatccgaccacgtcgtcaacatcttgaaccagacgaagaccatgattgcggcctcggtcccagttaactccgaaagcgtccacacgccgactggcagccgagttccctacttccgatctcacgactaccgtcatccaagcctcagcatcaccggcgcaggatccaaccgcaggagcaggggtcacgacgagcggtctgttcactcacctcccgaccttcatagggagcgccgagtggaacgacctcgctcaccacctcgtcgccgccccatcgatcttcgcgatacaatcatacagcgccgagcagctcgaggctaccatcactcgccggaccgccacgacgacgaccttgacggagtagcagccttcaccgacgacctgcgtcgagtggattggccagccggcttcaaaccgactggaatagagaagtatgacggtaccactaatccagaatcgtggcttaccgtctacggtctcgcaatccgcgcagcaggaggagacaacaaggccatggcgaactatttaccagtggctttggcggattccgcccgatcttggctccatgggctgccccgtggtacgatcggatcttgggccgaattacgcgaccacttcatcgccaacttccaaggcaccttcgagcgtcccggcacacaatatgatctttacaacgttacccagaaatccggagaatcccttcgagagtatatccgacgattttctgaacaacgtaacaagatctccgacatctccgacgacgtcatcatcgccgcattcaccaaagggattcgccacgaagaattggtcggcaaatttgggcgcaaacctcccagaacagtcaagctcatgtttgaaaaagccaacgagtacgccaaagccgaagacgccgtcaccgcatcgaagcagtcgggtcccagttggaagccgaaaaatacgcctgctacgggaggaggtggaagtaacaatcataaggaccgcaagcgtaagcctgaggaacttgttgcaaccgccgctcactcttctcgacagcgttcgcgcgtcaacaccttcgacaagatcatgaactcccaatgcccgcatcatccaaactccaaccacgtggccaaagagtgcttcatctacaagcagttcgcggagcagtacaccaagtctattcggaagaactccgacgaggaacaaagcacgtcaagaaagaaggacggcggcgacaccccggctggttttcaagatcaccgcaaggagctcaaccatatcttcggcggccccctggcttatgagtctaaacggaagcagaagttgactgaacgggagatcaatgctgtccagcccgacacgccccagtatcttcgatggtcagagatcgcaatcaagtttgaccgctcggatcatcctgaccgagtggtccacccggggcggtaccccctggtactagacccagtggtccgtaatgtcaagcttcgcagaaccctcatcgacggcggcagtgcactcaacatcctcttcgccaagaccctggatgatatgcagatccctcgctccgagttaaaaccaagcaatgcgcctttccacggagtgattccaggattatccgcaactccactcggccatatcaccctcccggtcacttttggcactcgggaaaactttcgtacagagaatatcagtttcgaagtcgccgatttcgagacagcttaccatgccatactcggacgcccggcgttagccaagttcatggccgtcccgcactacacttacatgatgatgaagatgcctggtccccgaggagtgctatccctacggagtgacatcaagcaagccgtcacatgcgacaaggagagttgcgacatggcccaaacccgcgagatggcgtctgcccgagaggaaatccgactggctgcaaccacggaaagcgcgctcatcacctttcttcaaaataataaagatatctttgcgtggaaaccttcggatatgcccggtattcccagagaggtgattgagcactccttacatgtcaaagaagacgccaagcctattaaacaacgactccgtcgatttgcacaagacaggaaggacgcgatcaaggaggaattgaccaagctgttagcagcaggcttcatcaaagaagtccttcatcccgactggctggcaaacccggttctagttcggaagaaaacagggcaatggcgcatgtgtgttgattataccgacctcaacaaatcttgccctaaagatcctttcgggttgcctcgcattgaccagatccgactgaaggaatccgactgcttgaagacttcattcatcacgccctttggggcatactgctatgtcaccatgccgttcggattaaaaaacgcaggagcaacttatcaacgcatgatccagagatgcttttcaactcagatcggccgcaacgttgaagcctatgtggatgatgtagtagtcaagaccaagcaaaaggatgatttaattttggatctggaagaaaccttcgcgagcatccgcgctttcaggatgaaattaaaccctgaaaagtgcaccttcggagtaccgtcagggaagctgcttggttttatggtgtctcataggggcatccaagccaacccggagaaagttactgctatcctcaacatgaaaccgccaagtacccagaaagatgttcagaagctgactggatgcatggcggcgctcagccgatttgtttcaagacttggcgagcgggggatgcccttcttcaagctactgaagaaaacagataatttccaatggggacccgaagcacagaaggccttcgaagatttcaagcaactcctcaccaagccaccggtcttagcctcaccacatccgcaggagccgttgttgctgtatgtatcagccacctcccaggtcgtgagcacagtcttggttgtcgagcgtgaggaagaaggccatgtccagaaagttcagcgaccaatttacttcgtcagcgaggtcctggccgactccaaaacgaggtaccctcaggttcagaagctgttatatggtattttaattactaccaggaagctgtctcattactttcaaggtcactcggtaacggtggtcacatcattctcactcggcgatgtactacacaaccgcgaagcaaatgggcggattgctaagtgggctttggagttgatgtctttggacatatcattcaagccccgcacttcaatcaagtctcaagcgttagctgattttgtcgccgagtggaccgagtgccaagaggatacccccgtggagaaaatagagcactggaccatgcattttgacgggtcaaaaagactttcgggcactggagctggagtggttttaatttccccgactggagaaagactaagttatgtgctttggatacacttttcggcgtctcacaacgtcgccgagtatgaagcgctccttcatgggctacggattgcaatttccctagggataaagcgtctaattgttcgaggtgattcacagctggttgtcaaccaagttatgaaagagtggtcctgcattgacgacaacatgatggcatatcgacaagaagtacgcaaactggaggataagttcgatggacttgagctcagccatgttcttcgacacaacaatgaagctgccgatagacttgcgaactttggatccaagcgcgaagcagcgccctctgatgtttttgtcgaacacctttatacgccgacggtacctcacaaagatgccactcaagttacgggtacccatgacgtcgctatggttgaagccgactggcgagagcccttcatacgatttttaacttctcaagagctccctcaagataaagatgaagccgagcggatttcaaggcggagcaaactttatgttatgcatgaatctgagttatacaagaaaagcccttcaggaattctgcaacgctgcgtatctttagaggaagggagacaattgctgaaagacatacattctgggatatgcggaaaccatgctgcagcgcgcaccattgttggcaaagcttaccggcagggttttttctggcctactgcagtgtccgacgccgacaaaattgtgcgtacatgtgaaggttgccaattttttgccagacaaattcatctaccagctcaagagttgcagactatcccgctgtcttggccgtttgcggtttggggactcgacatggttggcccgtttaaaaaggcagtcggcggttacacgcacctcttcgtggccattgacaaattctccaagtggatcgaagctaagcctgttgtcacgattacagcagataatgctcgcgatttcttcatcaccattgtgcacagattcggagtacccaatcggatcatcactgataatggcacacaattcaccggcggagttttcaaagacttttgtgaagactttggaatcaagatttgctatgcctcagtagcacacccaatgagcaatggacaggtggagagggccaacggcatgatacttcaagggattaaagctcgagtttttgaccggcttaaaccctatgccggcaaatgggtgtcacagttaccatcagtactttggtctttgcgtactacgcccagtcgggccacaggccagtcaccttttttccttgtctacggggcagaagcaatgttgccgagtgaagtcgagttcgaatctttgcgcttccgtaatttccgagaagagcactatgaagaagaccgagttgacgacttgcaccgactggaagaggcccgcgaagcagctttgattcagtcagctcggtacttacaagggttgcgacgttatcataatcgcaatgttcgatctcgtgcctttctagtcggcgacctggttttacggaaaattcaaaccacacgagatcggcacaagttatctcctctatgggaagggccatttatcatctctgaagttacccggccaggttcatatcgactcaagcgcgaagacggcactctcgtcgacaactcttggaacattgaacatcttcgtcgtttctacgcttaa

SEQ ID NO: 100771 - DNA, 5361 bp, Oryza sativa
  Clone ID: PAT_MRT4530_98455C.1
tgcaatgggttccgtctccggcatcgacgacctcgtcttcccacccgggcagacgtttcggttcggcagcctcgacttcatcaccaacaacttcggcaagatttctctcctcgactcggaatcagaccagtcgggagagaaccggctttcggtcccgtttggattcccgaacgcggctgaaagctacttcaagaccatctcaaccgagtcggcttcaaaccactcggccgagatcgcatcttctacaacgacaccagatcaagatgatggggcttacccaccggtcctgatgaagctccccgacgatttagcggccgtcttcaccatgacagcgtcttcatcccgtaggcctaggcggaagtcggcttcaacaccgctttcgcctagcttcagggaagtcggcgtcatcctccaaccactcggcacggtttcgacggatcagctggatgactacaacagctctcccaccgtcgactcacgtcctactgacatcgtggagtacgacgaattcagttctcgctacgacgacttcgacgacttcgacggaagcctagatgacaattacacccctctctactttggcgttttcatggccaataatgagacggaggagcaacgccaagcccgggagactgaagaacgtcgccgactggaggaggagcatcaagtacaagaacaagaacggctacggcgtgagcagcaggaccgtgagcggatcgccaaggaggctgaagatcgacgtcagcgagctttggaagcagggcgccgagcgcgtgatctcatcggccaacaagatgtcgaagggacaccggttttccgcacccctcaacagaatgcggttgccgcgatcacccttctcgacaccctcctcaaccaaaacgagctcaatcgttccgaccacgtcgtcaacatcttgaaccagacgaagaccatgatcgcagcatcggtcccagttaactccgaaaggcgtccacacgccgactggcagccgagatccaaccgcaggagcaggggtcacgacgagcggtctgttcactcacctcccgaccttcatagggagcgccgagtggaacggcctcgctcaccacctcgtcgccgccccatcgatcttcgcgacacaatcatacagcgccgagcagctcgaggctaccatcactcgccggaccgccacgacgacgaccttgacggagtagcagccttcaccgacgacctgcgtcgagtggattggccagccggcttcaaaccgactggaatagagaagtatgacggcaccactaaccccgaatcgtggcttaccgtctacggtctcgcaatccgcgcagcaggaggagacaacaaggccatggcgaactatttaccagtggctttagcggattccgcccgatcttggctccatggattgccccgtggtacaattggatcttgggccgaactacgcgaccacttcatcgccaacttccaaggcaccttcgagcgtcccggcacacaatatgatctctacaacgtcattcagaagtccggagaatcccatcgagattacatccggcgattttctgaacaacgtaacaagatctccgacatcaccgacgacgtcatcatcgccgcgttcaccaaagggattcgccacgaagaactagtcggcaagtttgggcgtaagcctcccaggacagtcaagctcatgtttgaaaaagccaacgagtacgccaaagctgaagacgccgtcaccgcatcaaagcagtcgggtcccagttggaagcaaaacaagggtacgccggctacgggaggaggtggaagtaacaatcataaggaccgcaagcgtaagcctgcggaacttgttgcaaccgccagtcactcttctcgacagcgttcgcgcgtcaacacgttcgacaagatcatgaactcccaatgcccgcaccatcctaactccaaccacgtggccaaagattgtttcgtctacaagcaattcgcggatcaatacaccaagactgcacgaaagaactctgacgaagaacaaagcacgtcgaggaagaaggatgacggcgacaccccggcaggttttcaagatcaccgcaaggagctcaaccatatcttcggcggccccctggcttatgagtctaaacggaagcagaagttgactgaacgggagatcaatgctgttcagcccgacacgccccagtatcttcgatggtcagagattgcaatcaagtttgaccgctcggatcatcctgaccgagtggtccacccggggcggtaccccctggtactagacccagtggtccgtaatgtcaagcttcgcagaactctcatcgacggtggcagtgcactcaatatcctcttcgccaagaccttggatgatatgcagattcctcgctccgagctaaaaccaagcaatgcgccttttcacggagtaattccaggactatccgcaactccactcggccagatcaccctcccgagaacatcagctttcgaagtcgccgatttcgagacagcataccatgccatactcggacgcccggcgttagccaagttcatggccgtcccgcactacacttacatgatgatgaagatgtctggtccccgaggagtcctatccctacggagtgacatcaagcaagccgtcacatgcaacaaggagagttgcgacatggctcaaacccgcgagatggcgtccgcccgagaggatatccgactggctgcagccacggcgagcgaaggagaagtgcccgctaccaagatttcaaagagtggagaaagcgaagccaagactaagaagattcccctagatccctctgatcctactaaaactgctaacaataaagatatctttgcgtggaaaccatctgatatgcccggtattcctagagaggtgattgagcactccttacatgtcaaagaagatgccaagcctatcaaacaacgactccgccgattcgcacaagacaggaaggacgcgatcaaggaggaattaaccaagctgttagcagcaggcttcatcaaagaagtccttcatcccgactggctggcaaacccggttctagttcggaagaaaacagggcaatggcgcatgtgtgttgattataccgacctcaacaagtcttgtcccaaagatccttttgggttgcctcgcattgaccaggtagttgactcaaccgccgactgtgagcttctcagttttctggattgctactcagggtatcatcagatccgactgaaggaatccgactgcttgaagacttcattcattacgccctttggagcttattgctatgtcaccatgccgttcggactaaaaaacgcaggagcaacttatcaacgtatgatccaaagatgcttctcaacgcagatcggccgcaacgttgaagcctatgtggatgatgtagtcgtcaagaccaagcaaaaggatgatttgatctcggatctagaagaaaccttcgtgagcatccgcgctttcaggatgaaattgaaccctgaaaagtgcaccttcggagtaccgtcagggaagctgcttggctttatggtgtctcataggggcatccaagccaacccggagaaagttactgctatcctcaacatgaaaccgccaagtacccagaaagatgttcagaagctgactggatgcatggcggcgctcagccgatttgtttcaagacttggcgagcgggggatgcccttctttaagctgctgaagaaaacagataacttccagtggagacccgaagcacagaaggccttcgaagatttcaagaaacttctcaccgagccaccagtcttagcctcaccacacccgcaggagccgttgttgctgtacgtatcagctacctcccaggttgtgagcacagtcttggtcgttgagcgcgaggaagaaggccatgtccaaaaagtccagcgaccgatttattttgtcagcgaggtcctagccgactccaaaacgaggtaccctcaggttcagaagctgttatatggtattctaattactaccaggaagctatctcactactttcaagcaaacggacgtattgctaagtgggctttggagttgatgtctttggacatatcattcaagccccgaatttcaatcaagtcccaagcgttagctgattttgtcgccgaatggaccgagtgccaggaggatacccccgcggagaacatggagcactggaccatgcattttgacggatccaaacgactttcgggcactggagcaggagtggttttgatttccccaactggagaaagattgagctatgtgctttggatacatttttcggcgtcccacaacgttgccgagtatgaggccctccttcatggactacggattgcaatttccctagggataaagcgtctgattgttcgaggcgattcacagttggttgtcaaccaagttatgaaagagtggtcctgcattgacgacaatatgatggcatatcgacaagaggtgcgcaaattggaagacaagttcgagggactcgagctcagtcacgttcttcgacacaacaatgaagccgccgacagacttgccaattttggatccaagcgcgaggcggcgccctcagatgttttcgtcgaacacctttatacaccgaccgtacctcataaagatactactcaagatgcggacactcatgacgtagctatggttgaagccgactggcgagagcccttcatacgatttttaacttctcaagagctccctcaagatgaagatgaagccgagcggatttcaaggcggagcaaactttatgttatgcatgaatctgagttatacaagaaaagcccttcaggaattctgcaacgctgcgtatctttagaggaagggagacaattgctgaaagacatacattctgggatatgcggaaaccatgctgctgcacgcaccattgtcggcaaagcttaccggcagggttttttctggcctactgcagtgtccgacgccgacaaaattgtgcgcacatgtgaaggttgccaatttttcgccagacaaattcatctaccagctcaagagttgcaaactatcccgctgtcttggccgtttgcggtttgggggctcgacatggttggcccgttcaaaaaggcagttggcggttacacgcatctctttgtggccattgacaaattctccaagtggattgaggccaaaccggttgtcacaatcacagcagataatgctcgagacttcttcatcaacattgtgcatagatttggagtgcccaatcggataatcactgataatggcacacaattcactggcggagtttttaaagacttttgtgaggacttcggaattaagatttgctacgcttcagtggcacaccccatgagcaaggacaggggggccgcattggccgaagtcgtaaacag

SEQ ID NO: 100772 - DNA, 985 bp, Oryza sativa
  Clone ID: PAT_MRT4530_98456C.1
tgattggtggatttcgccatcaccgttgatgcgcgtctacatcttcatcgtcggtttgcttttgtcaccaccgactgttctttcgttgttgttggggaccagccagggtacacaaacgacaattgttgacatacagatccacgtcttacaaaaatagaaaagattacaaatgcagcggaaaagaataaaagcgagctaaaccgggaagcttgacttcagcagcgggcgactccactccacaggcaatccttgacggcagcgacgaaaccaactttgacaaaacagctccaactaggaagatcttcagctctgctggacaaccggacaccccggccgacccaactccatcacgcccaccctcgccaccggtgcctaggaaagggtcgagctatacttcagatcaagcagttacccactcccgcttgtggtaagccggccggccatggcgaggcgacgacggcgcacgaccaccggcggtgaccggcggcgcggggagacggcggcggccggcgcgaaggcggcggcggcagccgaagacgacggcgcacgcgggcggccggcgcgaaggaagaaagcggcggcgacgaccggtgatgcggaggcacggacgggcggcggcgacaccctaggagaagatggagaggcgttaggagaggagacgacgaccacggcggcttgaattgccggccggagatggaggggagggaaaaactcaccggctcgcgaggggagaggtgctccggtgggattccggcgacgcgaggcggcggccgggaaagctcttgcggcggcgaagctaacggcggcggcggtttggcgcggcggcgactctagcggcggcggctcgcggccgaaggcggcggcaagcggcggcactagcaacaagcggcgcgagcgcgataggaggcacgggagagcgcggcgagtgcgaaaaacgagagaggaagacgcggggagcgatttataggtgcgggagggggcggac

SEQ ID NO: 100773 - DNA, 2670 bp, Oryza sativa
  Clone ID: PAT_MRT4530_98457C.1
atgtccgcggcggccgtgactcgccggatcaacgcgggcggcctccgcgtcgaggtcaccaacggcaatggcgcggccggcgtctacgtggcggcggcggcggcaccgtgctcgccggcggccaagcgggtgaacgacggcggcggcaaggatgacgtgtgggtggccgtcgacgaggcggacgtgtcggggcccagcggcggcgatggcgttcggccgacgctgttccggacgtacaaggtcaagggcagcatcctgcatccttacaggttcttgatcctagttcgactgatcgccatcgtcgccttcttcgcgtggcgcgtacgccacaagaaccgcgacggcgcgtggctgtggacaatgtccatggccggcgacgtctggttcggcttctcgtgggcgctcaaccagctcccgaagctgaaccccatcaagcgcgtcgcggacctcgccgccctcgccgaccggcagcagcacggcacctccggcggcggcgagctccccggcgtcgacgtcttcgtcaccaccgtcgaccccgtcgacgagccgatcctctacaccgtgaactccatcctctccatcctcgccgccgactacccggtggacaggtacgcctgctacctgtccgacgacggcgggacgctggtccactacgaggccatggtggaggtcgccaagttcgctgagctgtgggtgcccttctgccggaagcactgcgtcgagccgagggcgccggagagctacttcgcgatgaagacgcaggcgtacaggggcggcgtcgccggcgagctgatgagcgatcgccgccgcgtgcggcgagagtacgaggagttcaaggtcaggatcgactcgctgttcagcaccattcgcaagcgatctgacgcgtacaacagagcgaaggatggcaaagatgacggtgaaaacgcgacatggatggctgatgggacgcattggcccggcacatggtttgagccggcggagaatcaccggaaagggcaacacgctgggattgttcaggttttactgaaccatcccaccagtaagccacggtttggagtggcggcgagtgttgacaacccgttggacttcagcggcgtggacgtgcggctccccatgctggtgtacatctcgcgcgagaagcgccccgggtacaaccaccagaagaaggccggcgccatgaacgcgctgctccgcgtgtccgcgctgctgtcgaacgcgcccttcatcatcaacttcgactgcgaccactacgtcaacaactcgcaggcgttccgtgcgccgatgtgcttcatgctcgaccggcgcggcggcggcgacgacgtggcgttcgtccagttcccgcagcggttcgacgacgtcgacccgacggaccggtacgcgaaccacaaccgcgtcttcttcgacggcaccacgctctccctcaacggcctccagggcccctcctacctcggcaccggcaccatgttccgccgcgccgcgctctacggcctggagccgccgcggtggggggcggcggggagccagatcaaggccatggacaatgccaacaagttcggcgcctcgtcgacgctagtcagctcgatgctggacggcgccaaccaagaacggtcgatcacgccgcccgtggcgatcgacgggtcggtcgcccgtgacctcgccgccgtgacggcgtgcggctacgacctcgggacgtcgtgggggagagacgccgggtgggtgtacgacatcgcgacggaggacgtggcgaccgggttccgcatgcaccagcagggatggcgctccgtgtacacctccatggagcccgccgcgttccgcggcacggcgccgatcaacctcaccgagcgcctctaccagatcctaaggtggtcgggcggctcgctcgagatgttcttctcccacagcaacgcgctcctcgccggccgccgcctccacccgctgcagcgcatcgcctacctcaacatgtcgacctacccgatcgtcaccgtgttcatcttcttctacaacctcttcccggtgatgtggctcatctccgagcagtactacatccagcagccattcggcgagtacctcctctacctcgtcgccatcatcgccatgatccacgtgatcggcatgttcgaggtgaagtggtcgggcatcacggtgctggactggtgccgcaacgagcagttctacatgatcggctccacgggggtgtacccgacggcggtgctgtacatggcgctcaagctcttcaccgggaagggcatccacttcaggctcacgtcgaagcagacgacggccagctccggcgacaagttcgccgacctgtacaccgtgcggtgggtgcctctgctgatcccgaccatcgtcgtcctggccgtgaacgtcggcgccgtcggggtggcggtcggcaaggcagcggcgtgggggttgctcaccgagcaggggcggttcgcggtgctcgggatggtgttcaacgtgtggatcctggcgctcctctacccgttcgcgctggggatcatggggcagcgggggaagcggccggcggtgctgttcgtggcgacggtgatggccgtcgccgccgtggcgatcatgtacgccgccttcggtgcgccgtaccaagctgggttgtcaggtgtcgcggcttctctcggtaaagcggcgtcgctgaccgggccatctgggtag

SEQ ID NO: 100774 - DNA, 225 bp, Oryza sativa
  Clone ID: PAT_MRT4530_98458C.1
atataaagggaagactcgtcttcctgaatggccttttttcccctaaaaatgtacagcaaattttggagtttctattggtacactggctccatatgctagaaaatggggcataaatagacacaaaaaattagagaacattacaggtacaacacaatggggcataccttcacagggaaagaaattacatacatatgggtgcatacgattttctgcacaagtatgtgt

SEQ ID NO: 100775 - DNA, 543 bp, Oryza sativa
  Clone ID: PAT_MRT4530_98459C.1
gcacgaggcggcacgaggccgtgctgctcgcggattcgatccgtttctcacggagagagggacaaaagttgtgcaggggacgaagggggtcggtgagcaaggcagacacaagcacggagtaattttttcttagtatatacggatgaaaaattagcgcgtatacggacaaaaattaggtgacgattggaaaaatccaaatcttttaattagttaagattaagatatgaataagaggtagtgcgagacttggtgtcattaatctatttattcatttatttatcagtatagtgcttatcactaatggaaattgtcattggtataaactttgcctttttaatttaacatacgttttgaattgggttgtatacttgcgtttatgtagtatctctgaggctgtcctgttctgaaatataacccctagactctattaatgcaaatctttatttaacttctgtcaaatgcaaaggtagtgggttaaaaccactgaattggatgaggtatgctgatggctatacttttggagaacaataatgcagaaacccc

SEQ ID NO: 100776 - DNA, 384 bp, Oryza sativa
  Clone ID: PAT_MRT4530_9845C.1
atggaacatatcgagcgcgcgttaattacgctcgccgaccgaagcgccatcaccatatctccaggaaaaacgaaccggcttgtcccgatttttgtgaccgtcaggatgagagtctctaggcactcgtccctagccggagccagcgtgctagctcctggagatggcacgttggtcctggtcagatatatgccaggctttatcccaaccattataagcaagacgttgtatgaagaagggcgaacatgcagattgctaaactgacacgtggtggacaaaggtgaccggtctgtgactggtctgacactggttatgtcgccggaagacaaccgtgttcccacgttgcacctgcttccggcggagtggagatccaccagaacacaggag

SEQ ID NO: 100777 - DNA, 586 bp, Oryza sativa
  unsure (1)..(586): unsure at all n locations
  Clone ID: PAT_MRT4530_98460C.1
gggcgtggactggtactcnggtcactccaggattttcaaggcacagccagggggcagcaccaggacaaccagcagcagacgtgcaggtgctcttccaggtccagctggacacactacactcacagtctgaaccaagtttccagggttagtcaggtgcacagttaagcaagaaaagataactcttcccagaggcccacacagcacggcgtctcacaggacattcactaacgtcccagtcaaccagccacagtcccaggctcagggaaatcttaacccgattccctttcaggggcacagcagcagtgtcagcagctctctgccaggggttaccccagtccacttaggatcaggcttacaccatgtgcaagtgcacgttcacatggaacctttctcctcttcgcacttcaaagttctcatttgaatatttgctactaccaccaagatctgcaccgacgccgctccgcccagggctcgcgccactgggttttgcgcgccgcttttagagtatccctcgaggggcccaagcttacgcgtacccagcttttcttntacaaagtggtcnctatagtgagtcgtatataagtag

SEQ ID NO: 100778 - DNA, 611 bp, Oryza sativa
  unsure (1)..(611): unsure at all n locations
  Clone ID: PAT_MRT4530_98461C.1
gctatcttttcttcatcaaagctgagctctcatctcactcctcctccccaaatcacatccaatagcccaagatcaattcctgcatgtttgaccacaacaattcccatcatccaagctttccatccatcccaacatcttgcacatgcatggagagttgagagagatcgagaaggaataaaagagtgctggtttcagcctacagggctgcagcagcagcattttgttttcctccatttgatttggagattccggagagtaatgagccatatccagaggaggatagtgacttccctcagcagcaaggagaggaatccggttttgagttatgcttcttgtgtggtcagtgctctgccaagggtggtgagggcaatgagtgatctcttgcagcttggctcttgcccggttggtttgccctagtggggttgtggcaccaccgattttatcttttgcttatgaactctatttgagacttccgctgctatatttatgtgttgtatgttgggacctcggaccctattatgtgtcatgtacctcgctgcactttaaccctattatggtatttgctatgtttattaaaaaaaaaaaaaaaaaaaaaaaaaaannanaaaaaa

SEQ ID NO: 100779 - DNA, 528 bp, Oryza sativa
  Clone ID: PAT_MRT4530_98462C.1
ggaccccccatcaccttaagctcctcatccatccgaatctcccacatgcatggattcgtgagagagatcgagaagaaggaagaacaacaacttcagcctatgaggtcatcgattcaagatttggagcaagtggtagctgcaactcgtccctctccaattgcaggacaaaccctgagattcttcggtttactctcttgattcggagattccggagagtaacgagccatatcccaaggaggatagtgactaccctcagcagcaaggagaggattccggttatgagttatgtttcttgtgtggtcattgctctgccgagggcggcgaggcaatgagtgatctcttgcagcttggctcttgctcggttggtttgccctagtggggttgtggcaccaccggttttatcttttgcttatgaactctaattgagacttccgttgctatatttatgtgttgtatgttgggacctcggacccttttatgtgtcatgtacctcgctcactttaaccctaaaaaaaaaaaaaaaaaaaa

SEQ ID NO: 100780 - DNA, 1155 bp, Oryza sativa
  Clone ID: PAT_MRT4530_98463C.1
atggcgtgtggtataggcaggtggagcagagcggcggcggtaggagtgaaccgacaagcagcagcgggcgagctcgatctccgcccgggtgtcctcctctcactctcacgatttcgaccgaagcggcaacgggtgaagcaaaggggtggaggtcatgggcgatgcggtgcagcttcatcacgggccctcaccggcaccgaaaatgggaagggagagtggaggggaacaaaaactacaagctcaagtggatcaagattggcttcatcattggtgtcttccgccggttcacgctcgtttacaattttgctccttttattttttccggatcaaacagccatctgccaacagactaggagtaccaaggagtcgaagccggtgcggaggtgctcagcgccgccggcgccaccgaccacagccgcatcgtcaccgacagcgagtacgacacgtctcctggacgacgacagcagcagtagcgccggcgccggcaacagccacgtcgtgatagacatcgacgacgacgacggcggagtcggagacagcgacgacagcgcctgctcgtcgtcgtcggccgaaggcccctgctgcgcggtgtgcatggagccgctggagtgggtggccgtcggcccgtgcggccacgccggggtgtgctccgtctgcgcggcccgcatccggtcgtccaggagctggcagcccgacctccggtgctgcatctgcagggctcactgccccttcgtcgtcgtcaccagggcggcggcggcggctgcccccgccgccatgccggcggtcaacagctaccaagagtggcgggcgcgggggtactactggtactgcaccaccatgttggcctacttcgacgacgtggagcagtacagggcgacgagggcgatcgcgcgcggcgaggttaaggggggcgccgccgtggacgtggacgggaacgacggcggcggcggtggccgccgcacgctgagcagctgcgtagacgtgttcaggttcctgctaattgtggccatctttgcgctgttcggcgtgctgtttggctccgtcttttcgtcactaacagcgggaggaagagccacaccgggtgacaatctggccttcatttcagcatgcgccgcggtctcgatgctaggatcaattctcttttattttgcatga

SEQ ID NO: 100781 - DNA, 900 bp, Oryza sativa
  unsure (1)..(900): unsure at all n locations
  Clone ID: PAT_MRT4530_98464C.1
ttctcccttgtctgatcttttctttcttgcaagctgagctcccagctcacttcttcccatcaaatctcctccaaacactttggatccatccctgcatgtcacaccactaaacccccatcactctaagctcctcatccatccgaaaatctcccacatgcatggattcgtgagagagatcgagaagaaggaagaacaagcaacttgcagcctatgaggttacagcagcagggagaacttatttccattgatttatgagtttccctctccatccatggctcccctatggaggttctccattgtgttggtcatctctagtgcattccataggtcatcgattcaagattttggaggcaagtgggtagctgcaactcgtccctctccattgcaggacaaccctgagattcttcggtttactctcttgattcggagattccggagagtaacgagccatatcccaaggaggatagtgactaccctcagcagcaaggagaggattctggttatgagttatgtttcttgtgtggtcattgctctgccgagggcggcgagggcaatgagtgatctcttgcagcttggctcttgctcggttggtttgccctagtggagttgtggcaccaccggttttatcttttgcttatgaactctaattgagacttccgctgctatatttatgtgttgtatgttgggacctcggacccttttatgtgtcatgtacctcgctgcactttaaccctattatggtacttgctatgtttattaattgcttgcgatgaaagtgtgaggctngtcgcattcctggggactagctaagcatgagtaacgggttttgatcgcttgagataattggggatngcaaaaaaaaaaaaaaaaaaaaaaaaaaaaaaaaaaaaaaaaaaaaaa

SEQ ID NO: 100782 - DNA, 1464 bp, Oryza sativa
  Clone ID: PAT_MRT4530_98465C.1
atgacgtcatcctcgcctcgcgacgagaacctgttgccgctgcctgctgcttgcacaggctcacggccggcgagagtcagccacggcgtccacggctgccagcatcgtcgtcccggctacgtctcgccgccttatcacagacaggtgctaggcttactcgtgaactgggaactaaataatcagatgagagatcacgatgacgatgtgcccgtggccaagcggcggcggcggctgtgtgtccaagtccaacccgccggcgccggcgccgcggcggctggcatcccggaagacattgtggaggaaatcctcctccgcctccctgtcaagtccgtcctgcggttcaggtccgtgtgcaagtcgtggcgcgccatggtcgccgacccgtgcttcgcgcgcctccagctgcgccattccacggcggcggagcggcgccgccatccgccgtccatgctcgtcctgccgtggtggggctggaggccgcagcggcaacagatgcaggggaccatcggcttctttcgctacccggggcatggcgccgccgcggagctcgcgcacgtgagggcatggtggtccccgacctcgcacgccgccgccgccgactgggacgacggcgccgactgggagctgcccctgcaatgcaacgggctcgtgctggtgttctccatggagaagagcctctcctcctctctgatgttcgtctgcaacccggcgaccaagaagctcgccgtggtgccgcccggtacgccggacgcgcacgggaaccaaagcgtgggcttcggcgccgacaaatctacgggcaagatcgacatgaaggtggttcgctgcttcgcccgctcagacgagagcgtcgggtgcgaggtcttctccctcggatcgccggcgtggaggccggtcgccgactcgccatgccccgtcagggccggcgccgcgtcgccgtgcatcctcggcgccatctactggatcaccaccgcagcgccaaccccagggatgctacgcttcgacgtgcgccgcgaggtgttcgacgatttcccgagcccgccgtgcgtgcatcacgacggcacttcgccggcgaccgcgaccctgacggagctgtccggcaacaagctgtgctacgcgcacgtcgtcgccggccataccgttgagctctggacgatggcggctgcttccgccgccgacgacgggccgcggtggtcgcggcattgcgccgtcgagctatggcgccccactcagctcgtcgtcccgtttgccgacgatcgccatggcggcatcttcttcaacttggatctcgccgtgattgacaggcatgacacccaacgccaagttgttgaacgtgtggtcgacatgaacaaggagatgacctacttccattcaagggacaagcagtactacataaatcgtggatttaggtggatgcaccatgtcagtcactgcagggagagcctagtatccgtaaaagcgaattaa

SEQ ID NO: 100783 - DNA, 1628 bp, Oryza sativa
  Clone ID: PAT_MRT4530_98466C.1
ttatgctggcagcttccaacaggaacgaagagactccctcagagctctcgccctcatacatgagatgacagcatgaaactcatcctctacttccataccacaaatacgataggtagcatcaacttccaggtttcgggagcatctatttcgtatagtagcaagacccttgttagctagcctccaagcgaaaatcttgatcttatggggcaccggtgttttcgagatggagccccaaatactgcgctcaccatttgcagccgagctggaagaaccaagattagaatcaagcctagcatgcagcaccaacttgtaagcactttgaatagagaagagacctgacttttcataatgccacgcaagaaaatcctgtctgatattgaggcagtttaattttgagaatttttttgtcccatctccaatacgccaaatcagacctttcttcagcaattgaagaccatattccaggctcttccaagtcaccgatgagtcacccaggaaaacagcatctattaactcactgttagggaaatatttagccttcaacaacctggcgcataagctatccggaaactgaatcaggcgccaagcttgcctggctaggagagcttggttgaaaagcctcatatcccgaaaacccaagcctcccatgaatttaggcagaattagcttgggtgcctttttagcccaaaacccacccttgggcgttctccccacctcaggacataaggtgggcagaggaaaaccccttcttcttcctcccctattgttctttcttttcctcatcaagctgaggtcccagctcacttctcctccccaaatcccatctaagaacccaaactcaagctctgcatgtttgaccacaacaattcccatcatccaagctttccatccatcccaacatcttgcacatgcatggagagttgagagagatcgaaataggagaagagagtggtggtttcagcctgcatggttgcagcagcaacatgactttgtttcccaccatttggttgtccactccattgctgcagctagaaggtggctgcaactcaccccgagttcatctcttttgatttcggttgaagcagccctaggcaacgtctcttgccgtcagcccaagaccttgctccatctcttgccatcagcccaaggccttagcctcgcacaaccctacgtccaggttgctgccatgtgagcgaagtctggtggaatttggagaaaagggggagcgaaaatagaaatcgatttcttgggatagctattgagctgaaagagatttggggattccggagagtaacgagccatatcccgaggaggatagtgactaccctcagcagcaaggagaggattccggttatgagttatgcttcttgtgtggtcattgctctgccgagggcgacgagggccaatgagtgatctcttgcagcttggctcttgctcggttggtttgccctagtggagttgtggcaccaccggttttattttttgcttatgaactctatttgagacttccgctgctatatttatgtgttgtatgttgagacctcggaccctattatgtgtcatgtacctcgctgcactttaaccctattatggtacttgctatgttaaaataaaaaaaaaaaaaaaaa

SEQ ID NO: 100784 - DNA, 387 bp, Oryza sativa
  Clone ID: PAT_MRT4530_98467C.1
atgggccagtccaacaatcatggagacaaaatagttgagggagcaaaaatagacaatgagcggcgcggacgacggaggacacggcgatggtcctctcctggcccaggggccctcccccctctctcctactccagcgcggccgactcaggtggtcactactggaggctggcacacgcgtggcgaggtggtggcggcggtagtggtggtggtggtggtggaggtggaagcttgtcaggcccctttctctcgggggccctccctcctctccggcaccctccaccttctcctcctgaagatccggtgatggcagtggtggagaagaacgatggggataaggtggcggccgacacggaggctggcacggcgaggtggcaatggcggctgtga

SEQ ID NO: 100785 - DNA, 657 bp, Oryza sativa
  Clone ID: PAT_MRT4530_98468C.1
ccggccgggctcccctttcatcttcactgcttgttctttcttttcttcctcaagctgagctctcatctcacttctcctccccaaatcccatccaatagcccaagatcaatccctgcatgttagatcacaacaatccccatcatccaagctttccatccatccgaacatcttgcacatgcatggagagttgagagagatcgaaataggagaagagagtggtggtttcagcctgcatggttgcagcagcaacatgactttgtttccctccatttggtcatccatctccattattgcagctaggatgtggctgcagctcatttcggttgaagcagccttagattcggagattccggagagtaacgagccatatcccgaggaggatagtgactaccctcagcagcaaggagaggattccggttatgagttatgcttcttgtgtggtcattgctctaccgagggcggcgagggcaatgagtgatctcttgcagcttggctcttgcccgtttggtttgccctagtggggttgaggcaccactgattttatcttttgcttatgaactatatttgagacttccactgctatatttatgtgttgtatgttgggacctcggaccctattatgtgtcatgtatctcgctgctctttgaccctattatg

SEQ ID NO: 100786 - DNA, 353 bp, Oryza sativa
  Clone ID: PAT_MRT4530_98469C.1
aaaaaaaaaggcgaatttgcggggtttaatcggaaggggcgaaaaaatttccgggggggcccaaccccattcccggggccttttttggggtggggccccaaattcccgggccaaacccaattttttaacccccccccaaaaaattttaaaccccttccggggggtcaacccccgttttggggctaaccgggaaaaggaatttgttcccaagggaccttgcccctttttttttgggaagcttgggggggttaaaacccggggaacccagggggaaacaacccccgggcggggccccaaaggggccccaaggggaaccacccaggggaccctttaaaatgggaaaaaagggggga

SEQ ID NO: 100787 - DNA, 156 bp, Oryza sativa
  unsure (1)..(156): unsure at all n locations
  Clone ID: PAT_MRT4530_9846C.1
ggatncagagnngattattnntctcagnactgggcatcantgtcaatttatacccacatcannggtagaatcatacanntccatgtctgggttctnntcttttttcttgcagaaagaagcaaccataagaggtattgtcgcgtgtgctaggctggc

SEQ ID NO: 100788 - DNA, 492 bp, Oryza sativa
  Clone ID: PAT_MRT4530_98470C.1
accagaggaggatgtcctgaaactgaatattgatggatcttttagaccaaatgagctgacgggggctgggattatgttatcagagatgcggacgcgcatgtgatccaggcgggtgccggaaactcatcacggttgcaggatgccttccacgctgaagttttggccgcggtgaaggcagtagaagcgatatctcacgggggtatggcatatatccatctagagtctgatttactgatgctggttcaagccctgaaggaagggaatctacaatatgcagcgatgggggttcttgtcctagaagcgaagaagattataacctcggcttttatttctttttgagttagctaatgtcctcgtgaatgtaataagttggcagatgctatagcatcgattggatgtaacagcccccaaaacactgtacaattgccatatcaccaagttccatgtgccttcttctctattttctccacagcgacgctcgtgttcctcggc

SEQ ID NO: 100789 - DNA, 267 bp, Oryza sativa
  Clone ID: PAT_MRT4530_98471C.1
ggatacaattatgggaacatgcggtctgaaatgactcaactttacaccaagatttcagaatgagagatggacgtcagtgtacactctgttgtgattggcgctacctaaccactggatcactaatggcgctgatacagaatggtctgtggcgtgctgcttgaacggaccatgatggaggtcttgtctgcggtgcgttgtatcagggaggtcctagtataggtcgtcgtgcgcatgcatgaagcgctgtcgaagaaaaagaaggagatc

SEQ ID NO: 100790 - DNA, 816 bp, Oryza sativa
  unsure (1)..(816): unsure at all n locations
  Clone ID: PAT_MRT4530_98472C.1
cttgtcccctcctccacaaaagcagtccactagaataatcgatcccccaccctcctgcaatctccccatcactcgattcgcgctctactctagcttttctctcttctttcttgggccggctatctatagcttgctcgctgtcgatcatggcgagccgctctggtgatcggaggctggccgtggttgcgttcgcggcggcggtgttgctgtcggcggcggaggggctcggggtgaactggggcacgatggcgtcgcacccgctgccgccgagggcggtggtgcggatgctgcaggacaatgggatcagcaaggtgaagctgttcgacgccgacgccgggacgatggaggcgctcgccggcagcggcgtcgaggtgatggtggccatcccaaacaacctgctcgacctgctgacggactacgacgcggccagggactgggtgcacgagaacgtcagccgttacagcttcgacggcggcgtcaatatcaaatatgttgccgtcgggaacgagccattcctgtcgtctttgaatggcacgttcctgaacgtgaccttccctgctctgcagaacatccagcgagccctctacgacgccggccacggcgacaccatcaaggccaccgtgccgctgaacgccgacgtgtacaactcgccggagaacatgcaggtgccgtcggcggggaggttccggccggacatcgncgggctgatgacggagatcgtgcagttccctgaccagagcggcgcgcccttcaccgtcaacatctaccccttcctgagcctgtacggcaacgacaacttcccgctcgactacgcct

SEQ ID NO: 100791 - DNA, 219 bp, Oryza sativa
  Clone ID: PAT_MRT4530_98473C.1
atggaagaaagaggacttcctagcagagaactggcacctcctgatactgtattgaaagggcgaggaggacccatcgtggttgatgagctaccagaacctgcatttcccatcattgtctcactctgcaagttgatccttggcaattcaccagagatgacattagtactaattctgcgagacgaggatggcctgaacagttccatctgggaatcatcatga

SEQ ID NO: 100792 - DNA, 2759 bp, Oryza sativa
  Clone ID: PAT_MRT4530_98474C.1
gctcaggattaaacagggatgatgctggagatataactgtaacaggagttccacaacaagtgcaggttgggcaaaacatggtaaatgctctttctgctaagccctaccatcctgtgttttctgtctcacatggtacaagtgccagttcatcttcacaacacccatatatggcgagacagttgctagagcaccctgaatacaatccaaggatgcatcgcacccatccttcattgcaaccaacaatcgaagctgcatccacctcaatgacatcccatgttaaagagccctgttaccaagaaaatgttggggatagcaacccaggtatgtccctgcttcgcagcacagctgtttcctccagggatgtagagaacaaatctcccaacctgggtgatagggtgcatgctgatgtttcggaaatatactccactttggatcaccaaacttcagctaacagcatgcagattcagtatgctcctcaggttgtaaggcaaccatcacaacagtccctgcattctgatgttacagaaacatattcagcttttggtcatcagtctgcagccagcaatatacagaggcagtttgctcctcgggttacaagacaagcatcacacaggtccctatatgaaagcagcaatagcagtctatggactggacctcatgatgattcccagatggaactgttcaggccatcctcgtctcgcagaattagtactaatgtcatctctggtgaattgccaaggatcaacttgcagagtgagacaatgatgggaaatgctgatttcaaccagcaaaatcttcggagacaaatttctctccgtgaaaacactgaatctcactcttttggcacatataacgagttgccaagaacatcttcctttttgcgccgtcaaagctctgaatcctcacaactgaatagtgcttctgtcaaatgttcaccaggttctggtagctcatcaaccacgatgggtcctcctcgccctttcaatacagtatcaggaggtgccagttctctgctaggaagtcctctttcttccatgtctggaggttcaagttctggtggtaatcctgatcatcagggcactgttttatcttcaatataccaaccagatggatacaatattaattccaccttgcctctaagaatgagaacacatgcaagggaggcctatgccacatctgttctacctcaagccacaaggcgaagccaccaagtgaactttgattctgcagaacggagaccccaatatgttcaacaaaggggtctggatgacactataaattcaaacatgttgagtgctcggcagcagtttcagaggcaggttgaaaggcagcttcagaggcaacttgaaaggcaacttcagaggcaacttgaaaggcaacttcagaggcaggttcaaaggcagcttcagaggcatcatgagagagcagctgcatctgaagcacatccattttatggcaatgatgagacttctgtcaggatgaacccaactgaggaatttcttgatatagtaaaggatcatgaagcattcttcctttcattttatcatccttctcgtattccagcccgtgtcatgaatacagtagatcaatgctatggtgttgatatggaaagggagatgccacatcaagagagtcatccaacacctggctgtggtactgagctttctcataagaatgacacttcaggttttgaaagatctgatgtggatgtcgcacacatacatgattccaaaaggctaaataatgaggaactcaatgcccttctattacataggaagttcagcagcttaaacaaagggaattaccggctttttcacatagaaggccatgtgcttcaatgcagcattgatcagtgtgggagccgctttatacagcagaagcttccaacagcgacacctgatgagaaactcatggtctttaaagaaatcatgcctcattttcttgaaatggtgactgatgtatttggaaattatgtgctgcaaaaggctgtagagcttagtgatctagatcagaagatacagattgccaaggagctcaatagtaatatcatgaaatgtatacatgacccaaatgcaaaccatgttgtccagaaatgtatagagcatgtgccaccacgattcatacagttctttgtggagagcatgtatgggcgtgttgtggagttatcagtccatccatacggatgccgtgtcatccagagaattctggagtactttgattcatcgatccaggagatctttctagaagagattatagaggaggtttactatatggcgaaagatcaatacgctaactatgttgtgcagaacatattgcagcacgggaaagcccttgtgcgatctgcaattataaagaaatttattgggagagttgtggccatgagcaagcaaaaattcgcctctaatgtcattgaaaagtgcttaatatttggtagctatgatgaaaaacagaagatcattaatgaggtcatcggcacaacggacctcgtcagaagtggtgaaaccgaggctcttgtggttatggtgaacgaccaatatgctaactacgttgtacagaaggtgattgaaacctgcgacgagtggcagcggaagctaatactcaggcgcttgagggcgcaccacagcctgcttcacgactgcacctatgcaaagcacgtcgtggcacgactggataggctcatcgatatcggggagcgcaaaatggcgaatcccaggcgccccaggcgacatgggaaagatcctgtgccaccactgacctag

SEQ ID NO: 100793 - DNA, 1138 bp, Oryza sativa
  Clone ID: PAT_MRT4530_98475C.1
gccgccccatcgatgtgggacaatctcgccggcggcggcggcggctccgccgggctaaataatgaggaactcaatgcccttctattacataggaagttcagcagcttaaacaaagggaattaccggctttttcacatagaaggccatgtgcttcaatgcagcattgatcagtgtgggagccgctttatacagcagaagcttccaacagcgacacctgatgagaaactcatggtctttaaagaaatcatgcctcattttcttgaaatggtgactgatgtatttggaaattatgtgctgcaaaagatgatcgagcatggagccccatttcaaagaagggaaattacagcttgcctttttggaagtgtttcgagcttaagctgtcaactatacgggtgtcgagtagtccagagggctgtagagcttagtgatctagatcagaagatacagattgccaaggagctcaatagtaatatcatgaaatgtatacatgacccaaatgcaaaccatgttgtccagaaatgtatagagcatgtgccaccacgattcatacagttctttgtggagagcatgtatgggcgtgttgtggagttatcagtccatccatacggatgccgtgtcatccagagaattctggagtactttgattcatcgatccaggagatctttctagaagagattatagaggaggtttactatatggcgaaagatcaatacgctaactatgttgtgcagaacatattgcagcacgggaaagcccttgtgcgatctgcaattataaagaaatttattgggagagttgtggccatgagcaagcaaaaattcgcctctaatgtcattgaaaagtgcttaatatttggtagctatgatgaaaaacagaagatcattaatgaggtcatcggcacaacggacctcgtcagaagtgtgcaggttatggtgaacgaccaatatgctaactacgttgtacagaaggtgattgaaacctgcgacgagtggcagcggaagctaatactcaggcgcttgagggcgcaccacagcctgcttcacgactgcacctatgcaaagcacgtcgtggcacgactggataggctcatcgatatcgggggtacgcaatctgtctccctgatcacttgaacagtca

SEQ ID NO: 100794 - DNA, 412 bp, Oryza sativa
  Clone ID: PAT_MRT4530_98476C.1
cttgtctacctgttgtttttttctattcacatatagtaaaaggcctggttaatttgtctccagataagacatacccataactacttagacacttagatatagccaagcaggaaatgcccaaggaggggactcaagataccacatacccataattagctagatcggggtaagaagtagacacccaaggacggatgcacatacttaacatgggggacataaatacagcagaagaatccttccattgggcgtgcaatcccttaagcaagatgacattaagcaatcttgaatccagcaagcggcctgctcaagtgagccaccattcctctactttccgggggcatctggagctcccccttcattttggtgagccccccaactattcgagcccaaaaacaatgcattcttttgcatt

SEQ ID NO: 100795 - DNA, 566 bp, Oryza sativa
  Clone ID: PAT_MRT4530_98477C.1
caaatgtatggcccaaaggaggatcgcaagttggcaattgtgctggttgggttgccagctcgtggtaagacctttacagcggctaagcttacaaggtaccttcgatggttaggtcatgaaacaaaacacttcaatgttggaaagtaccgccgactcaagcatggcattaatcagactgctgatttcttccgtggagacaacaaagaaggtgtggaggcacgcaatgaggtggcggctctagcaatggaggatatgctatcttggatgcaggaaggtggtcaggtaggtatctttgatgccacaaacagcacaagaaaccggagaaatatgctgatgaaaatggcggaaggcaagtgtaagatcatctttttggaaacaatatgtaatgaccaaaatgttctcgagagaaatatgcgcttgaaagttcaacgaagtcctgattatgcggaacagacagattttgaagctggtgttcgagatttcaaagagagattggcctattatgaaaaggtatacgaaccagtggaagaaggctcatatgttaagatgattgatatggtcagtgg

SEQ ID NO: 100796 - DNA, 3058 bp, Oryza sativa
  Clone ID: PAT_MRT4530_98478C.1
atggctggaccgaccatagagggcggcggcgcgcagtcaccggcgacggcgggcggcacagggagcgacggcgcgcagcgcgggaagcggcgagaggaaacggaggcagtgagggagagggaggtggcggagctcaccgaggggcacggcgacggcgaggagcagccggcggagggaggcggcggcgctccacaggtcgacaatgaggaggggctcccggcggcggaaggcggcgaccgggcggcggatggggaaaaacgggacgcggcgaagccggcgatgcggccgatgcgtcgcagcggcagccggggtgaaggcgaacggcgaccggaggcggaaaaaggcggccggtagggtggtatggcggggaggtggttctggtggtggaggggaaaaagggatgggcggccgagcttgcccttgcggtagtgaagctaatggcggccgcggggtggctgagagcagtgaggtgcggccggaggcgacgaccggagtggcggaggatggtaacggctcgggccccggagggggagatcgtggccgtggcgggcggcaacggccggcggagggagctccggcgacgtgggcgagtggggctcgaacggcgccgatttttgggggggaaatgggggagaaagtggaggaaggggaggatgtggggtggaccacgtctgcacgtgcgcgggagcgtggaggcgcgcgggggaagcggcgtcgtggggtggctcaggcggccatggcggttggggttggccggcgagaggaccttcaagatctagaaagtacagccatcctgcttgggtttgatgatctgcaagagaaatattggagacgaggtatgaattcgctgattaggaagagcaaggatgaggaggatgaggagattattatgttctggttgcctgccctatatcttttaactagtaatggagggatagagaaaagagtaaggcatacttcaagtcagtacagtgaagaaaaactcagaaatattttagagggacatgaaaagaattgccttgttgcattccgcatggagcctaacatatttagagcaatagtgacatatcttcgaacagaacatctcctacgtgacacgagaggtattacggtagaggagaaacttggacattttctttacatgatatctcacaatgcgagctatgaagatctacaacatgaattccatcatagtggagaaacgattcaccggcatattaaggcggttttcaaggtaatcccatctttgacctatagatttatcaagcaaactactagagttgaaactcactggaagattagcacagatcaactgttctttccttacttccaaaattgcttgggggctatcgacggaacacatgttcctatcaccatttctcaagacctgcaggccccatataggaatagaaagggtaccctaagtcaaaatgtgatgttggtttgtgattttgatctgaattttttgtttataccatctggatgggagggatctgcaactgatgctagggttcttaggtcagccatgcttaaaggattcaatgtgcctcaaggcaaatattatctcgttgatggtggatatgctaacacgccatccttccttgcaccgtaccgtggagttcgataccatctgaaggaatttgggcgtggacagcaacgaccaagaaattataaagagttgttcaatcataggcatgccatattgcggaatcacatagagagagcaattggtgttcttaagaaacgcttccctattttaaaagttggaacacatcatcgtattaagaaccaagtgaagatcccagttgcaacagtggtgttccacaatcttatacggatgcttaatggggatgagggttggttgaatcaccaaggaagcaacatatctccagaacagtttattgatgtccctgaaggtgacgacgaatatagtaatgatgtgatgtcccttaacagtcaagtagatgatggaaacgcgcaacaatgtttggaagagggccattttcatgactgcaaaagactctacacgactcaagtggttaagtgcaaaagactctacacgactctacacaactgtgtaaatctggaaactaagttctgtttgggatggaagatttctatttctactccgagtgttacttctctgaccctggataatcctatggatggcatagttgtgctaaaggacatgaaatcactagtgagagcatcagttagacttaatagacaatggccgcacgatgattttgatgctagggatttacggaattatctctggaccctatctggcattgaaaatttgaagttctattgtggcaggagaaagctgacaatccaaaacagtctgcagtggtgtccaaaattcttcaatcttgtcagcctgactctcggtcactggtgtctgcatggaaacttctatacactaattgtcttccttcagaactcaccaagactggagaagctaactctgatactcggaaatgaccattggaaaacgtttgaagcaagcattggtgacaagcttgatgaaagatcatttacatgtgagcatcttatgagtgttaaagtcagatgctcggaggatgatcccatgctatggcaaaaaaggtttggtcgcttgccaaagttatggtggagggggagaaagctagatgacggtgtcgccgagctcaccaaatctggcctagggctctccccgctggccgctgccatctttccttcttctgatttgcgtctctccccggaccgcagacaccaactcgtcaagcttagggtggccatgcactctttcaacgcgccgctcagagccatgcctcacctcgccctgacaaatcctaatgagaaacgcgggacccagttaggctccacggtcttcacttggtgtgggtctaggctaagaaaacctgatgggtgtacacccgttgccatctctagttggacgcagatcctctgcctttggccattaaagtcacaccgtgactttacttcatctctaccatccgacttaatccaatggacaggattacttggcccatcaactggtctggcccattgttga

SEQ ID NO: 100797 - DNA, 784 bp, Oryza sativa
  Clone ID: PAT_MRT4530_98479C.1
atctggttgatcgcccataaccgcgggcacggctattcgaatagttttactctggccagaggtgtacaactgtacccacaagacacgattccacacatgtcgccatgccccgaagtatcaccatgatactgcaaagggggaaatcgtgacaagaccctccacataaccctcccctaaccatccacaccacgctaaggtttcacccccacccctcaaaaggcagtgggcggtcccctcttgcgccgcggtgaatccggcagctggacaaccggacaccccggccgacccaactccatcacgcccaccctcgccaccggtgcctaggaaagggtcgagctatacttcagatcaagcagttacccactcccgcttgtgggggggcggcgccggcaagcgggccccgcatgtcagcagcacaaggggagagagatgggggctcgggcatgtgggccccaccggcagtggctcaaaaagggaaagggaagggagactggcggctcgacacggctcaagtcggccagccggccatggtgcggcagcggcggcagcgcgcgcggtcaccggcggtgaccgacgccgcgggagacggcggcggccggcgcgaaggcggcggcggcggccaaagacgatggcgcacgcgcggagggcggcggacctcatgggagagaggaaaggaaggaggagaggggattcctcaccggcgagcacggcggccgacgcgaaggaagaaggcggcggcgacgaccggcgagcggaggcgcggacggccggcagcgacacctag

SEQ ID NO: 100798 - DNA, 465 bp, Oryza sativa
  Clone ID: PAT_MRT4530_9847C.1
atggcatcatgcgccggcctgcctggggtggcctacgaaatcatgcgcgctaacggcctaactcgtgcatggcaaagtgctaaaaaaggctggggattctcgacatgtaatcccaccgagtgggcatcagactcaatggcaagcaagtggcagcttccatcagcacaggcctacgtgcaggctcatgagacagtccaatttgcagctctgagctcagaccaactccaacccacagtgcaaatgcagaggatggggaaacaggcatgtctggccaacaagtgcaaatcaagacagcaccatcagggaattagattgcgactcatcaccaaagtcattcatggggaggatgcatgcaatcttgccctagctaagcaggagcatgacggaaaaggtaaaagagaacccatagcaggattaacatttgtccgtgtaacaaatatgaccaagcctacaggcaacagctag

SEQ ID NO: 100799 - DNA, 536 bp, Oryza sativa
  Clone ID: PAT_MRT4530_98480C.1
cttgcatgccataaatgttatgcatctagaaaagaatgtgtttgacaacatagttggaacattgttggacatgccgaagaagactaaagatgttctgcaatcaaggatggtcctagtcgagatgggaattagggaagagttacaccctaaagaaggagagaagaatggcaaagtatatcttccaccggcctgtttcacactaactcctgcggtaaagaagtcattttgcaagtcacaccgtgatgtcagagtgcccataggtttctcatcaaacatcagtggactagtttccatgaaagatttatcagtatctggtgataattcacgcgacagtcatgtcgtgctcactgtgtttctggcaattgcaataaagaccatacatccggagcatttataggtggctatctccagattgtgctactttttaaacgcagtgtctcagaaggtcattagtctcaaagagttaggaagtcgccgtgcattggcgcaatatacaaagagtcgggttggtataaataacacggaataacatcagt

SEQ ID NO: 100800 - DNA, 1278 bp, Oryza sativa
  Clone ID: PAT_MRT4530_98481C.1
atgtcatcctcccatctccattcccttcttcttcctcctctttctcttcccctttcttttctcccgcgtggtcgcatcgatccagcggcgacagcgacggctctagcacgcgaggcggatggcgacagcggcggaggcagcggcggcgacgactacccgcgcggtggtggtgacagctccagcggcgggcggcggcggcagcggcgcccgcgaggcgcgaggcggctccccgcgcgcgcgaggagcgaggcggcggcggcgacggctccccgcgcgcgcgaggagcgaggcggcggcggcggcggcttcagcggcgggcggcagcggcagcggcgcccgcgaggcgcgaggcggctccccgcgcgcgcgaggagcgaggcggttgcggcggtggctccccgtgcgcgcagcggcaatggcaacaacggctcgggcgcgaggcgcgaggcggcggcggcggtggctcccctcactcgagcagtagcgacggctcatgcgcaaggtgcaaggcggcggcggcggtggctccccgcgcgcgtagcagcgatggcggcgatacgaggcggcggcggcggctcccggcgcgcgcagcggcgacggctcgtgcgcgagacggcggtggcggtggctccccgcgcgcgcagaggcgtgacggcagagagaggatggacggggatgggagtggcggcccacctcggcttgtcggcaattgcaatccgttctccggcgtccttccccttccccacggcagccggagcccgcggccgcgtcggctcggcgcagccggtgggccccaagctcctctcctcgccacttccgccggcggccacgcccgcggtgcctcgccggctcctcttcccggtggctgccggcatttgggacttcctttccggtggcggagcaggcggcgcggctgccgcgtcgctcgccgtccggggaggcatgcagctcttcaggcagggagatgtagctggctcagtagcagagttcgatcgggcaattgagctcgatcagcggcagaagaaatatctctggcaaagggggctttcactctactacctggacaggttcgaagaaggtgcagaacagttcaggctggatgttgctgccaacccgaatgacactgaggagtcgatatggtgctttctctgtgaagctcagctgtatggggtagacgaagcaaggaagcgcttcctggaggttggtttagactcaaggtctgtaatgcgagaagcttatgcactgttcaaagatggtggggaccctgaaaaggttgtt

SEQ ID NO: 100801 - DNA, 5976 bp, Oryza sativa
  Clone ID: PAT_MRT4530_98482C.1
atgggttccgtctccggcatcgacgacctcgtcttcccacccggacagacgtttcggttcggcagcctcgacttcatcaccaacaacttcggcaagatttctctcctcgactcggaatcagaccagtcgggagagaaccggatttcggtcccgtttggattcccgaacgcggctgaaagctacttcaagaccatctcaaccgagtcggcttcaaaccactcggccgagatcgcatcttctccaacgacaccagatcaagatgatggggcttacccaccagtcctgatgaagctccccgacgatttagcggccgtcttcaccacgacagcgtcttcatcccgtaggcctaggcggaagtcggcttcaacaccgatttcgcctagcttcagggaagtcggcgtcatcctccaaccactcggcacggtttcgacggatcagctagacgactacaacagctctcccaccgtcgactcacgtcctactgacatcgtggagtacgacgaatttagttctcgctacaacgacctcaacgacttcgacgacttcgacggaagcctggatgacaactacactcctctctactttggcgttttcatggccaataatgagacggaggagcaacgccaagcccgggagaccgaagaacgtcgccgactggaggaggagcatcaagcacaagaacaagaacggctacggcgtgagcagcaggaccgtgagcggactgcgaaggaggctgaggatcgacgtcagcgagctttggaagcagggcgccgagcgcgtgatctcatcggtcagcaagatgtcgaggggacaccggttttccgcacccctcaacagaatgcggttgccgcgatcacccttctcgacaccctcctcaaccaaaacgagctcaatcgatccgaccacgtcgtcaacatcttgaaccagacgaagaccatgattgcggcctcggtcccagttaactccgaaagcgtccacacgccgactggcagccgagttccccacttccgatctcacgactaccgtcatccaagcctcagcatcaccggcgcgggatccaaccgcaggagcaggggtcacgacgagcggtctgttcactcacctcccgaccttcatagggagcgccgagtggatcggcctcgctcaccacctcgtcgccaccccatcgatcttcgcgacacaatcatacagcgccgagcagctcgaggctaccatcactcgccggatcgccgcgacgacgaccttgacggagtagcagccttcaccgacgacctgcgtcgagtggattggccagccggcttcaaaccgactggaatagagaagtacgacggtaccactaaccctgaatcgtggcttaccgtctacggtctcgcaatccgcgcagcaggaggagacaacaaggccatggcgaactatttaccggtggctttagcggattccgcccgatcttggctccatggattgccccgtggtacaattggatcttgggccgaactacgcgaccacttcatcgccaacttccaaggcaccttcgagcgtcccggcacacaatatgatctctacaacgttattcagaagtctggagaatcccttcgagattacatccggcgattttctgaacaacgtaacaagatctccgacatcaccgacgacgtcatcatcgccgcgttcaccaaagggattcgccacgaagaactagtcggcaagtttgggcgtaagcctcccaggacagtcaagcttatgtttgaaaaagccaacgagtacgccaaagctgaagacgccgtcaccgcatcaaagcagtcgggtccgagttggaagcaaaacaagggtacgccggctacgggaggaggtggaagtaacaatcataaggaccgcaagcgtaagcctgcggaacttgttgcaaccgccagtcactcttctcgacagcgttcgcgcgtcaacacgttcgacaagatcatgaactcccaatgcccgcaccatcctaactccaaccacgtggccaaagattgtttcatctacaagcaattcgcggatcaatacaccaagactgcacggaagaatcctggcgaagaacaaagcacgtcaaggaagaaggacgacggtgacaccccggcaggttttcaagatcaccgcaaggagctcaaccatatctttggcggccccctggcttatgagtccaaaaggaagcagaagttgactgaacgggagatcaatgctgttcagcccgacacgccccagtatcttcgatggtcagagattgcaatcaagtttgaccgctcggatcatcctgaccgagtggtccacccggggcggtaccccctggtactagacccagtggtccgtaatgtcaagcttcgcagaaccctcattgatggtggcagtgcactcaatatcctcttcgccaagaccttggatgatatgcagattcctcgctccgagctaaaaccaagcaatgcgccttttcacggagtaattccaggattatccgcaactccactcggccagatcacactcccggtcacctttggcactcgggaaaactttcgcacagagaatatcagctttgaagtcgccgatttcgagacagcttaccatgccatactcggacgcccggcgttagccaagttcatggccgtcccgcactacacttacatgatgatgaagatgcctggtccccgaggagtgctatccctacggagcgacatcaagcaagccgtcacatgcgacaaggagagttgcgacatggcccaaacccgcgagatggcgtctgcccgagaggatatccgactggctgcagccacggcgagcgaaggagaagtgcccgctaccaagatttcaaagagtggagaaagcgaagccaagactaagaagattcccctagatccctccgatcctactaaaactgctaataataaagatatctttgcgtggaaaccttcggatatgcccggtattcctagagaggtgattgagcactccttacatgtcaaagaagatgccaagcctatcaaacaacgactccgccgattcgcacaagacaggaaggacgcaatcaaggaggaattaaccaagctgttagcagcaggcttcatcaaagaagttcttcatcccgactggctggcaaacccggttctagttcggaagaaaacagggcaatggcgcatgtgtgtcgattataccgacctcaacaagtcttgtcccaaagatccctttgggttgcctcgcattgaccagatccgactaaaggaatccgactgcttgaagacttcattcatcacgccttttggggcctactgctacatcaccatgccgttcggagtaaaaaacgcaggagcaacttatcaacgtatgatccaaagatgcttctcaacgcagatcggccgcaacgttgaagcctatgtggatgatgtagtcatcaagaccaagcaaaaggatgatttgatctcggatctagaagaaacctttgcgagcatccgtgctttcaggatgaaattgaaccctgaaaagtgcaccttcggagtaccgtcagggaagctgcttggctttatggtgtctcataggggcatccaagccaacccggagaaagttactgctatcctcaacatgaaaccgccaagtacccagaaagatgttcagaagctgactggatgcatggcggcgctcagccgatttgtttcaagacttggcgagcgggggatgcccttcttcaagctactgaagaaaacagataacttccagtggggacccgaagcacagaaggccttcgaagatttcaagaaactcctcaccgagccaccagtcttagcctcaccacacccgcaggagccgttgttgctgtatgtatcagccacctcccaggttgtgagcacagtcttggtcgttgagcgcgaggaagaaggtcatgtccaaaaagtccagcgaccgatttattttgtcagcgaggtcctagccgactccaaaacgaggtaccctcaggttcagaagctgttatatggtattctaattactaccaggaagctatctcactactttcaaggtcactcggtaacggtggttacatcatttccactcggtgatatactgcacaaccgcgaagcaaacggacgtattgctaagtgggctttggagttgatgtctttggacatatcattcaagccccgaatttcaatcaagtcccaagcgttagctgattttgtcgccgaatggaccgagtgccaggaggatacccccgcggagaacatggagcactggaccatgcattttgacggatccaaacgactttcgggcactggagcaggagtggttttgatttccccaactggagaaagattgagctatgtgctttggatacatttttcggcgtcccacaacgtcgctgagtatgaagccctccttcatgggctacggattgcaatttccctagggataaagcgtttaatagttcgaggcgattcacagctggttgttaaccaagttatgaaagagtggtcctgccttgacgacaacatgatggcatatcgacaagaggtacgcaaattggaagacaaatttgatggactcgagctcagtcacgttcttcgacacaacaatgaagccgccgacagacttgccaattttggatccaagcgtgaggcggcgccctcagatgttttcgtcgaacacctttatacaccgaccgtacctcataaagatactactcaagatgcggacacttatgacgtagctatggttgaagccgactggcgagagcccctcatacgatttttgacttctcaagaactcccccaagacaaagatgaagccgagcggatttcaaggcggagcaaactttatgttatgcatgaatctgagttatacaagaaaagcccttcaggaattctgcaacgctgcgtatctttagaggaagggagacaattgctgaaagacatacattctgggatatgcggaaaccatgctgctgcacgcaccattgtcggcaaagcttaccggcagggttttttctggcctactgcagtgtccgacgccgacaaaattgtgcgcacatgtgaaggttgccaatttttcgccagacaaattcatctaccagctcaagagttgcagactatcccgctgtcttggccgtttgcggtttgggggctcgacatggttggcccgtttaaaaaggcagttggcggttacacgcatctctttgtggccattgacaaattctccaagtggattgaagctaaaccggttgtcacaatcacagcagataatgctcgagacttcttcatcaacattgtgcatagatttggagtgcccaatcggatcattaccgataatggcacacaattcaccggtggagtttttaaagacttttgtgaagactttggaattaagatttgctatgcctcagtggcacaccccatgagcaatggacaggtggagcgagccaatggcatgatacttcaagggattaaagcgcgtgtttttgaccggctaagaccctatgccggcaaatgggtgcaacagctgccatcagtactttggtctttgcgaactacacccagtcgggccacaggccagtcaccttttttccttgtctatggggcagaagcaatgttgccgagtgaagttgaattcgagtctttgcgctttcgaaatttccgtgaagaacgctacgaagaggaccgagtggatgatttgcaccgattggaagaagcccgcgaagcagctttgattcggtcggctcgatatttacaaggattgcggcgctatcataatcgcaatgttcgatctcgtgcctttttagtcggtgacctggttttgcggaaaattcaaactacacgagatcggcacaagttatctcctctatgggaagggccatttattatctctgaagtcacccggccaggttcttatcgactcaagcgcgaagacggtactcttgtcgacaactcttggaacattgaacatcttcgtcgtttctacgcttaa

SEQ ID NO: 100802 - DNA, 5700 bp, Oryza sativa
  Clone ID: PAT_MRT4530_98483C.1
atgggttccgtctccggcatcgacgacctcgtcttcccacccgggcagacgtttcggttcggcagcctcgacttcgtcaccaacaacttcggcaagatctctctccttgactcggtgtcagaccagtcgggagagaaccggatttcagtcccgtttggactcccaaacgcggctgaaagttacttcaagaccatctcaatcgagtcggcttcaaaccactcgggtgagatcgcatcttctccaacgacaccagatcaagatgatggggcttacccaccgatcctgatgaagttccccgacgatttggcggccatctccatcatgacagcgtctccatcccgtaggcctaggcggaagtcggcttcaacaccgatttcgcctagcttcagggaagtcggcgtcatcctccaaccactcggcacggtttcgacggatcagctggatgactactacagctcccccaccgtcgactcgcgccccaccgacatcgtggagtacgacgagtattgctctcgctacaacgacccggatctcgacgacttcgacgaaagcctagatgacaactacacccctctctacttcggcgtcttcatggccgataacgagacggaggagcaacgccaagcccgggagaccgaagcacgtcgcgagactgagcgtcgccgactggaggaggagcgtcaagcacaagaacaagaacggctacggcgtgagcagcaggagcgtgagcggatgtcacgaccggaattaacccaacgggcgttccttacccgcgagggcgcgcccgaaggcggcctcgccggcacggccgacgggagggggacgcgcccgcgccccgatggtcaccggcggcgacctccggcgcggcggagcggcacccgagagagaggagggaagggggaagcgaatggagcagtcttcggctcaccccggtcgacggcgacgacgggaacggcggccgaagcggaggaaggcggcggcgcggttcgggacggcgagggcgacggtgctccggcggtcggcgagcgaaacggaggagcggacggggtcgacgacgacgcggcgaagccgacggaggtgacgccgagtggggaggaagtccggagcgacggcggcggtgaaccggagctcgtcggcgacggcggagagaagatgcgacggcgcgatcccgattccgacgggcgccgagcgcgtgatctcatcggccaacaagatgttgaagggacaccggttttccgcacccctcaacagaatgcggttgccgcgatcaccctcctcgacaccctcctcaaggaaaacgagctcaatcaatctgatcacgtcgtcaacatcttgaaccagacgaagaccatgattgcagcttcggtcccagttaactccgaaagcgtccacacgccgactggcagccgagtcccccacttccgatctcatgactaccgtcatccaagcctcagcatcaccggcgcaggatccaatcgcaggagcaggggtcacgacgagcggtccgttcactcacctcccgaccatcatagggagcgccgagtggaacggcctcgctcaccacctcgtcgccgccccgtcgatcttcgcgacacaatcatacagcgccgagcagctcgaggccatcatcattcgccggaccgccacgacgacgaccttgacggagtagcagccttcaccgacgacctgcgtcgagtggattggccagccggcttcaagccgactggaatagagaagtacgacggtaccactaacctagaatcgtggcttaccgtctacggtctcgcaatccgcgcagcaggaggagacagcaaggccatggcgaactatttaccagtggctttagcggattccgcccgatcttggctccatggattgccccgtggtacaattggatcttgggctgaattacgcgaccacttcatcgccaacttccaaggcaccttcgagcgtcccggcacacaatacgacctctacaatgttattcagaagtccggagaatcccttcgagattacatccggacagtcaagcttatgtttgaaaaagccaacgagtacgccaaagccgaagacgccgtcaccgcatcaaagcagtcgggtcccagttggaagccaaacaagggtacgctggctacgggaggaggtggaagtaacaaccataaggaccgcaagcgtaagcctgaggaacttgttgcaaccgccactcactcttcccgacagcgttcgcgcgtcaacacgttcgacaagatcatgaactcccaatgcccgcaccatcctaactccaaccacgtggccaaagattgtttcgtctacaagcagtttgcggagcaatacaccaagactacacggaagaactctgacgaagaacaaagcacgtcgaggaagaaggacgacggtgacaccccggcaggatttcaagaccaccgcaaggagctcaaccatatcttcggcggccccctggcttatgagtctaaaagaaaacaaaagttgactgaacgggagatcaatgctgttcagcccgacacgccccaatatcttcgatggtcagaaattgcaatcaagtttgaccgctcggatcatcctgaccgagtggtccacccggggcggtaccccctagtactagacccagtggtccgtaatgtcaagcttcgcagaaccctcatcgacggaggcagtgcactcaatatcctcttcgccaagaccttggatgatatgcagattcctcgctccaagctaaaaccaagcaatgcgccttttcacggagtaattccaggattatccgcaactccactcggccagatcaccctcccggtcacttttggcactcgggaaaacttccgcacagagaatatcagctttgaagtcaccgattttgagacagcataccatgccatactcggacgcccggcgttagccaagttcatggccgtcccgcactacacttacatgatgatgaagatgcctggtccccgaggagtcctatccctacggagcgacatcaagcaagccgtcacatgcgacaaggagagttgcgacatggcccaaacccgcgagatggcgtctgcccgagaggatatccgactggctgcagccacggcgagcgaaggagaagtgcccgctaccaagacttcaaaaagtggagaaagcgaagccaagactaagaagattcccctagatccttctaatcctactaaaactgctaacaataaagatatctttgcatggaaaccatatgatatgcccggtattcctagagaggtgattgagcactccttacatgtcaaagaagatgccaagcctatcaaacaacgactccgccgattcgcacaagacaggaaagacgcgatcaaggaggaattaaccaagctgttagcggcaggcttcattaaagaagtccttcatcccgactggctggcaaacccggttctagtacggaagaaaacggggcaatggcgcatgtgtgttgattatactgacctcaacaaatcttgccctaaagatccttttgggttgcctcgcattgaccaggtagtcgactcgacagccggctgtgagcttctcagttttttggactgctactcggggtatcatcagatccgactgaaggaatccgactgcttgaagacttcattcatcacgccctttggagcatattgctacgtcaccatgccgttcggactaaaaaacgcaggagcaacttatcaacgtatgatccagagatgcttctcaacgcagatcggccgcaacgttgaagcctatgtggatgatgtagttgtcaagaccaagcaaaaggatgatttgatctcggatctagaagaaaccttcgcgagcatccgcgctttcaggatgaaattaaaccctgaaaagtgcaccttcggagtaccgtcagggaagctgcttggttttatggtgtctcataggggcatccaagccaacccggagaaagttactgctatcctcaacatgaaaccgccaagtacccagaaagatgttcagaagctgactggatgcatggcggcgctcagccgatttgtttcaagacttggcgagcgggggatgcccttctttaagctactgaagaaaacagatgatttccagtggggacccgaagcacagaaggccttcgaagatttcaagaaactcctcaccgagccaccagtcttagcttcaccacatccgcaggagccgttgttgctgtatgtatcagccacctcccaggttgtgagcacagtcttggtcgttgagcgcgaggaagaaggccatgtccagaaagtccagcgaccgatttactttgtcagcgaagtcctagccgactccaaaacgaggtaccctcaggttcagaagctgttatatgacatatcattcaagccccgaatttcaatcaagtcccaagcgttagctgattttgtcgctgaatggaccgagtgccaggaggatacccccgcggagaagatggagcactggaccatgcattttgacggatcaaaacgactttcgggcactggagcaggagtagttttaatttccccaactggagagagattaagctatgtgctttggatacatttttcggcgtcccacaatgtcgccgagtatgaggcgctccttcatggactgcggattgcaatttccctagggataaagcgtctgatagttcgaggcgattcacagctggtcgtcaaccaagttatgaaagagtggtcctgccttgacgacaacatgatggcatatcgacaagaggtacgcaaattggaagacaagttcgatggactcgagctcagtcacgttcttcgacacaataatgaagccgccgacagacttgccaactttggatccaagcgcgaggcggcaccctctgatgttttcgtcgaacacctttatacgccgacagtacctcacaaagatactactcaagttgcgggcactcatgatgtagctatggttgaagccgattggcgagagcccctcatacgatttttgacttctcaagaactcccccaagacaaagatgaagccgagcggatttcaaggcggagcaaactttacgttatgcatgaagctgagttgtacaagaaaagcccttcagggattctgcaacgctgcgtatctttagaggaagggagacaattgctgaaagacatacattctgggatatgcgggaaccatgctgccgcacgcaccattgtcggcaaagcttaccggcagggtttcttttggcctactgcagtgtccgacgccgacaaaattgtgcgcacgtgcgaaggttgccaatttttcactagacaaattcatctactagctcaagagttgcagaccatcccattgtcttggccgtttgcggtttgggggctcgacatggttggcccgtttaaaaaggcagtcggcggttacacgcacctctttgtggccattgacaaattctccaagtggattgaagctaaaccagttgtcacaatcacagcagataacgctcgcgacttcttcatcaacattgtgcatagatttggagtgcccaatcggatcattactgataatggcagacaattcactggcggagtttttaaagacttttgtgaagactttggaattaagatttgctatgcttcagtggcgcatcccatgagcaatggacagaacgctatgaagaggaccgagtggatgatttgcaccgattggaagaagtccgcgaagcagctttga

SEQ ID NO: 100803 - DNA, 5976 bp, Oryza sativa
  Clone ID: PAT_MRT4530_98484C.1
atgggttccgtcaccggcatcgacgacttcgtctttccacccgggcagacgtttcggttcggcagcctcgacttcgtcaccaacaacttcggcaagatttctctccttgactcggaatcagaccagtcgggagataatcgacttccagtcccgtttggattcccaaacgcggcagaaagttacttcaagaccatctcgatcgagtcggcttcaaaccactcggccgagatcgcatctactccaacaacgccagatcaagatgatgagccttacccatcgatcttgatgcagctccctgacgattcggcagccgtctccaccgccacgccgtctccatcccgtaggcctgggcggaagtcggtcttaacaccgatttcgcctagcttcagggaagtcggcgtcatcctccaaccactcggcacggtttcgacggaccaactggatggctactacagctctcccaccgtcgactcacgtcccaccgaaatcgtggaatacgatgagtttggttctcgctactacgacgacgcggatcttgacgacttcgacggaagcctagaagacaactgcactcctcttttcttcggcgtctttatggccgacaatgaaacggaggagcagcgccaagcccgggaagccgaaacacgttgcgagatcgagcgccgccgactggagcaggagcgccaagcacaagagcaagagcggctacggcgggagcagcaggtgcacgagcggaacgcgaaggaggctgaagaccgacggcagcgaaccttggaagctgggcgccgagcgcgtgatctcatcggccagcaggatgttgaagggataccggttttccgtacccctcagcagaatgcggttgccgcgatcaccctcctcgacaccctcctcaaggaaaacgagcacaaccaatctgatcatgtcatcaacatcttgaaccagaccaagaccatgattgcggcctcggttccagttaactccgaaagcgtccacacgccgactggtagccgagttccacacttccgatctcaggactaccgtcatccaagcctcagcatcaccggcgcaggatccaatcgcaggagcaggggtcacgacgagcggtccgtgcactcgcctcccgactaccgtggggagcgccgagtagaacggccacgttcaccgcctcgtcgccgccccatcgatcttcgcgacacgatcatgcagcgccgagcagctcgaggccgtcaccactcgccagaccgctacgacgacgaccttgatggggtagcagccttcaccgacgacctgcgtcgagtggattggccagccggcttcaaaccgactggaatagagaagtacgacggtaccactaacccagaatcgtggctcaccgtctacggtctcgcaatccgcgcagcaggaggagacaataaggccatggcgaattatttaccagtggctttggcagattccgcccgatcttggctccatggactgccccgtggtacgatcggatcttgggccgaattacgcgaccacttcatcgccaacttccaaggcaccttcgagcgtcctggcacacaatatgatctttacaacgttatccagaaatccggagaatcccttcgagagtatatccgacgattttctgaacaacgcaacaagatctccgacatcaccgacgacgtcatcatcgccgcattcaccaaagggattcgccacgaagaattggtcggcaaatttgggcgcaaacctcccagaacagtcaagctcatgtttgaaaaagccaacgagtacgccaaagccgaagacgccgtcaccgcatcgaagcagtcgggtcccagttggaagccgaaaaatacgccggctacgggaggaggtggaagtaacaatcataaggaccgcaagcgtaagcctgaggaacttgttgcaaccgccgctcactcttctcgacagcgttcgcgcgtcaacaccttcgacaagatcatgaactcccaatgcccgcatcatccaaactccaaccacgtggccaaagaatgcttcatctacaagcagttcgcggagcagtacaccaagtctactcggaagaactccgacgagaaacaaagcacgtcaaggaagaaggacgacggcgacaccccggctggatttcaagaccaccgcaaggagctcaaccacattttcggcggccccatggcttatgagtctaaaaggaagcaaaagctgaccgaacgggagatcaatgctgttcagcccgacacgccccaatatcttcgatggtcagagatcgcaatcaggtttgaccgctcggatcatcctgaccgagtggtccacccggggcggtaccccctggtactagacccagtggtccgtaacgtcaagcttcgcagaaccctcattgatggcggcagtgcactcaatatcctcttcgccaagactttggatgatatgcagatccctcgctccgagttaaaatcaagcaatgcgccttttcatggagtaattccaggattatccgcaactccactcggccagatcactcttccggtcacttttggcactcgggaaaacttccgcacagagaatatcagctttgaagttgccgatttcgagacagcataccatgccatactcggacgcccggcgttagccaagttcatggccgtcccgcactacacgtacatgatgatgaagatgcctggtccccgaggagtcctaaccctacggagcgacatcaagcaagctgtcacatgcgacaaggaaagttgcgacatggcccaaacccgcgagatggcgtctgcccgagaggaaatccgactggctgcaaccacggaaagcgcgctcatcacctttcttcaaaataataaagatatctttgcgtggaaaccttcggatatgcccggtattcccagagaggtgattgagcactccttacatgtcaaagaagacgccaaacctattaaacaacgactccgccgatttgcacaagacaggaaggacgcgatcaaggaggaattgaccaagctgttagcagcaggcttcatcaaagaagtccttcatcccgactggctggcaaacccggttctagttcggaagaaaacagggcaatggcgcatgtgtgtcgattacactgaccttaacaaatcttgcccaaaagatcctttcgggttgcctcgcattgaccaggtagttgactcaaccgccggctgcgagcttctcagttttctggattgctactcggggtatcatcagatccgactgaaggaatccgactgcttgaagacttcattcatcacgccttttggggcatactgctacgtcaccatgccgtttggattaaagaacgcgggagcaacctatcaacgcatgatccagagatgcttttcaacacagatcggccgcaacgttgaagcctatgtggatgacgtagtcgtcaagaccaagcaaaaggatgatctgatcttggatctagaagaaaccttcgcgagcatccgcgccttcaggatgaagttaaatcctgaaaagtgcaccttcggagtaccgtcagggaagctgcttggttttatggtgtctcataggggcatccaagccaacccggagaaagttactgctatcctcaacatgaaaccgccaagcacccagaaagatgttcagaagctgactggatgcatggcggcgctcagccgattcgtttcaagacttggcgagcgggggatgcccttcttcaagctactgaagaaaacagataatttccaatggggacccgaagcacagaaggccttcgaagatttcaaacaactcctcaccaagccaccggtcttagcttcaccacacccgcaggagccgttgttgctgtatgtatcagccacctcccaggtcgtgagcacagtcttggttgtcgagcgtgaggaagaaggccatgtccagaaagttcagcgaccaatctacttcgtcagcgaggtcctggctgactccaaaacgaggtaccctcaggttcagaagctgttatatggtattctaattactaccaggaagctgtctcattactttcaaggtcactcggtaacggtggtcacatcatttccactcggcgatgtactgcacaaccgcgaagcaaatgggcggattgctaagtgggctttggagttgatgtctttggacatatcattcaagccccgcacttcaatcaagtctcaagcgttagctgattttgtcgccgagtggaccgagtgccaagaggatacccccgtggagaaaatagagcactggaccatgcattttgacgggtcaaaaagactttcgggcactggagctggagtggttttaatttccccgaccggagaaagactaagttatgtactttggatacatttttcggcgtctcacaacgtcgccgagtatgaggcgctccttcatgggctacggattgcaatttccctagggataaagcgtctaattgttcgaggtgattcacagctggttgtcaaccaagttatgaaagagtggtcctgcattgacgacaacatgatggcatatcgacaagaggtacgcaaactggaggataagttcgatggacttgagctcagccatgttcttcgacacaacaatgaagctgccgacagacttgccaactttggatccaagcgcgaggcagcgccatctgatgttttcgtcgaacacctttattcgccgacagtacctcacaaagatgctactcaagttgcggacactcatgacatagctatggttgaagccgactggcgagagcccctcatacgatttttgacttctcaagaactccctcaatacaaagatgaggccgagcggatttcaaggcggagcaaactttatgttatgcatgaagccgagttatacaagaaaagcccttcaggaattctgcaacgctgcgtatctttagaggaagggagacaattgctgaaggacatacattctgggatatgcggaaaccatgctgcagcgcgcaccattgttggcaaagcttaccggcagggttttttctggcctactgcagtgtccgacgccgacaaaattgtgcgcacatgtgaaggttgccaatttttcgccagacaaattcatctaccagctcaagagttgcagactatcccgctgtcttggccgtttgcggtttgggggcttgacatggtcggcccgtttaaaaaggcagttggcggttacacgcatctctttatggccattgataaattctccaagtggattgaagctaaaccggttgtcacaatcacagcagataatgctcgcgacttcttcatcaacattgtgcatagatttggagtgcccaatcggataatcactgataatggcacacaattcactggcggagtttttaaagacttttgtgaggactttggaattaagatttgctacgcctcagtggcacaccccatgagcaatggacaggtggagagggccaacggcatgatacttcaaaggattaaagctcgagtttttgaccggcttaaaccttatgccggcaaatgggtgtcacagttaccatcagtactttggtctttgcgtactacgcccagtcgggccacaggccagtcaccttttttccttgtctacggggcagaagcaatgttgccgagtgaagtcgagttcgaatctttgcgcttccgtaatttccgtgaagaacgctatgaagaagaccgagtggacgacttgcaccgactggaagaggtccgcgaagcagctttgattcagtcagctcggtacttacaagggttgcgacgttatcataatcgcaatgttcgatctcgtgcctttctagtcggcgacctggttttacggaaaattcaaaccacacgagatcggcacaagttatctcctctatgggaagggccatttattatctctgaagttacccggccaggttcatatcgactcaagcgcgaagacggcactctcgtcgacaactcttggaacattgaacatattcgtcgtttctacgcttaa

SEQ ID NO: 100804 - DNA, 552 bp, Oryza sativa
  Clone ID: PAT_MRT4530_98485C.1
ctagcagcagccaaacacctgctggcgagctcccgcgccatcctcgacctgcgctgcatgcctccttccgcggccagtggcggcgggctcctgtgtcgcgcgcctcccttcgcaccccgccgcggccgcgagctcccgtgccacgcgcctccttccgcgcccagcggcggcgggctcccacgccacgcgcctctcttcgcaccccgcggtggtggcgagcacctgcgcctccctccttccgcacggagtagctgctgccgccgtctgtgcaccatggagtcaggatgggaaggggagagtaccttcactggattggcggtggtggtgggttcgccggggccggttgagggcgtggccgccatggaagaggcgcggcgcgggcacgacagggaggcggactgccgtctggatctccgccgccatgccttcccttgggtgggtgtgtgtctccggcaacaaggcggcgggggctcgccggcggcgacggcggcgtggcgagaaaatgaagaggtgaggatgatgagaatcttaaagcaatcccagccgttgtaa

SEQ ID NO: 100805 - DNA, 1520 bp, Oryza sativa
  Clone ID: PAT_MRT4530_98486C.1
gcaatccttgacggcagcgacaaaaccaacttcaacaagacagctccaactagaaagatcttcagctctggtgtgggcgaaaagagagcaaaactgagtactacccactgtactcagcaagtcataccggaagaggaggcagtgggcattcctctcttgcgccgcggtgaatccggcagctggacaaccggacaccccggccgacccaactccatcacgcccaccctcgccaccggtgcctaggaaagggtcgagctatacttcagatcaagcagttacccactcccgcttgtggcaagcgctgaaatggcatttgctgacgtcagcaaggggaaccagcgccgacaggcgggccccacacgtcagcgggtcaaagggggtggctcatggtggactcggtccaccgcagcacaggcgcgcggctggggcacgggcgcggccgagaccgacccggccggccatggcacggcggctacgcgcacgcggccagacgaccaccggcgacggcagcgcgtcgcggtggcgggcatggggagcggcggatggggaaaaaggagagggggcgatagggattctcaccgaggacggcgacggcgagacgaccacggggaggtggccggcggcggaaaagatggcggcgaccggcacgggaggcgacgggaacggcgttccgacgacgcccgaccacggtggagccgcggccgagggccggcaagacctagggaaaatattggagcggttagggagagaaataggcgaccggagcggtgaggagcggtggtttgagacgacaacggcggtagcggagctcgggtcgacggcggaaaggtggttgcggcgatgaaatggggaaacagagcagaggccgaggtagagcttggcacagcgttgccgacgacgcaaacgacgaggtgcggcgacgactaacgcggcagcagcggccggctgaagacggcggcggcgggggagagaggtggtgcacgaggcggcggtgttccagaggcggagaggggaaatggagtagaggccgggctgcggcacggcgccgcgaagccgacagtggtggcggattggcgcggcggtgggtggagcggcggaatcggccggccggagctcgccggaaagcggtggtgcacgggagcacggtggggaggtgtctagggagcgcgggggggagaacgtggccgggagaggcggatttgaagggggaagaggcgccggcgacgtgggcgagtggggtggttcggcgcctgttttggagggggaaaatgggggaggagagcggggtcgtgggcggcgaggtcccacggtcgggcgggagcggcgcaaggtggaggaggtgggctggggaagcggcgacgtggggcagctcaggcggccatgggtggtaactggcgaggtggctggaggaagagggaggagctgacaggtggggccgcgggtcccacctgtcggccaaaggaagagggggccggttaggggaggaaaagaggactagagggagagggaggggaggagct

SEQ ID NO: 100806 - DNA, 1075 bp, Oryza sativa
  Clone ID: PAT_MRT4530_98487C.1
atggatatagatggacagccaggacagggacaacccagacaaggacaacaaggacatgggcgtggtcatggccgtgtttccggttcgcattcaacgatcgagcctagaaacgttgccgctgctggccgtggacgcgggagtccattgagtctgaatgacatgcccggtggcagaagtatcatcgacaaaaggtttaaaaataaagatttgggcagctttttgacgaaaagtagtgctagcacatgttcccctcatccaagtccaagtacccacggtgatgatgcgcctgtagaatccatcgccgaggaagtgcttgaagagcctgttcagtgtcttgagactgtgatcgaaaatacacaagaacaaccagaacttgaagatgcggcttattgcttctattgctttctctttaggcaggaagccgatcatgaaaaatttggccacgttgttttctcaaaaactggatatgataattggaagcatgcatatagagcattccctactcatgttggtggggtttccggttgccataataaagcaaggagatgtgccgatgattttaagaatcaaagggcaagtatctcacataaagttgacactgttagcaaagagtcagaaaagttgtatgaaatccgtttgactgcttctttggatattgcaagatatctcatttcgcaaggtcatgcttttcgtggtcatgatgaatctccttcctccctaaataagggaaatttcttggaactttttgattggtataaacaaaggagtgaggaggtaagagttgcatttggcgagttatgtccggataatgctcgcatgacttctcataggattcaaaaggagctttgtaatagttgtgcacaacagattagcaaagagataaagcaagagattgggcacaacttattctctattctaattgatgaatctcgcgatatctcaatcgcggagcaaatggcagttattgtgaggtttgtgaatcacaaaggaatggttgtggaaaggtttttgggcctcaaacatgtggaggatacaacatcaaatgcattgaagaaagcgttgcttgaaatgcttg

SEQ ID NO: 100807 - DNA, 6603 bp, Oryza sativa
  Clone ID: PAT_MRT4530_98488C.1
atgggttccgtctccggcatcgacgacctcgtcttcccacccgggcagacgtttcggttcggcagcctcgacttcgtcaccaacaacttcggcaagatttctctcatcgactcggaattagaccagtcgggagagaatcggatttcggtcccgtttggactcccaaacgcggctgaaagctacttcaagaccatctcaaccgagtcggcttcaaaccactcgggcgagatcgcatcttctccaacgacaccagatcgagatgatggggcttacccaccgatcctgatgaagctccccgacgatttggcggccatctccatcacgacagcttctccatcccgtaggcctaggcagaagtcggcttcaacaccgatttcgcctagcttcagggaaatcggcgtcatcatccaaccactcggcacggtttcgacggatcagctagatggctactacagctctcccaccgtcgactcgcgccccaccgaaatcgtggagtacgacgagtttagctctcgctacaacgacccgcatctcgacgacttcgacggaagcctagatgacaactacacccctctctacttcggcgtcttcatggccgacaacgagacggaggagcagcgccaagcccgggagactgaagcacgtcgcgagactgagcgccgccgactggaggaggagcatcaagcacaagaacaagaacggctacggcgtgagcagcaggagcgtgagcggaccgcgaaggaggctgaggatcgacgacagcgagccttggaagcagggcgccgagcgcgtgatctcatcggccaacaagatgttgaagggacaccggttttccgcacccctcaacagaatgcggttgccgcgatcaccctcctcgacaccctcctcaaggaaaacgagctcaaccaatctgatcacgtcgtcaacatcttgaaccagacgaagaccatgatcgcggcttcggtcccagttaactccgaaagcatccacacaccgaccggcagccgagtcccccacttccgatctcatgactaccgtcatccaagcctcagcatcaccggtgcaggatccaatcgcaggagcagggccttcaccgacgacctgcgtcgagtggattggccagccggcttcaagccgactggaatagagaagtacgatggtaccactaacccagaatcgtggcttaccgtctacggtctcgcaatccgcgcagcaggaggcgacagcaaggccatggcgaactatttaccagtggctttagcggattccgcccgatcttggctccatggattgccccgtggcacgattgggtcttgggccgagttacgcgaccacttcatcgccaacttccaaggcaccttcgagcgtcccggcacacaatacgatctctacaacgtcattcagaagtccggagagtcccttcgagattacatccggcgattctctgaacagcgtaacaagatctctgacatcaccgacgacgtcatcatcgccgcattcaccaaagggattcgccacgaggaattggttggcaagttcggacgtaagcctcccaggactgtcaagctcatgttcgaaaaagccaacgagtacgccaaagctgaagacgccgtcaccgcatcaaagcagtcgggtcccagttggaagccaaaaaaggatacgccggcttcgggaggaggtggaagtaacaatcataaggaccgcaagcgtaagcctgcggaacttgtcgcaaccgccagccactcttctcgacagcgttcgcgcgtcaacacgttcgacaagatcatgaactcccaatgcccgcaccatcctaattccaaccacgtggccaaagattgcttcgtctacaagcaattcgcggatcaatacgccaagtctacgcggaagaaccccgacgaagaacaaagcacgtcgaggaagaaggacgacggcgataccccggcaggatttcaagaccaccgcaaggagcttaaccatatcttcggcggccccctggcttatgagtctaaaaggaagcaaaagttgaccgaacgggagatcaatgctgttcagcccgacacgccccaatatcttcgatggtcagagattgcaatcaagttcgaccgctcggatcatcctgaccgagtggtccacccggggcggtaccccctggtactagacccagtggtccgtaatgtcaagcttcgcagaaccctcattgacggtggcagcgcactcaatatcctcttcgccaagaccttggatgatatgcagattcctcgctccgagctaaaaccaagcaatgcgccttttcacggagtaattccaggattatccgcaactccactcggccagatcacactcccggtcacctttggcactcgggaaaactttcgcacagagaatatcagcttcgaagtcgccgatttcgagacagcttaccatgccatactcggacgcccggcattagccaagttcatggccgtcccgcactacacttacatgatgatgaagatgcctggtccccgaggagtgctatccctacggagcgacatcaagcaagccgtcacatgcgacaaggagagttgcgacatggcccaaacccgtgagatggcgtctgcccgagaggatatccgactggctgcagctacggcgagcgaaggagaagtgcccgctaccaagatttcaaaaagtggagaaggcgaagccaagactaagaagattcccctagatccttctgatcctactaaaattgctgtaataggcgccgaagaggtgattgagcactccttacatgtcaaagaagatgccaagcctatcaaacaacgactccgccgattcgcacaagacaggaaggacgcgatcaaggaggaattaaccaagctgttagcagcaggcttcatcaaagaagtccttcatcccgactggctggcaaacccggttctagttcggaagaaaacagggcaatggcgcatgtgtgttgattatactgacctcaacaaatcctgccctaaagatccctttgggttgcctcgcattgaccaggtagtcgactcgaccgccggctgtgagcttctcagttttttggattgttactcggggtatcatcagatccgactgaaggaatccgactgcttgaagacttcattcatcacgccctttggagcatactgctacgtcaccatgccgttcggactaaaaaacgcaggagcaacttatcaacgtatgattcagagatgcttctcaacacagatcggccgcaacgttgaagcctatgtggatgatgtagtcgtcaagaccaagcaaaaggatgatttgatcttggatctagaagaaaccttcgcgagcatccgcgctttcaggatgaaattaaaccctgaaaagtgcaccttcggagtaccgtcagggaagctgcttggttttatggtgtctcataggggcatccaagccaacccggagaaagttactgctatcctcaacatgaaaccgccaagtacccagaaagatgttcagaagctgactggatgcatggcggcgctcagccgatttgtttcacgacttggcgagcgggggatgcccttctttaagctgctgaagaaaacagataacttccagtggggacctgtcacgcccagaaatttagcccaaatttccagactattttgtgcattaaatccctgtccaggaccagccaggcaaggggcagccggcgccgacaggtgggtcccaggcgtcagcggctcaagggggctcggtccaccatggaccgggttcacaagggcgccggggctggcccgaccgaccatagagggcggcggcgcgcagtcaccggcgacggcgggcggcacagggagcggcggcgcgcagcgcgggaagcggcgagaggaaacggaggcagtgagggagagggaggtggcagagctcaccgaggggcacggcgacggcgagagcagccggcggagggaggcggcggcgctccacaggtcgacaaggaggaggggctcccggcggcggaaggcggcgaccgggcggcggatggggaagagcgggacgcggcgaagccggcgatgcagccgatgcgtcgcagcggcagccggggtgaaggcgaacggcgaccggaggcggaaaaaggcggccgggcgcgggagcggctcaggtggcgacgacatgcggctggaggcggtggcggcggcgcagcgcggcagcgacgggagcggcggtggcgggcggctggagatcgccggcgagcggcggcgaaggggatcggcgtggagagctcgggggcgaggagagggccggggagcggcggatttcgaggggaagtggggcggcgtcgtgggggtgtggcggctcggcgtggcgtcgattcccgcggggagagagggggagtggggcgggatgtggtcgcgaggtggaaggggtctcgggtccacgccggttgggacgaggggaggacccgaagcacagaaggccttcgaagatttcaagaaactcctcaccgagccaccagtcttagcctcaccacacccgcaggagccgttgttgctgtatgtatcagccacctcccaggttgtgagcacagtcttggtcgttgagcgcgaggaagaaggccatgtccaaaaagtccagcgaccgatttattttgtcagcgaggtcctagccgactccaaaacgaggtaccctcaggttcagaagctgttatatggtattctaattactaccaggaagctatctcactactttcaaggtcactcggtaacggtggtcacatcatttccactcggtgatatactgcacaaccgcgaagcaaacggacgtattgctaagtgggctttggagttgatgtctttggacatatcattcaagccccgaatttcaatcaagtcccaagcgttagctgattttgtcgccgaatggaccgagtgccaggaggatacccccgcggagaacatggagcactggaccatgcattttgacggatccaaacgactttcgggcactggagcaggagtggttttgatttccccaactggagaaagattgagctatgtgctttggatacatttttcggcgtcccacaacgtcgccgagtatgaggccctccttcatggactgcggattgcaatttccctagggataaagcgtctaatagttcgaggcgattcacagctggttgtcaaccaagttatgaaagagtggtcctgccttgacgacaatatgatggcatatcgacaagaggtacgcaagttggaagacaagttcgatggactcgagctcagtcacgttcttcgacacaacaatgaagccgccgacaggcttgccaactttggatccaagcgtgaggcggcaccctctgatgttttcgtcgaacacctttatacgccgacagtacctcacaaagatactactcaagttgcgggcactcatgacacagctatggttgaagtagactggcgagagcccctcatacgatttttgacttctcaagaactcccccaagacaaagatgaagccgagcggatttcaaggcggagcaaactttatgttttgcatgaagccgagttatacaagaaaagcccttcaggaattctgcaacgctgcgtatctttagaggaagggagacaattgctaaaagacatacattctgggatatgcggaaaccatgctgctgcacgcaccattgtcggcaaagcttaccggcagggttttttctggcctactgcagtgtccgatgccgacaaaattgtgcgcacatgtgaaggttgccaatttttcgccagacaaattcatctaccagctcaagagttgcagactatcccgctgtcttggccgtttgcggtttgggggctcgacatggttggcccgtttaaaaaggcagtcggcggttacacacatctctttgtggccattgataaattctccaagtggattgaagctaaaccggttgtcacaattacagcagataatgcgcgagacttcttcatcaacattgtgcatcgatttggagtgcccaatcggatcatcactgataatggcacacaattcactggcgaagtttttaaagacttttgtgaagactttggaattaagatttgttatgcctcagtggcacaccccatgagcaatggacaggtggagcgagccaatggcatgatacttcaagggattaaagcacgtgtttttgaccggctaaaaccctatgccggcaaatgggtgcaacagctgccatcagtactttggtctttgcgaactacacccagtcgggccacaggccagtcaccttttttccttgtctatggggcagaagcaatgttgccgagtgaagttgaattcgagtctttgcgctttcgaaatttccgtgaagaacgctacgaagaggaccgagtggatgacttgcaccgactggaagaagtccgcgaagcagctttgattcggtcggctcgatacttacaagggctgcgacgttatcataatcgcaatgttcggtcccgtgcctttttagtcggcgacctggttcctatcgactcaagcgcgaagacggtactctcgtcgacaactcttggaatattgaacatcttcgccgtttctatgcttaagcttatcattgtatttccctatttttga

SEQ ID NO: 100808 - DNA, 264 bp, Oryza sativa
  Clone ID: PAT_MRT4530_98489C.1
atggcgcgggcgaaaaacggggaagattgggagggaaaaagggaagggagggcgcctgggtttatagggcggcaatgtcggtttggaaaccgaccttgggcggtcaaggcgcgagctggcgctcggcgctcgcggccaaaacggcgacagaggcggatgacgccgacggggaagagggagagagggagagagggaaaaaggaagggagaaagggggcttgccccttgcctctttgggaaaagaatgagggagagagggcgatga

SEQ ID NO: 100809 - DNA, 463 bp, Oryza sativa
  unsure (1)..(463): unsure at all n locations
  Clone ID: PAT_MRT4530_9848C.1
aggattcanagttggcgtcactattgctacaagttcttatgatgaacttaatctagaagttggagagtatatatcgcaaaaagaagccatggggattaaagggcgtggtgatcgtgaagaagatgaacaactgctgagagccattaaactttccatgggggacaacagcgttactgatcaaacacggggacaacagcattagtttcgtttttgaattacatattatttgaacataactttgccaatcttaacataaatattattctttaccctaaacattaatattattctttactcaatgttttcttagtggagcagatctcagattttcttcagggccctcaactgactgcccatgggtttgtcatgcttgcataaagaccctnagggaaggnaaccttgtgacctttcntgggataatcattggggccnggaattaagtttnaggagggttatatattta

SEQ ID NO: 100810 - DNA, 6015 bp, Oryza sativa
  Clone ID: PAT_MRT4530_98490C.1
atgggttccgtctccggcatcgacgacctcgtcttcccacccgggcagacgtttcggttcggcagcctcgacttcgtcaccaacaacttcggcaagatttctctccttgactcggagtcagaccagtcgggggagaaccggatttcagtcccgtttggactcctaaacgcggctgaaagttacttcaagaccatctcaatcgagttggcttcaaaccactcgggcgagatcgcatcttctccaatgtcaccagatcaagatgatgaggcttacccaccgatcctgatgaagctccccgacgatttggcggccgtctccatcacgacaacgtctccatcccgtaggcctaggcggaagtcggcttcaacaccgatttcgcctagcttcagggaagtcggcgtcatcctccaaccactcggcacggtttcgacggatcagctggatggctactacagctctcccaccgtcgactcgcgtcccaccgacatcgtagagtacgacgagtctagctctcgctacaacgacccggatctcgacgacttcgacggaagcctagatgacaactacacccctctctacttcggcgtcttcatggccgataacgagacagaggagcaacgccaagcccgggaaaccgaagcacgtcgcgagactgagcgtcgccgactagaggaggagcgtcaagcacaagaacaagaacggctacggcgtgagcagcaggagcgtgagcgaaccgcgaaggaggctgaggaccgacggcagcgagccttggaagcagggcgccgagcgcgtgatttcatcggccaacaagatgttgaagggacaccggttttccgcacccctcaacagaatgcggttgccgcgatcaccctcctcgacaccctcctcaaggaaaacgagctcaatcaatctgatcacgtcgtcaacatcttgaaccagacaaagaccatgattgcggcttcggtcccagttaactccgaaagcgtccgcacgccgactggcagccgactcccccacttccgatctcatgactaccgtcatccaagcctcagcatcactggcgcaggatccaatcgcaggagcaggggtcacgacgagcggtccgttcactcgcctcccgaccatcatagggagcgccgagtggaacggcctcgctcaccacctcgtcgccgccccgtcgatcttcgcgacacaatcatacagcgccgagcagctcgaggccatcatcattcgccggaccgccacgacgacgaccttgatggagtagcagccttcaccgacgacctgcgtcgagtggattggccagccggcttcaagccgactggaatagagaagtacgacggtaccaccaacccagaatcgtggcttaccgtctacggtctcgcgatccgcgcagcaggaggagatagcaaggccatggcgaactatttaccagtggctttagcggattccgcccgatcttggctccatggattgccccgtggtacgattggatcttgggccgaattacgcgaccacttcatcgccaacttccaaggcaccttcgagcgtcccggcacacaattcgacctctacaacgttgttcagaagtccggagaatcccttcgagattacatccggcgattttctgaacaacgtaacaagatctccgacatcaccgacgacgttatcatcgccgcattcaccaaagggattcgccacgaagaattggtcggcaagttcgggcgtaaacctcccaggacagtcaaacttatgtttgaaaaagccaatgagtacgccaaagccgaagacgccgtcaccgcatcaaagcagtcgggtcccagttggaagccaaaaaaggatacgccggctacgggaggaggtggaagtaacaatcataaggaccgcaagcgtaagcctgaggaacttgttgcaaccgccattcactcttctcgacagcgttcgcgcgtcaacacgttcgacaagatcatgaactcccaatgcccgcaccatcctaactccaaccacgtggccaaagattgtttcgtctacaagcaattcgcggagcaatacaccaagactacacggaagaattccgacgaagaacaaagcacgtcgaggaagaaggacgacggcgacaccccggtaggatttcaagaccaccgcaaggagcttaaccatatcttcggcggccccctggcttatgagtctaaaaggaagcaaaagttgaccgaacgggagatcaatgctgttcagcccgacacgccccaatatcttcgatggtcagagattgcaatcaagtttgaccgctcggatcatcctgaccgagtggtccacccggggcggtaccccctggtactagacccagtggtccgtaatgtcaagcttcgcagaaccctcatcgacggtggcagtgcactcaatatcctcttcgccaagaccttggatgatatgcagattcctcgctccgagctaaaaccaagcaatgcgccttttcacggagtaattccaggattatccgcaactccactcggccagatcaccctcccggtcacttttggcactcgggaaaacttccgcacagagaatatcagctttgaagttgccgatttcgagacagcataccatgccatactcggacgcccggcgttagccaagttcatggccgtcccgcactacacttacatgatgatgaagatgcctggtccccgaggagtcctatccctacggagcgacatcaagcaagccgtcacatgcgacaaggagagttgcgacatggcccaaacccgcgagatggcgtctgcccgagaggatatccgactggctgcagccacggcgagcgaaggagaagtgcccgctaccaagacttcaaaaagtggagaaagcgaagccaagactaagaagattcccctagatccttctaatcctactaaaactgctaacaataaagatatctttgcgtggaaaccatctgatatgcccggtattcctagagaggtgattgagcactccttacatgtcaaagaagatgccaagcctatcaaacaacgactccgccgattcgcacaagacaggaaggacgcgatcaaggaggaattaaccaagctgttagcggcaggcttcatcaaagaagtccatcatcccgactggctggcaaacccggttctagttcggaagaaaacggggcaatggcgcatgtgtgttgattatactgacctcaacaagtcttgccctaaagatccttttgggttgcctcgcattgaccagatccgactgaaggaatccgactgcttgaagacttcattcatcacgccctttggagcgtactgctatgtcaccatgccgttcggactaaaaaacgcaggagcaacttatcaacgtatgatccagagatgcttctcaacgcagatcggccgcaacgttgaagcctatgtggatgatgtagtcgtcaagaccaaacaaaaggatgatttaatctcggatctagaagaaaccttcgcgagcatccgcgctttcaggatgaaattaaaccctgaaaagtgcaccttcggagtaccgtcagggaagctgcttggttttatggtgtctcataggggtatccaagccaacccggagaaagttactgctatcctcaacatgaaaccgccaagtacccagaaagatgttcagaagctgactggatgcatggcggcgctcagccgatttgtttcaagacttggcgagcgggggatgcccttctttaagctactgaagaaaacagatgatttccaatggggacccgaagcacagaaggccttcgaagattttaagaaactcctcaccgagccaccggtcttagcctcaccacacccgcaggagccgttgttgctgtatgtatcagccacctcccaggttgtgagcacagtcttggtcgttgagcgtgaggaagaaggccatgtccagaaagtccagcgaccgatttactttgtcagcgaggtcctagccgactccaaaacgaggtaccctcaggttcagaagctgttatatggtattctaattactaccaggaagctatctcactactttcaaggtcactcggtaacggtggtcacatcatttccactcggtgatatactgcacaaccgcgaagcaaacggacggattgctaagtgggctttggagttgatgtctttggacatatcattcaagccccgaatttcaatcaagtcccaagcgttagctgattttgtcgccgaatggaccgagtgccaggaggatacccccgcggagaaaatggagcactggaccatgcatttcgacggatcaaaaagactttcgggcactggagcaggagtggttctaatttccccaactggagaaagattaagctatgtgctttggatacatttttcggcgtcccacaacgttgccgagtatgaggcgctccttcatggactgcgaattgcgatctccctagggataaagcgtctaatagttcgaggcgattcacagctggtcgtcaaccaagttatgaaagagtggtcctgccttgacgacaacatgatggcatatcgacaagaggtacgcaaattggaagacaagttcgatgggctcgagctcagtcacgttcttcgacacaataatgaagccgccgacagacttgccaactttggatccaagcgcgaggtggcgccctccgatgttttcgtcgaacacctttatacgccgacagtacctcacaaagatactactcaagttgcgggcactcatgacgtagctatggttgaagccgactggcgagagcccctcatacgattcttgacttcccaagaactcccccaagacaaagatgaggccgagcggatttcaagacgaagcaaactttatgttatgcatgaagctgagttgtacaagaaaagcccttcagggattctgcaacgctgcgtatctttagaggaagggagacaattgctgaaagacatacattctgggatatgcggaaaccatgctgccgcacgcaccattgtcggcaaagcttaccggcagggttttttttggcctactgcagtgtccgacgccgacaaaattgtgcgcacgtgcgaaggttgccagttttttgccagacaaattcatctaccagctcaagagttgcagaccatcccactgtcttggccgtttgcggtttgggggctcgacatggttggcccgtttaaaaaggcagttggcggttacacgcacctctttgtggccattgacaaattctccaagtggattgaagctaaaccggttgtcacaattacagcagataacgctccagacttcttcatcaacattgtgcatagatttggagtgcccaatcggatcatcactgataatggcagacaattcactggcggagtttttaaagactgttgtgaagactttggaattaagatttgctatgcctcagtagcacatcccatgagcaatggacaggtggagcgagccaatggcatgatacttcaagggattaaagcgcgagtttttgaccggctaaaaccctatgccggcaaatgggtggaacagctaccatcagtactttggtctttgcgtactacacccagtcgggccacaggccagtcaccttttttccttgtctatggggcagaagcaatgttgccgagtgaagtcgaattcgagtctttgcgctttcgtaatttccgcgaagaacgctacgaggaggaccgagtggatgacttgcaccgactggaagaagtccgcgaagcagctttgattcagtcggctcgatacttacaagggttgcgacgttatcataatcgcaatgttcgatcccgtgcctttctagtcggcgacctcgttttgaggaaaattcaaactacacgagatcggcacaagttatctcctctatgggaagggccatttatcatctctgcagtcacccggccaggctcctatcgactcaagcgcgaagacggtacactcgtcgacaactcttggaacatcgaacatcttcgtcgtttctacgcttcagcttatcactgtacttccctatcttga

SEQ ID NO: 100811 - DNA, 843 bp, Oryza sativa
  Clone ID: PAT_MRT4530_98491C.1
atctggtcgatcgcccataaccgtgggcacggctattcgaatagttttactctggccagaggtgcacaactgtacccacaagacacaatccaccggcatgtcaccgtgtcatcatgtgcccatgatgaacacgtcaccacgtcgagtgattgtgacaagacccttcatataactctcccctaaccatccacaccacgctaaggtttcacccccactcctcgcaaggcagcgggcagtcccctcgtgcgccgcggtgaatccggcagctggacaaccggacaccccggccgacccaactccatcacgcccaccctcgccaccggtgcctaggaaagggtcgagctatacttcagatcaagcagttacccactcccgcttgtggtaagcacgggggcggcgccgacatgcgggacccacgggtcagcggctcaagggggaggtcggtccaccgtggaccaagtccacggggccgagggtggtacccggcgggtggaccccaccaggcggtggctcaaaggggaggggagggaggtgccggcctggctcggctcggcttcaaagccgaccggcggccatggcaaccggcggcgacgcgcacggtcgccggcgacggcaatcggcggcgcgggaagcgacggcggacggtgtataggacggcggcgtcgaccgaaggcgacggcgagcgcatgaagagaggcggcgcaaacaagagagaggggaagagggaggagaggggatcctcaccggcgagtatggcggccggagcggaggatgaaggtggcggcgacaacccggcgatgaggaggggcggacgggcggcggcagcacctacggagggagttg

SEQ ID NO: 100812 - DNA, 259 bp, Oryza sativa
  unsure (1)..(259): unsure at all n locations
  Clone ID: PAT_MRT4530_98492C.1
gcgtgncagggccggtggcctgtagaactggcgccagaaatatggatagacggaccaagtggtgtgtnatatgngctgggtgcctcgccactgtaaccggggatgtntgtggtggaatatgtgtgcgccctgtgtgtaaccttgaaaaccatgaataatgttcttgtgaaggggaggaacactccccgacatgtcgtgttgtgttggtggaagcntttatctcccaacctgtgtgcataggcggagggcgttaatcngc

SEQ ID NO: 100813 - DNA, 941 bp, Oryza sativa
  unsure (1)..(941): unsure at all n locations
  Clone ID: PAT_MRT4530_98493C.1
ggtctagcgagggcttcagctccactcccacaggcagctcaactgaggtataagccaaacgtcttctccttctgaattctttatcttcaagaaaaacattgctcaactcgcccataaccgcgggcacggctattcgaatagttttactctggccagaggtgcacaactgtacccacaagacacaacccaccgacatgtcaccgcgtcatcatgtgcccatgatgcacacgtcaccatgtcgagtgattgtgacgagacccttcgcataaccctcccctaaccatccacaccacgctaaggtttcacccccacccctcaaaaggcagtgggcggtcccctcttgcgccgcggtgaatccggcagctggacaaccggacaccccggccgacccaactccatcacgcccaccctcgccaccggtgcctaggaaagggtcgagctatacttcagatcaagcagttacccactcccgcttgtggaaaaggactgccgctgacgtcagcaaagggccggcgccgacaggcgggccccacacgtcagcgagtcaaagggggagggcgctggtacacgggcccactcggcagcggctcaaggggggggcacggctggcaagcgggccccacggctccggcttcacgagccgatgtaccggccaggcccggtatcaagccggccggccggccatggtaaggcggcggcgcgggcatgcgaccgccaccgacggcgagcgncggcgcggtcggcggacgtcggcgcgatcgtctacgaccgaaagcgacagcgagcgcgcgaagagggcggcggcgcacggggaaaaaaaaagaagggaaggaaggggagggagacctcaccggaggggcggcaatggccggcggagaaaaacgagggaggcggcgaagaccggcgatgccgaggtgcggacgagcgacggcgacacctag

SEQ ID NO: 100814 - DNA, 215 bp, Oryza sativa
  Clone ID: PAT_MRT4530_98494C.1
gcatgcagcgcgcacgcgagcgcggggcccctatattgggcgccccctttttttttttttttttaatggaacgggagaaagcttatatcccaaaactataaattcccttctaccatagagacggcttccacaccggttttatggcttcacgaggtacgttaagcacccttacagcggttgactaaggctggggccaatactactagaagagtaca

SEQ ID NO: 100815 - DNA, 515 bp, Oryza sativa
  Clone ID: PAT_MRT4530_98495C.1
gggcaaccatgtaaattcccctgcataaccaaagccctagtagtaagacctgtaatgggggctataaatagcccctagggccatgtaatggggggatcccaagtaaaattctcaaattaatacactttacttcttttccaaccactgttgagtgaccacgtcttttgacgtatgcggttgtcgtttcgacaacaccaaacaagccctaaattaggttatctacccccattatagttattcttgaatcagggttgatattaagaccttgtgattactgtgattacaagatatatcataatgttaagagaatttcttcagcatccctgaatattaccaaaaattcagaggcttacttcacttcaattccaactgttgtatttctctggcctgccattgagaatttaagctttcgtttaatgccatttgatagcttgttcctaactttatgtattcctcccattaactttattggaggaatgatttttccctttttttgcaatgggtgaaactagcct

SEQ ID NO: 100816 - DNA, 2199 bp, Oryza sativa
  Clone ID: PAT_MRT4530_98496C.1
ccacgcgtccgatgccgactatcacacgcgtaagtatcttccttattgcagggagatggtcactctttactttgaggtttggctgcgggtcgtcaccccacagaagagtttcagagatactttggtggaagtccacaacctgaacatggttccttcacggcaaagaccaattgaagtattcactggagaatgattgtcaatacatggaaaatgagtttcatatttgcacggcaagtgttaccagtgaaatcacggagggtaaagctctggagctgattgcagaggcgagttgaaaatcggacccagtacacccaaagttctatgagctgttacatccgaaggaagatagatattgccccagctattggactggcttccacagaacggaactgaagcagcttgatgcacttaaaatattattatttttaaagaggacttgtatctttatccgaagaagatgtcgtctccagagatatatttccatgttcctgatcataagtatcggggatttttttttctttaccgaacaaaattggcttccaagacaatagaacataaggaggagggacttacatacattgacaagctgcctgtgtaaccttacttcctggcttccaccgatcgggccggcgctcaggcctctgccctctattttcagcatgcgcgctatcgcgtcagatactataagcacttgtcacaacaacctaatactgagttggtagaggattcttaccacatgaaacttgttggggaagatgaactctccgatgagtttattcgcgagatggaattttttatgcgtttcgaggaagatggcacatttgattggtatttctaccctgattactgctggcttgctgctctgaacgactaccaacgtctagtaccgataaactgtgttggtgaggagtacgcttattgggacgactaccgcggctattttaatagctatcatactgaattgcaatatctcgacttctgcaaggcattgtcgaaggaacttaagtggatggaagactatgtcctgaataaactgccatcttctaagtgggggaagaatatgcagcagaggagcctacccaagcaattaagattgcccacccgcttttccaaagatcactgctgctttggcctataatgccctactatgattgtttacagcacatgcgcttttatgttgcttattgcaaggacatggatagcttgtactttgagatttggcagcgggtcaacatgcaaaaaaagagtttcagagattctttggaggaagtctacaacctcaacaagttcccttcacggcaagataaaatgaaggatgcattggagaataactgttcccacatggaaactgtgtttcatgtttgcacggcaagtgttaccagtgaaattgcggaggataaagctctggagctgattgcaaaggcagttgaaagtcggatgaacaaagcaaaattctacgagcagtatatcgaaaagaagatagatattgcccaagctattggattgatttccacggatgggactgaagcaacatgatgtgcttaacttatagtgtttttttttgggagggcttagcttacctttctttttatatcagtatcagtagatgtcgatgccccgccagcgcctgcagaaataaagatcccgaaccaatgtttttttagctgttatgattaattcggtttccaggctccggcccgatcgaaagcattgtaattgataatgttatgtgcgatacatttagcgtacgttgcaatcgtgcctcggagtgattcgacttgctgattcggaagatgaagtttttttttttgcatgaaattgggctatccaattagcttgttgtttgctttgtggtcgacatggatgaatgtgattgtatatagaggctcacaaccgtgtctttgtgctaactgccctagctagattatgcaagttgatatcagcaatttgctgctttataggacactgagaacaaaatacatctacaggagagttttttttttctttgaagtttggtcaagttttttcagttcttttttttctattaatcctgataagttgagacttcctttgaaattgaggaattgcatataagatctctgtaagaactgaactagctctgtgagaagtgttataaaattcttcgttccaaatgagtgctgggctccatatatatatcataaaatttgatgatttgac

SEQ ID NO: 100817 - DNA, 318 bp, Oryza sativa
  Clone ID: PAT_MRT4530_98497C.1
tatgtagggatgaaaacggagcggatagtttccgtccgctccgaataaaaacgaatgcggatacctttcggatcggatagttcggatacggatattttctctcgaatacgaatatgaatatggtatcagggtttccgttggatacggataataataacgatatccgaaaaatttgtttccgtattcgtgtccgatcatattcgattcttatttgtattcgagatagtccgtatttgtttccgtattcgagctatccgtattcgtttccgtatccggccaaaaatatgaaaacgaatatggtatgagcattatccgtcc

SEQ ID NO: 100818 - DNA, 408 bp, Oryza sativa
  Clone ID: PAT_MRT4530_98498C.1
tcggatgtgagggcaaaggtcgtcgccgccgccgccgcggccttgggcggcgtttggtctcgtcgccttccggaccacccgcactagcccttctcgctcctggcgcgcgcacgcgccacacggccgacgacgactagcaggattggagggccgacgccgacgcggccggtcttcttacgggtgccgtcgtgtctgcggcggctgtgccgatatccatctcacgagcagagcaggagtagggagcaggagcaggggaggggggcgccgtcgtctggcgtgagtcccgaactctagcacatgatgtgctagagaagagatacatatgctagcgctgaactctgatctgagatggaggaagattctggtagatcaatatcaacgactgtgactattagaagaggctctagc

SEQ ID NO: 100819 - DNA, 471 bp, Oryza sativa
  Clone ID: PAT_MRT4530_98499C.1
acgcccacgcgtccggccgccgccgccgccgccatggccacctccacctccgccgccaccgcccccctcacctgccaccacctcggcctccgcctccgccctagactaccctccctccccctccgccccctctacccctccccctccctctccctaacaagaccaaacccactcaccccttcaacacctccacgccaccgagaacttcatgaatccgactccgcagcaccagaggaaccgccgtagaaagcgtcaaagccggagcttcagggggcggcaaataaaacggaggtggaaaccatagagaccagtgagcagatatagatggacccaacgaccgagggcgtggtgaacagcgagtggaagatgctgtacatcttgcacgccaccatcgtcagcatcattaccaagactatctacgctcggagccgtcgagctgatcggcactagcgccggcgtgatcaagaagac

SEQ ID NO: 100820 - DNA, 399 bp, Oryza sativa
  Clone ID: PAT_MRT4530_9849C.1
atggtggcggagacaacagcactccggcgtgcatggggagcgggaggagcggcggcggcggcggcggcgacacggtgcacgcgggaagcaggaggagcagcagcggcggcggtattcagcggcaacggcgacacggcgcgcgcggggagcaggagcagccgccgccggcgaagacgggcgcggagggggatgcgccgcctcgtcctcgccgctcgccgacgccgccttgtccctctcgccactcgtcggcgcctcgccttctcctcgtcctctcgccgctcgccggcgtcgccatcggccactgtcgttcccgctgcaccaagccatctccggtcgagccactgcgccacaagcgttgccatcatcccagtagcaagcccaccgaaggaatcgagctga

SEQ ID NO: 100821 - DNA, 486 bp, Oryza sativa
  Clone ID: PAT_MRT4530_984C.1
atggaagtggcagctccggtgacgaacgcgggcgggagcacgatgggacctcagtacaagcatggagaggaggggaaaaacaaggagatggcctcaccggctctggaagagtctggtggcgcgaggagacgacgaccggtggcctgcagcgacagatcggccgacgaccacggcatggtgcttgctcggtttttaagatttgtgcgacaacgtctacaccatctgatcgagttcctcggtgcggcttcgagcgagcgtgtgccgcgcgcgtggcgacatgcggcgcagagcaggcaggtacaaggcggcacgcggctagtgcgggccaagcgcgtgcgggcgcaagcaaggcgcagggtggcgcgaggcgacgcgcgcgtagtgcgagcggtggctggaccgggtgaggctaatacgcgaacgttcgcggatcacgaacatgctcagacctttagtatcattcagttcgtgcttatatgctcttaa

SEQ ID NO: 100822 - DNA, 195 bp, Oryza sativa
  unsure (1)..(195): unsure at all n locations
  Clone ID: PAT_MRT4530_98500C.1
tgcgtgtggaatgaaatgtgtgggatggatgatatatggcacgtgacacacgaatgcggaggtgtagtgtaggaatatgtggtgcncngggatgtgctacaccctgcccccctgtgccttgcaatgtgtgctggaacccctgtgtgggtntgctgggtggtggactgctgtgtggtgatggtgaacctatggaac

SEQ ID NO: 100823 - DNA, 411 bp, Oryza sativa
  Clone ID: PAT_MRT4530_98501C.1
atggggattcctaaatatttcatagctcagaagggtggcctcggcagtgctcggcggcgatggatcaagtcaaccgcgagtgaatctagtggtggcgtgcgagcggatccagatggcaccggcagatcttgggcagggctcagtgcagcggattcagacgacagtgacgaatgcgaggcggtgacgggtggatctaggacggcgctcagtggtggaggatccaggcggcctgcgggcaagtccaggcggcagtctgtggatctaaggcgtggctcaacatttgtgctcggcggcggcggggcttggtgtggtggatctagacggcgatacgcgggtgaatctaggaggcagcaggtgggtctgtggcaacagcgggcagatcctgatcatcagtgggcggatctaagatag

SEQ ID NO: 100824 - DNA, 372 bp, Oryza sativa
  Clone ID: PAT_MRT4530_98502C.1
gttatgagaaaaaaaaagacaggtccattttgttaaaacaccaattgtttacaagaaaaacaatgttttggaactttttaaaatactttgaaaaaggggtaaaaggggatccctttaatcgtaccccggaagttaacatgggcaaacaagaaaatctttttggaattaaaaaggggggctattttcttaaactttaaatggttaaaattctatgggacaaacctctttgaacctttttcccgttaaaaaccccggggagttttgcaaaaagccacaacccccccctttaaaaaccttttttgaaaaaaaggggggggaggaaaaaaaaaactattttttaagggggatttttgttaaaaaccctttaccctt

SEQ ID NO: 100825 - DNA, 1386 bp, Oryza sativa
  Clone ID: PAT_MRT4530_98503C.1
atgaccacgtgggaccttctcgagtctacgacgttaatccgtcaggcttttgttgcttgctgctgctgctgcggtggcgggtggggaggaaggatgctgattgcggctgatttcccgggagattcgacggtgtcccgatgcgcattccccggcggcattgcgctccggctcttcgtggactggaggatccggcgccggagggtctgcgcatgcaagatgttcgacactggttcccaaaggggtagggtgaagcagctggtggcttttgccaagaagaggaggcggcccaagaagcagccgtcgcggcggccatggtggaaggcgtggttctcggactggaacgacgaggaggagagcttgtctggctggagggaggatgaggagctgctcgaggaggttggcggcgaggaagggctgtcggacgacgagaagtttgagacgtggaagaggaaggccgaggctattgtcgagctgcgggaggcgcggcaggatgccatgaacgcggaagggcgctcgtgggaggattggattggcgggggcagtagcacagcgggggatggcggcggtgactggggtggggatttggatgtgtcagacctgataacggatgatcctacagagatagtgagggataaaggtttgattgaaactttcagagactctgtagatgaagattacaatgacatgctgtttgaagaccgggtttttctgtatgcttcaacgaattcggccaaatttctagcattattgattgtgattccatgggtgttggattttctggttcatgactatgttctgatgccatttttggaaaggtacgtccagaaggtaccacttgctgctgagctgcttgatgtaaggcgcagccagaaactcctgatggtaaaggacataaatactgagaaagcaagatatcgttttgaagtagagattggtaaatctcctccactttctgatgatgagctctggatagagttgagagatgaatggagattagaaaaccgaaaagcgtttgcaaatatctggtctgacatggtttatggaatttccctattccttcttatgtacttcaaccagagtaaagttgcgatgctgaaattcacaggatataagttactaaataatatttcagacagtgggaaagcattccttataattctagtttcagacatccttctagggtaccattcagagtcaggttggcattctttggtagaagtcattctcgagcactacggccttgaagccgatcaagctgcaatcaccttctttgtttgtctggttcctgttgccttggatgtatttataaaattttgggtatacaaataccttccaagattatcacctagtgtgggtaacattttggatgaaataaagcgtcattag

SEQ ID NO: 100826 - DNA, 1368 bp, Oryza sativa
  Clone ID: PAT_MRT4530_98504C.1
atgggcaagaagcccggcggcgccggcgccggcgccggctggctggccaccgtcaggaaggtcttcaagccggggacctccaaggaccctcgcctcgccaagaagaggggaggagacgagaatgctgcgggaggaggcggcggcggcgtcggccaggcggtggagatactctcgatggagcacttcccggccgccgagacgtcgccggaggtgacgacgaatgaaggaagcggcggatccgccttcggcagggagcggctgcacgtcggccgtgacgaggcggagggcgcctggagggcccgccgcggcatggcggcgtcgagggcggtgaggaacgcggccgcgcgcgggagggcggccggcagggaggagcgcgccgccgtgcgcatccaggcgttctacagaggatacttggcgctggtccgcggccaccaggtgcggcgacaggtccacctcaccatgcgctgcatgcaggcgctcgtccgcgcgcaggcccgcgtccgcgcccgccgcctcacctcccatgtcgccctcgcccgcccagccccgcacgccgccggtctgcagtactcgtgcggccaccgcggccgcttcgtggcgccggaccagcagaacgacggcgacgaggacgacgccggcgagacggagacgacgatgccgcacatggtcgcgcgaccaaggaggaacagcagccacatcgtcgacgagcgccctcctttcaacagcggttggcgggacgccgtcccctacggcgaaggccgccgccggcacgacccggggcctcggcgcgagatggccccgatcccgacctccacgtatggttaccagcagcagcgggaggagcaagacgagtgcaccgttggttggcagtggctggagcaatgcatggccggtgtccagccgccgcgccacgtcccggagcaccacgttgtcgtcgccgccgcggcggagacgtcgtacgtgacggcggcggccacggacggggtgtcggagaagaccgtggagatggacgccgggaggaagctgtgccccgccaaggacctctacccggtgcgccctccggctgtcccggggtacatggcggcgacgcagtccgcgcgcgccaaggcccgcatggcgcccgcgtccgcccatgtcgccccgagggcggcgcagtcgcacgcccggagccggtccagctcggtggcgctcgccggtgcctcgacggccacctcaggctggagcacgaacaacaactgcagcggcggagccggcggccgcgcgccactccatagagctgggtatagcccagagtcgagctgcagcggcgaccggacaccgccaccgccaccacagggcggcggccgcggcagggcggcttatgcttga

SEQ ID NO: 100827 - DNA, 403 bp, Oryza sativa
  Clone ID: PAT_MRT4530_98505C.1
ggccccccacgcgtacgccacgtagaccaaaccccccgcgaattaggtcaagggggtaattcgtccggtttgcatagttgggggtgaagaatgtccggttttgtggttcaggggagtaatcaggacgaccgctatggtcctataggctcttgctatcctgtaaccgctggtgtattaatcgccaaggaacttgagcaggctgtaacggcaaaggtatttgggttaagcaattgcaggagttcaacgagtcactttggttcgtagttcgtggagtatttatgttcctacggaatcacacaatttctgctgcgcagtgaagctattcgatgagtttcagcctattggtctgcatcaagacattcagggccctccctttccccgccaggaagtcgtccccggccac

SEQ ID NO: 100828 - DNA, 494 bp, Oryza sativa
  Clone ID: PAT_MRT4530_98506C.1
gatctgctgaggggcacacgatcgcgggccgcatcaagatcgatgttgcaaagggctttggtcttccagccaagacatcaaacacaaaagtgatacttaacggtggtcagagggttacatttgccaggccagatggctactttgcattccacaatgtgccagctggtactcatttaattgaggtctcctcattgggctacttattttcaccagttcgggtagacatcagtgccaggaatcctgggcacattcaagcagcattgactgaaaacagaagagttctaaatgagcttgtaagggagcctttctccattatgtcacttttgaagagccctatgggtatgatgcttggttttatggtcataatggtcttcgttatgcccaaaatgatggagaacatagatcccgaggagataaagcaagctcaagaacaaatgaggaactcccctgttccatccttctctggcctattagcaagagcaaacagctagaca

SEQ ID NO: 100829 - DNA, 238 bp, Oryza sativa
  unsure (1)..(238): unsure at all n locations
  Clone ID: PAT_MRT4530_98507C.1
ggccgccgccggtcgccccngcacgtgtgncctccgccgccgcgagccgccgcgccgggcgggcggcgccctcattgtcgacgacgtccgccgcgaaccgcacccncctcccgcnccnccgcctccgcctcnctgcacngcacacacaaaccaccgtgagaaatccatccacgcatgtcgtcgtcgaggaatcgaatcgaatcgaagggatccggtgacgaacccacccacctgaaga

SEQ ID NO: 100830 - DNA, 1093 bp, Oryza sativa
  Clone ID: PAT_MRT4530_98508C.1
agaataccaaaccaaatccaccaaggcccgggccggccggctctcgcctcgcctcgcctcgcctcgtctagttgagcagccgcgacgagcacggcggcgacgacgacctccgccgcgacgatggccgcgcgcctcctcctcctcgtacttttcgccgtcgtggcagcgcgcgtaggcgcagcggcggcctatcagcccggatctgctgaggggcacacgatcgcgggccgcatcaagatcgatgctgcaagtgcaattgcaaagggctttggtcttccagccaagacatcaaacacaaaagtgatacttaacggtggtcagagggttacatttgccaggccagatggctactttgcattccacaatgtgccagctggtactcatttaattgaggtctcctcattgggctacttattttcaccagttcgggtagacatcagtgccaggaatcctgggcacattcaagcagcattgactgaaaacagaagagttctaaatgagcttgtgttggaacctctcagagaagagcaatactacgagaaaagggagcctttctccattatgtcacttttgaagagccctatgggtatgatgcttggttttatggtcataatggtcttcgttatgcccaaaatgatggagaacatagatcccgaggagataaagcaagctcaagaacaaatgaggaactcccctgttccatccttctctggcctattagcaagagcaaacagctagacatactacacggggatactgcatggtttaagttaagtttatgatgggatgaagagcagtactgaacaccacacttgaatagaatctttccctagcacaaggtggaaactctttctccatttttattgtactttaagatgtaataggtttgtgggggtagaaccttctgaatctaactgaagtagcgatgcattattgaattattatagcccagactgagttaagtgtgttgaattttggatgttcgtatatttcacgccttgttgaatcaactatagctatactcatacttgatgttgaactgctattagtcacatgacgttaagaaaaaaaaaaaaaaaaaaaatttgcggcc

SEQ ID NO: 100831 - DNA, 682 bp, Oryza sativa
  Clone ID: PAT_MRT4530_98509C.1
gccgggttggaagaaggggatgaaggtgacgttcgaggggatgggcgacgagcggccgggctgcctcccaggcgacgccgtgttcaccatctcggagaggaagcacaaggtgttcaagaggaaaggcaacgacctggtgctcaaggccgaggtgccgctggtgagcgcgctcaccggctggtccttctccttccggctgatcggcggcgagaagatgagcttcacgttccgcgacgaggtcatctcccccggctacgagaaggtcgtcgccggcgagggcatgcccgtcgtcgccgccggcggcggcggcgagaaggccgccgccgcgcgcggcgacctccgggtgaagttcgacgtcgtcttccccaagaacctcaccggcgagcagcgcgccggcctcgccagcatcctcagagcctgtccgtgatcgaattaccacacgtatagtagtatacatttttacaagttttttttttttgtttctactcgtgtagaaaattttggtttcattttttggtgttgatatactagcgatggatcgatcgatcgatcaccctgcaggtgagtacataaagatcgagtatgagatctgagcgaccgttttgacgcatatacgtatataaatacgggatggttgttgcaagaaaaaaaaaaaaaaaaacctgcagcccggggatccact

SEQ ID NO: 100832 - DNA, 327 bp, Oryza sativa
  Clone ID: PAT_MRT4530_9850C.1
atgggcgacggggcgcgcgggcgttgcggccgggccaccgacggcaacccggcccccgtgggggtggggcggccctgggtcacgcgcgcgtcgcgcgggaagcgcgtggggcggatggctgttcagctgttggcgctgtcgtgttgctggtgggggaggaccggcggtgatccgggccagggcccagggggcaaggggagtttcagtttggcgccaagtgagggcccgttacgaattgtggatattagattttacagggctgaattattttgcggattatctgtatcatttttgcttagccacttgttctggtatttgttaggttga

SEQ ID NO: 100833 - DNA, 731 bp, Oryza sativa
  unsure (1)..(731): unsure at all n locations
  Clone ID: PAT_MRT4530_98510C.1
ccggccgggaggctgacgacgggccaagaagccgaatcccacactgcccgtggccatggcgctgctcctctccccgaccgtctccttcctcgcctcctcctccgcctccccgcctcgcgccagagctctccccgcctccgccaatgtcgcctccaccatccccgccccaaggctccagtgcaagaatctctcctcgcagagccctctgaatgcttctttcaccaagaagaggctagtttctgtccatgcctcggcagaggctggcgcagaagaagctggcacagatcaaccagaggagccaaaacccacggtttcgattgagacaatgccgctcgaaactaagcagaagatgatcatggagcagagggcgaagatgaagctggccaagaagctgaggcagcggcgcaggaggcttgtccagaagaggcggctgaggaagaaaggtagatggccaccatccaagatgaagaagctcaagaacgtctaaccagcagtgatgtcggtcgctgttcttctgtacacctctatgttctgttcatccgtctctgtatttcctaagctgatgcccagcgaattttgctgttcaaaatatgaaacacaatgtttgcaaaatgtgattatttctttcccgatgaaatttaatcttgaattttttagataatggatacattgagcaccctgcaccccgctcaaagcccagtactgaaaaaaaaaaaaaaaaattnaaaaaa

SEQ ID NO: 100834 - DNA, 1205 bp, Oryza sativa
  Clone ID: PAT_MRT4530_98511C.1
tgtagggatgaaaacggagcggatagtttccgtccgctccggataaaaacgaatacggatacatctcggatcggataattctcggatagttcggatacggatacgaatacagatattttctcttgggtacgaatacgaatatgaagttgaattggttttcgtgttccgagaaaaatttgtttccgtattcgtgtccgatcatattcgattcttattcgtattcgagataatccgtatttgtttccgtattcaagctatccgtattcgttttcgtatccggtaaaaaatatgaaaacgaatatagtatgagcattaaacgtccgtatccgctccgttttcatccctaataaccgcgggcacggctattcgaatagttttactatggccagaggtgtacaactgtacccacaagacacgattccacacatgtcgccatgccccgaagtatcaccatgatactgcaaagggggaaatcgtgacaagaccctccgcataaccctcccctaaccatccacaccacgctaaggtttcacccccacccctcaaaaggcagtgggcggtcccctcttgcgccgcggtgaatccggcagctggacaaccggacaccccggccgacccaactccatcacgcccaccctcgccaccggtgcctaggaaagggtcgagctatacttcagatcaagcagttacccattcccgcttgtggtaagcacgggggggggcggcccgacatgcgggccccactggcagcggcacaaggggagagggagggggcggctggcaggtgggccccaccaggcggtggctcaaaggggaggcgagggaggcgccggccgggctcggctcggcctcaaagccgaccggcggccatggcgaccggcggcgacacgcgcggtcaccggcggtgaccggcggcgcgggagacggcggcggccagtgcgaaggcggcggcggcggccgaagatgacggcacacgcgcggagggcggcggcgctcatgggagggagggaaggaaggaggaggagaggggattcctcaccggcgaacacggcggccggcgcgaaggaagaaaacggcggcgacgaccggtgatgccgaggcgcgaacgggcggcggcggcaccctaggagagagcatagaggggttagggaagggaaggcgaccatggcggcttgaattgccggccggagacggaggggagagag

SEQ ID NO: 100835 - DNA, 1150 bp, Oryza sativa
  Clone ID: PAT_MRT4530_98512C.1
atggtagcgccgcaggctctgctggtagcgcgcggctcggagggccgcgcgccttcttcgctcttccaagtagtcgaggtcatctctgcgaagctgatcttgatcagcttcgcagtacatggtggcccgaggagacctcagggtgagctcggatgggagaaccgcttctgcgccgtagacgaggaagaagggcgtttccccgcgggcgactccactccacaggcaatccttgacggcagcgacgaaaccaactttgacaaaacagctccaactaggaagatcttcagctctgggctgacgtcagcgaggggaggggcgggcgccgacaggcgggccccactggtcagcgacactaagagagggaaaggagggtggctggcaagcgggccgtactggcagcggcacaaggggaaaggagagggaggcgccggcatgtgggccccacgggcagtggctcaagggggagggagtgggcggcggcatgctcggcacggctcaagccggccggccatggcgaggcgacgacggcgcacgaccgccggcggtgaccggcggcgcggggagacggcggcggccggcgcgaaggcggcggcggcagccgaagacgacggcgcacgcgcggagggcggcggcgctcacgggggagaggaaaggaaggaggaaaagggattcctcaccgaggcgatggcggcgaccggcgtgggaagagacgagcggcgatgaccggcgacgcggaggcacggacgggcggcggcgacaccctaggagaagatggagaggcgttaggagaggagacgacgaccacggcggcttgaattgccggccggagatggaggggagggaaaaactcaccggctcgcgaggggagaggtgctccggtgggattccggcgacgcgaggcggcggccgggaaagctcttgcggcggcgaagctaacggcggcggcggtttggcgcggcggcgactctagcggcggcggctcgcggccgaaggcggcggcaagcggcggcactagcaacaagcggcgcgagcgcgataggaggcacgggagagcgcggcgagtgcgaaaaacgagagaggaagacgcggggagcgatttataggtgcgggagggggcggacgtggccggggaggtggccgatttggccgg

SEQ ID NO: 100836 - DNA, 10188 bp, Oryza sativa
  Clone ID: PAT_MRT4530_98513C.1
atggtgaacactcgtagcaatgggaatggtcccaacaaccccaataacaacaacaatggagagaatcccactctggcccaagttcttgctcaacagacacagcttatgaacatgatgatgcagcaatttcagaatcagcaaaaccaagggaataatcatgcacctccacagaacaagttagcagaatttcttcgtgtgaggccgcctgttttctctagtaccactaatcctgttgaagctagtgattggctgcatgccatagagaagaagttggatttacttcagtgtactgatcaggagaaggtctcatttgcatcacatcagttgcatggccctgcctctgaatggtgggatcatttccgccttaacaggactactgctgaacctatcacttggcttgaattcaccgctgctttccggaagacgcatataccatcgggagtagtgtctctcaagaagaaggagttcaggtcgctttcccagggatctcgctctgttacggagtatctgcacgagttcaatcgtcttgctcgttatgctccggaagatgtgcgcaatgatgaagagcgccaggagaagtttttgggaggacttaatgatgagctttcttacccactcatggttggagattatcctgatttccagaaattagtggataaggctattcgtcaggaggacaagtacaatcgcatggagcagaagaaacgtcggattgctcaattcaagacacaacagggaaataatcagaagccgcgtcttactttaggaccccagcccatgccacagggaggttcttcgtctgttgttcgtccgcaacgtcagttcttcaacaacaatgctggcaacaacatccgtaatcaagctccacgtcctgttgcagctccagcacagcaacaacctgccaagagggagcaaggcaacaagcccgtggtgtgtttcaactgtggagatccaggacattatgctgacaagtgtccgaagccccgacgcgtgaaggttgtctctgctcaaagtaactctgctgtaccagcatcaaaggcccgtgtcaatcatgttgctgctgcagaagctcaagatgctccagatgtgattttgggtacgttccttgttaactcagttcctgcaacagtacttttcgattctggtgctacacattcattcttatctatgagttttgcgggaaatcatgggatggaagtagaagatcttagacgtcctttgatggttagtactccaagtaatcaagcactctctttgcaacgtagcccctctgtcagaatagaaattcaaggagtaccatttctggccaatcttatcttgttagaatccaaagaccttgatgtcatcctagggatggactggttagccagacataaaggtgtgatagactgtgccaacagaaaagtaactctcaacagctatgatggtcgagttgtaactgttcatgcattgtcatctgagtctttaaggtcaagactgaaccagataactttggaagagattcctatagtccgggagtatcctgatgtgttcccagatgatttacctggtatgccgcctaaaagggatatagagttcagaatagatttggtacctggaacaactccgatccataagagaccttatcgaatggcagccaatgagttggcagaagttaagaggcaagtagatgatttgctacagaaaggatacatcagaccgagttcatcaccatggggagctccggttatttttgtggaaaagaaagaccatacccagagaatgtgtgtggactatcgtgcactaaacgatgtgactatcaagaataagtatccactacccaggattgatgatttgtttgatcagcttaaaggtgccactgttttctccaagatagatcttcgatcagggtatcatcagttgagaatcaaagaggaagatatacctaagacagcttttaccactaggtatgggttgttcgaatgtactgttatgtcttttggacttaccaatgcccctgctttcttcatgaacttgatgaataaggtgtttatggaatacttagacaagttcgtggtggtctttattgatgatattcttatctactctcgaaccaaagaagagcatgaggaacttcttcgccttgcattggagaagctacgagaacatcaactgtttatagagaatttttccaagattgctaagcccatgacacgactgcttcagaaagatgtgaagtacaagtggtcggaagaatgtgaacagagttttcaagaattgaaaagtcgcttaatatcagctcctattttgattttgcctgatccaaagaagggttttcaagtgtattgtgatgcatccaaacttgggttaggttgtgttctgatgcaagatgggaaggtggttgcctatgcctctcgacagttacgtccgcatgagaagaactaccctactcatgatattgagttagctgcagtcgttcatgcattgaagatttggcgtcattatcttttcggtactcatacagaagtgtacaccgatcacaagagtttaaagtatatctttactcagccggatctgaacatgagacaacggagatggttggaattaattaaggattatgacatgggaattcattatcatccgggaaaggctaatgttgtagcagacgctcttagcagaaaaggccattgcaatgctacagaaggacgacagttgccattggaattatgtaaggaatttgaaagattaaatttgggaattgtcggtagaggtttcgttgcagccttagaagcgaagcccactctaattgatcaagttagagaagcccaaattaatgatcctgatattcaagagatcaagaagaatatgagaagaggaaaagctattggtttcttggaggatgagcaaggaactgtatggttgggtgagagaatctgtgtccccgacaacaaagatctaaaagatgcaattctgaaagaagctcatgatactttatactccattcaccctggtagtactaagatgtaccaggatcttaaggaaagattttggtgggcaagtatgaagcgtgaaatcgcagaatacgtagcagtatgtgatgtttgtcagcgagtcaaggcagaacatcagaaacccgccggtttgttgcaacctttgaagattcctgaatggaaatgggaagaaattggtatggattttattactggtttacccagaacgtcatcaggccatgactctatttgggtgatagtcgacagacttaccaaagtggctcatttcattccggtaaagacaacttattccggaagtcgcttagcggaattgtatatggcaaggattgtgtgtttgcatggcgtccctaagaagatagtgtctgatcgaggcagtcagtttacttcaaatttttggaagaaacttcaggaagagatgggttctaagctgaactttagtactgcttatcatccgcagacagacggacaaaccgaaagggtgaatcaaattttggaagacatgttgagagcttgtgctctagatttcagtggaagttgggataagaatctaccctatgcagaattttcatacaacaacagttatcaagctagtctacagatggctccgtacgaagcactgtatggtcgaaagtgccgcactccgcttttgtgggatcaaacgggagaacgtcaggttttcggaacggatatcctaagggaagcagaagaaaaggtaaagatcattcaagaaagattgcgagtggctcagtctcgacataagagttatgccgacaatcgccgtagagatttgagttttgaagaaggagactatgtgtatcttcgtgtcacgccttttcgaggagttcatcgttttcataccaaggaaaaattggcaccgcgttttgtgggaccttataagattgtcagtagaagaggagaggttgcttatcagttggagttacctcaatctttggcaggaatccataatgtgttccatgtgtcacaattgaaaaagtgtttaagggtacctaccgaagaagctaatattgagcagatagaagtccaagaggatttgacttatgttgagaaaccaatccgtatcctggaaacaactcctggtttggaatggtacattcctagtttggagatagaactgtgcagccggggtggttgttcagaatggttgggcctatacaacaggggttcacacacatgtaagcgtttggaattttggatagaaattccgggcgtgacaggcaagatctctctccttgactcggtgtcagaccagtcgggagagaaccggatttcagccccgtttggactcccaaacgcggctgaaagttacttcaagaccatctcaatcgagttggcttcaaaccactcgggtgagatcgcatcttctccaacgtcaccagatcaagatgatggggcttacccaccgatcctgatgaagctccccgacgatttggcggccgtctccatcacgacagcgtctccatcccgtaggcctaggcggaagtcggcttcaacaccgacttcgcctagcttcagggaagtcggcgtcatcctccaaccactcggcacggtttcgacggatcagctggatggctactacagctctcccaccgtcgactcgcgccccaccgacatcgtggagtacgacgagtttagctctcgctacaacgacccggatctcgacgacttcgacggaagcctagatgacaactacacccctctctacttcggcgtcttcatggctgataacgagacggaggagcaacgccaagcccgggagaccgaagcacgtcgcgagactgaacgtcgccgactggaggaggagcatcaagcacaagaacaagaacggctacggcgtgagcagcaggagcgtgagcggaccgcgaaggaggctgaggatcgacggcagcgagctttggaagcagggcgccgagcgcgtgatctcatcggccaacaagatgttgaagggacaccggttttccgcacccctcagcagaatgcggttgccgcgatcaccctcctcgacaccctcctcaaggaaaacgagctcaatcaatctgatcacgtcgtcaacatcttgaaccagacgaagaccatgattgcggcttcggtcccagttaactccgaaagcgtccacacgccgactggcagccgagtcccccacttccgatctcatgactaccgtcatccaagcctcagcatcaccggcgcaggatccaatcgcaggagcaggggtcacgacgagcggtccgttcactcacctcccgaccatcatagggagcgccgagtggaacggcctcgctcaccacctcgtcgccgccccgtcgatcttcgcgacacaatcatacagcgccgagcagctcgaggccatcatcattcgccggaccgccacgacgacgaccttgacggagtagcagccttcaccgacgacctgcgtcgagtggattggccagccggcttcaagccgactggaatagagaagtatgacggtaccactaacccagaatcgtggcttaccgtctacggtctcgcaatccgcgcagcaggaggagacagcaaggccatggcgaactatttaccagtggctttagcggattccgcccgatcttggctccatggattgccccgtggtacaattggatcttgggctgaattacgcgaccacttcatcgccaactttcaaggcaccttcgagcgtcccggcacacaatacgacctctacaacgttattcagaagtccggagaatcccttcgagattacatccgacgattttccgaacaacgtaacaagatctccgacatcaccgacgacgttatcatcgccgcattcaccaaagggattcgccacgaagaattggtcggcaagttcgggcgtaagcctcccaggacagtcaagcttatgtttgaaaaagccaacgagtacgccaaggccgaagacgccgtcaccgcatcaaagcagtcaggtcccagttggaagccaaacaagggtacgccggctaagggaggaggtggaagtaacaatcataaggaccgcaagcgtaagcctgaggaacttgttgcaaccgccactcactcttctcgacagcgttcgcgcgtcaacacgttcgacaagatcatgaactcccaatgcccgcaccatcctaactccaaccacgtggccaaagattgtttcgtctacaagcagtttgcggagcaatacaccaagactacacggaagaactccgacgaagaacaaagtacgtcgaggaagaaggacgacggcgacaccccggcaggatttcaagaccaccgcaaggagctcaaccatatcttcggcggccccctggcttatgagtctaaaaggaagcaaaagttgactgaacgggagatcaatgctgttcagcccgacacgccccagtatcttcgatggtcagaaattgcaatcaagtttgaccgctcggatcatcctgaccgagtggtccacccggggcggtaccccctggtactagacccagtggtccgtaatgtcaagcttcgcagaaccctcatcgacggcggcagtgcactcaatatcctcttcgccaagaccttggatgatatgcagattcctcgctccgagctaaaaccaagcaatgcgccttttcacggagtaattccaggattatccgcaactccactcggccagatcaccctcccggtcacttttggcactcgggaaaacttccgcacagagaatatcagctttgaagtcgccgatttcgagacaacataccatgccatactcggacgcccggcgttagccaagtttatggccgtcccgcactacacttacatgatgatgaagatgcctggtccccgaggagtcctatccctacggagcgacatcaagcaagccgtcacatgcgacaaggagagttgcgacatggcccaaacccgcgagatggcgtcagcccgagaggatatccgactggctgcagccacggcgagcgaaggagaagtgcccgctaccaagatttcaaaaagtggagaaagcgaagccaagactaaaaagattcccttagatccttctgattctactaaaactgctaacaataaagatatctttgcgtggaaaccatctgatatgcccggtattcctagagaggtgattgagcactccttatatgtcaaagaagatgccaagcctatcaaacaacgactccgccgattcgcacaagacagaaaagacgcgatcaaggaggaattaaccaagctgttagcagcaggcttcattaaagaagtccttcatcccgactggctggcaaacccggttctagttcggaagaaaacggggcaatggcgcatgtgtgttgattatactgacctcaacaaatcttgccctaaagatccttttgggttgcctcgcattgaccaggtagtcgactcgaccgccggctgtgagcttctcagttttttggactgctactcggggtatcatcagatccgactgaaggaatccgactgcttgaagacttcattcatcacgccctttggagcatactgctatgtcaccatgccgtttggactaaaaaacgcaggagcaacttatcaacgtatgatccagagatgcttctcaacgcagatcggccgcaacgttgaagcctatgtggatgatgtagttgtcaagaccaagcaaaaggatgatttgatctcggatctagaagaaaccttcgcgagcatccgcgctttcaggatgaaattaaaccctgaaaagtgcaccttcggagtaccgtcagggaagctgcttggttttatggtgtctcataggggcatccaagccaacccggagaaaattactgctatcctcaacatgaaaccgccaagtacccagaaagatgttcagaagctgactggatgcatggcggcgctcagccgatttgtttcaagacttggcgagcgggggatgcccttctttaagctactaaagaaaacagacgacttccagtggggacccgatgcacagaaggccttcgaagatttcaagaaactcctcaccgagccaccggtcttagcctcaccacacccgcaggagccgttgttgttgtatatagcagccgcctcccaggttgtgagcacagtcttggtcgttgagcgcgaggaagaaggccatgtccagaaagtccagcgaccgatttactttgtcagcgaggtcctagccgactccaaaacgaggtaccctcaggttcagaagctgttatatggtattctaattactaccaggaagctatctcactactttcaaggtcactcggtaacggtggtcacatcatttccactcggtgatatactgcacaaccgcgaagcaaacgggcggattgctaagtgggctttggagttgatgtctttggacatatcattcaagccccgaatttcaattaagtcccaagcgttagctgattttgtcgccgaatggaccgagtgccaggaggatacccccgcggagaagatggagcactggaccatgcattttgacggatcaaaacgactttcgggcactggagcaggagtggttttgatttccccaactggagaaagattaagctatgtgctttggatacatttttcggcatcccacaacgtcgccgagtatgaggcgctccttcatggactgcggattgcaatttccctaggaataaagcgtctaatagttcgaggcgattcacagctggttgtcaaccaggttatgaaagagtggtcctgccttgacgacaatatgatggcatatcgacaagaggtacgcaaattggaagacaagttcgatggactcgagcttagtcacgttcttcgacacaacaatgaagccgccgacagacttgccaactttggatccaagcgcgaggtggcgccctctgatgttttcgtcgaacacctttatacgccgaccgtacctcacaaggatactactcaagttgcgggcactcatgacgtagctctggttgaagccgattggcgagagcccctcatacgatttttgacttctcaagaactcccacaagacaaagatgaagccgagcggatttcaaggcggagcaaactttacgttatgcatgaagctgagttgtacaagaaaagcccttcagggattctgcaacgctgcgtatctttagaggaagggaggcaattgctgaaagacatacattctgggatatgcggaaaccatgctgccgcacgcaccattgtcggcaaagcttaccggcagggttttttctggcccactgcagtgtccgacgccgacaaaattgtgcgcacgtgcgaaggttgccaatttttcgccagacaaattcatctaccagctcaagagttgcagaccatcccactgtcttggccgtttgcggtttgggggctcgacatggttggcccgtttaaaaaggcagtcggcggttacacgcacctttttgtggccattgacaaattctccaagtggattgaagctaaaccggttgtcacaatcacagcagataacgctcgagacttcttcatcaacattgtgcatagatttggagtgcccaatcggatcatcactgacaatggcagacaattcaccggcggagtttttaaagacttttgtgaagactttggaatcaagatttgctatgcctcagtggcacatcccatgagcaatggacaggtggagcgagccaatggcatgatacttcaagggattaaagcgcgtgtttttgaccggctaaaaccctatgccggcaaatgggtgaaacagctgccatcagtactttggtctttgcgaactacacccagtcgggccacaggccagtcaccttttttccttgtctatggggcagaagcaatgttgccgagtgaagttgaattcgagtctttgcgctttcgaaatttccgtgaagaacgctacgaagaggaccgagtggatgacttgcaccgattggaagaagtccgcgaagcagctttgattcagtcggctcgatacttacaagggctgcgacgttatcataatcgcaatgttcgatcccgtgcctttctagtcggcgacctagttttgaggaaaattcaaactacacgagatcggcacaagttatctcctctatgggaagggccatttatcatctctgaagtcacccgaccaggttcctatcgactcaagcgcgaagacggtacactcgttgacaactcttggaacattgaacatcttcgtcgtttctacgcttaa

SEQ ID NO: 100837 - DNA, 267 bp, Oryza sativa
  Clone ID: PAT_MRT4530_98514C.1
atgtcatcgtcgttgttgtcgggggcggaggtcagggagggatcggaggaggggtcgcccttgtcagagatggaggagtgcggctgccagtgggaggaagggggtgatagcgtcggcgtcgtcgtcagaggcagagggcggggaggggtcaccctcgtcagaggtggaggcacacggctgacagtgggagcaaggggcgacggtatcatatgttgtcaagggcatagggcagggaggggtcagaggaggtgtcacccttgtctgtag

SEQ ID NO: 100838 - DNA, 5895 bp, Oryza sativa
  Clone ID: PAT_MRT4530_98515C.1
atgggttccatctccggcatcgacgacctcgtcttcccacccgggcagacgtttcggttcggcagcctcgacttcatcaccaacaacttcggcaagatttctctcctcgactcggaatcagaccagtcgggagagaaccggctttcggtcccgtttggattcccgaacgcggctgaaagctatttcaagaccacctcaaccgagtcggcttcaaaccactcggccgagatcgcatcttctccaacgataccagatcaagatgatggggcttacccaccggtcctgatgaagctccccgacgatttagcggccgtcttcaccacgacagcgccttcatcccgtaggcctaggcggaagtcggcttcaacaccgatttcgcctagcttcagggaagtcggcgtcatcctccaaccactcggcacggtttcgacggatcagctggatgactacaacagctctcccaccgtcgactcacgtcctactgacatcgtggagtacgacgaatttagttctcgctacaacgacttcgacgacttcgacgacttcgacggaagcctagatgacaactacacccctctctactttggcgttttcatggccaataatgagacggaggagcaacgccaagccagggagaacgaagaacgtcgccgactggaggaggagcatcaagcgcaagaacaagaacggctacgacgtgagcagcaggaccgtgagcggaccgcgaaggaggctgaggatcgacgtcagcgagctttggaagcagggcgccgagcgcgtgatctcatcggccagcaagatgtcgaagggacaccggttttccgcacccctcaacagaatgcggttgccgcgatcacccttctcgacaccctcctcaaccaaaacgagctcaatcaatccgaccacgtcgtcaacatcttgaatcagacgaagaccatgattgcggcgacggtcccagttaactccgaaagcgtccacacgccgactggcagccgggtcccccacttccgatctcatgactaccgtcatccaagcctcagcatcactggagcaggatccaatcgcaggagcaggggccacgacgagcggtctgttcactcgcctcccgaacttcatagggagcgccgagtggaacggcctcgctcaccacctcgtcgccgccccatcgatcttcgcgacacaatcatacagcgccgagcagctcgaggccatcatcactcgccggatcgccgcgacgacgaccttgacggagttgcagccttcaccgacgacctgcgtcgagtggattggccagccggcttcaaaccgactggaatagagaagtatgacggcaccactaaccccgaatcgtggcttaccgtctacggtctcgcaatccgcgcagcaggaggagacaacaaggccatggcgaactatttaccagtggctttagcggattccgcccgatcttggctccatggattgccccgtggtacaattggatcttgggccgaactacgcgaccacttcatcgccaacttccaaggcaccttcgagcgtcccggcacacaatacgatctttacaacgtcattcaaaagtccggagaatctcttcgagattacatccggcgattttctgaacaacgtaacaagatctccgacatcaccgacgacgtcatcatcgccgcattcaccaaagggattcgccacgaagaattggtcggcaaattcgggcgcaaacctcccagaacagtcaagctcatgtttgaaaaagccaacgagtacgccaaagccgaagacgccgtcaccgcatcgaagcagtcgggtcccagttggaagccgaaaaatacgccggctacgggaggaggtggaagtaacaatcataaggaccgcaagcgtaagcctgaggaacttgttgcaaccgccgctcactcttctcgacagcgttcgcgcgtcaacaccttcgacaagatcatgaactcccaatgcccgcatcatccaaactccaaccacgtggccaaagaatgcttcatctacaagcagttcgcggagcagtacaccaagtctactcggaagaactccgacgaggaacaaagcacgtcaaggaagaaggacgacggcgacaccccggctggatttcaagaccaccgtaaggagctcaaccatattttcggcggccccatggcttatgagtctaaaaggaagcaaaagctgaccgaacgggagatcaatgctgttcagcccgacacaccccagtatcttcgatggtcagagattgcaatcaagtttgaccgctcggatcatcctgaccgagtggtccacccggggcggtaccccctggtactagacccagtggtccgtaatgtcaagcttcgcagaaccctcatcgatggcggcagtgcactcaatatcctcttcgccaagactttagatgatatgcaaatctctcgctccgagttaaaaccgagcaatgcgccttttcatggagtaattccaggattatccgcaactccactcggccagatcactctcccggtcacttttggcactcgggaaaacttccgcacagagaatatcagctttgaagttgccgatttcgagacagcataccatgccatactcggacgcccggcgttagccaagttcatggccgtcccgcactacacatacatgatgatgaagatgcctggtccccgaggagtcctaaccctacggagcgacatcaagcaagctgtcacatgcgacaaggagagttgcgacatggcccaaacccgcgagatggcgtctgcccgagaggaaatccgactggctgcaaccacagaaagcgcgctcatcacctttcttcaaaataataaagatatctttgcgtggaaaccttcggatatgcccggtattcccagagaggtgattgagcactccttacatgtcaaagaagacgccaagcctattaaacaacgactccgccgatttgcacaagacaggaaggacgcgatcaaggaggaattgaccaagctgttagcagcaggcttcatcaaagaagtccttcatcccgactggctggctaacccagtcctggttcggaaaaagacagggcaatggcgcatgtgtgtcgattacactgaccttaacaaatcttgcccaaaagatcctttcgggttgcctcgcattgaccagatccgactgaaggaatccgactgcttgaagacttcattcatcacgccttttggggcatactgctacgtcaccatgccgtttggattaaaaaacgcaggagcaacttatcaacgtatgatccaaagatgcttctcaacgcagatcggccgcaacgttgaagcctatgtggatgatgtagtcgtcaagaccaagcaaaaggatgatttgatctcggatctagaagaaacctttgcaagcatccgtgctttcaagatgaaattgaatcctgaaaagtgcaccttcggagtaccgtcagggaagctgcttggttttatggtgtctcataggggcatccaagccaacccggagaaagttactgctatcctcaacatgaaaccgccaagcacccagaaagatgttcagaagttgactggatgcatggcggcgctcagccgattcgtttcaaaacttggcgagcgggggatgcccttcttcaagctactgaagaaaacagataatttccaatggggacccgaagcacagaaggctttcgaagatttcaagcaactcctcaccaagccaccggtcttagcttcaccacacccgcaggagccgttgctgctgtatctatcagccacctcccaggtcgtgagcacagtcttggttgtcgagcgtgaggaagaaggccatgtccggaaagttcagcgaccaatctacttcgtcagcgaggtcctgaccgactccaaaacgaggtaccctcaggttcagaagctgttatatggtattttaattactaccaggaagctgtctcattactttcaaggtcactcggtaacggtggtcacatcatttccactcggcgatgtactgcacaaccgcgaagcaaatgggcggattgctaagtgggctttggagttgatgtctttggacatatcattcaagccccgcacttcaatcaagtcccaagcgttagctgattttgtcgccgagtggaccgagtgccaagaggatacccccgtggagaaaatagagcactggaccatgcattttgacgggtcaaaaagactttcaggcactggagctggagtggttttaatttccccgactggagaaagactaagttatgtgctttggatacatttttcggcgtctcacaacgtcgccgagtatgaggcgctccttcatgggctacggattgcaatttccctagggataaagcgtctaattgttcgaggtgattcacagctggttgttaaccaagttatgaaagagtggtcctgcattgacgacaacatgatggcatatcgacaagaggtacgcaaactggaggataagttcgatggacttgagctcagccatgttcttcgacacaacaatgaagctgccgatagacttgcgaactttggatccaagcgcgaggcagcgccatctgatgttttcgtcgaacacctttattcgccgacagtacctcacaaagatgctactcaagttgcggacactcatgacatagctatggttgcagccgactggcgagagcccttcatacgatttttaacttctcaagagctgcctcaagataaagacgaagccgagcggatttcaaggcggagcaaactttatgttatgcatgaagccgagttatacaagaaaagcccttcaggaattctgcaacgctgcgtatctttagaggaagggagacaattgttgaaggacatacattctgggatatgcggtaaccatgctgcagcgcgcaccattgttggcaaagcttaccggcagggttttttctggcctactgcagtgtccgacgccgacaaaattgtgcgcacatgtgaaggttgccaattttttgccagacaaattcatctaccagctcaagagttgcagactatcccgctgtcttggccgtttgcggtttgggggctcgacatggtcggcccgtttaaaaaggcagtcggcggttacacgcacctctttgtggccattgacaaattttccaagtggatcgaagctaagcctgttgtcacgattacagcagataatgctcgcgatttcttcatcaacattgtgcacagattcggagtacccaatcggatcatcactgataatggcacacaattcaccggcggagttttcaaagacttttgtgaagattttggaatcaagatttgctatgcctcagtagcacacccaatgagcaatggacaggtggagagggccaacggcatgatacttcaagggattaaagctcgagtttttgaccggcttaaaccctatgccggcaaatgggtgtcacagttaccatcagtactttggtctttgcgtactacgcccagtcgggccacaggccagtcaccttttttccttgtctacggggcagaagcaatgttgccgagtgaagtcgagttcgaatctttgcgcttccgtaatttccgtgaagaacgctatgaagaagaccgagcggacgacttgcaccgactggaagaggtccgcgaagcagctttgattcagtcagctcggtacctacaagggttgcgacgttatcataatcgcaatgttcgatctcgtgcctttctagtcggcgacctggttttacggaaaattcaaaccacacgagatcggcacaagttatctcctctatgggaagggccatttattatctctgaagttacccggccaggttcatatcgactcaagcgcgaagacggcactctcgtcgacaactcttggaacattgaacatcttcgtcgtttctacgcttaa

SEQ ID NO: 100839 - DNA, 474 bp, Oryza sativa
  Clone ID: PAT_MRT4530_98516C.1
atggcaccacaagtgatggagtcagaggtggttgcacgagcgctcgtgttgctagtggaggcgcacctgggcggccgcgctgctattcacctcgacagtcttgctgttgctgctcatctgctctgtcgccaagagccgtcggccctaataagctaccttcgagcagagaagatggaaacaaagaacggcgccaacgaggacacgtcaaaagtcaatctttgggggaatgcactatcaaaatgtggttatttgctgatggttaccgcggaggactactgggcggagcatgcaattcataggccagagttagcagcgtcggctgatgcacccatgtttcgagttggtgcgtcgacggcgtggcaggaggcttcgcccgcggatctgccacccttgcgtcctccaggccgccacctcgatgctagctcctctgctgcgtcgatgctgggaagggaggaaggagaggaagagaaatga

SEQ ID NO: 100840 - DNA, 5961 bp, Oryza sativa
  Clone ID: PAT_MRT4530_98517C.1
atgggtcctttctccggcatcgacgacctcgtcttcccacccgggcagacgtttcggttcggcagcctcgacttcgtcaccaacaacttcggcaagatttctctccttgactcggaatcggaccagtcgggagagaaccggatctcagtcccgtttggattcccaaacgcggctgaaacctacttcaagaccatctcaatcgagtcggcttcaaaccactcggctgagatcgcatcttctccaacgacaccagatcaagatgatggggcttacccaccagtcctgatgaagctccccgacgatttagcggccgtctccacctcgacagcgtcttcatcccgtaggcctaggcggaagtcggctccaacaccgattccgcctagcttcagggaagtcggcgtcatcctccagccactcggcacggtttcgacggatcagctagatgactacaacagctctcccaccgtcgactcacgtcctactgacatcgtggagtacgacgaatttagctctcgctacaacgacttcgacgactacgacgacttcgacggaagcctagatgacaactacacccctctctactttggcgttttcatggccaataatgagacggaggagcaacgccaagcccgggagactgaagaacgtcgccgactggaggaggagcatcaagcacgagaacaagaacggctacggcgtgagcagcaggaccgtgagcggatcgccaaggaggctgaagatcgacgtcagcgagctttggaagcagggcgccgagcgcgtgatctcatcggccaacaagacgtcgaagggacaccggttttccgcacccctcaacagaatgcggttgccgcgatcaccctcctcgacaccctcctcaaccaaaacgagctcaatcgttccgaccacgtcgtcaacatcttgaaccagacgaagaccatgatcgcggcttcggtcccagttaactccgaaagcgtccacacgccgactggcagccgagtcccccacttccgatctcatgactaccgtcatccaagcctcagcatcaccggcgcaggatccaaccgcaggagcaggggtcacgacgagcggtctgttcactcacctcccgaccttcatagggagcgccgagtggaacggcctcgctcaccacctcgtcgccgccccatcgatcttcgcgacacaatcatacagcgccgagcagctcgaggctaccatcactcaccggaccgccacgacgacgaccttgacggagtagcagccttcaccgacgacctgcgtcgagtggattggccagccggcttcaaaccgactggaatagagaagtatgacggcaccactaaccccgaatcgtggcttaccgtctacggtctcgcaatccgcgcagcaggaggagacaacaaggccatggcgaactatttaccggtggctttagcagattccgcccgatcttggctccatggattgccccgtggtacgatcggatcttgggctgaattacgcgaccacttcatcgccaacttccaaggcaccttcgagcgtcctggcacacaatatgatctttacaacgttatccagaaatccggagaatcccttcgagagtatatccgacgattttctgaacaacgtaacaagatctccgacatcaccgatgacgtcatcatcgccgcattcaccaaagggattcgccacgaagaattggtcggcaaatttgggcgcaaacctcccagaacagtcaagctcatgttcgaaaaagccaacgagtacgccaaagccgaagacgccgtcaccgcatcgaagcagtcgggtcccagttggaagccgaaaaatacgccggctacgggaggaggtggaagtaacaatcataaggaccgcaagcgtaagcctgaggaacttgttgcaaccgccgctcactcttctcgacagcgttcgcgcgttaacaccttcgacaagatcatgaactcccaatgcccgcatcatccaaactccaaccacgtggccaaagagtgcttcatctacaagcagttcgcggagcagtacaccaagtctactcggaagaactccgacgaggaacaaagcacgtcaaggaagaaggacgacggcgacaccccggctggatttcaagaccaccgcaaggagctcaaccatatcttcggcggccccctggcttatgagtctaaacggaagcagaagttgactgaacgggagatcaatgctgttcagcccgacacgccccagtatcttcgatggtcagagattgcaatcaagtttgaccgctcggatcatcctgaccgagtggtccacccggggcggtaccccctggtactagacccagtggtccgtaatgtcaagcttcgcaggaccctcattgatggtggcagtgcactcaatatcctcttcgccaagaccctggatgatatgcagattcctcgctccgagctaaaaccaagcaatgcgccttttcacggagtaattccaggattatccgcaactccactcggccagatcaccctcccagtcacttttggcactcgggaaaatttccgcacagagaatatcagctttgaagtcgccgatttcgagacagcataccatgccatactcggacgcccggcgttagccaagttcatggccgtcccgcactacacttacatgatgatgaagatgcctggtccccgtggagtcctatccctacggagcgacatcaagcaagccgtcacatgcgacaaggagagttgcgacatggcccaaacccgcgagatggcgtctgcccaagaggaaatccgactggctgcaaccacggaaagcgcgctcatcacctttcttcaaaataataaagatatctttgcgtggaaaccttcggatatgcccggtattcccagagaggtgattgagcactccttacatgtcaaagaagacgccaagcctattaaacaacgactccgccgatttgcacaagacaggaaggatgcgatcaaggaggagttaaccaagctgttagcagcaggcttcatcaaagaagtccttcatcccgactggctggcaaacccggttctagttcggaagaaaacagggcaatggcgcatgtgtgttgattataccgacctcaacaagtcttgtcccaaagatccttttgggttgcctcgcattgaccaggtagttgactcaaccgccggctgtgagcttctcagttttttggactgctactcggggtatcatcagatccgactgaaggaatccgactgcttgaagacttcattcatcacgccttttggtgcatactgctacgtcaccatgccgtttggattaaaaaatgcgggagcaacttatcaacgtatgattcagagatgcttctcaacacaaattggccgcaacgttgaagcctatgtggatgatgtagtcgtcaagaccaagcaaaaggatgatttgatctcggatctagaagaaacctttgcaagcatccgtgctttcaggatgaaattgaatcctgaaaagtgcaccttcggagtaccgtcagggaagctgcttggttttatggtgtctcataggggcatccaagccaacccggagaaagttactgctatcctcaacatgaaaccgccaagcacccagaaagatgttcagaagctgactggatgcatggcggcgctcagccgattcgtttcaagactcggcgagcgggggatgcccttcttcaagctactgaagaaaacagataatttccaatggggacccgaagcacagaaggccttcgaagatttcaaacaactcctcaccaagccgccggtcttagcttcaccacacccgcaggagccgttgttgctgtatgtatcagccacctcccaggtcgtgagcacagtcttggttgtcgagcgtgaggaagaaggtcatgtccagaaagttcagcgaccaatctacttcgtcagcgaggtcctggccgactccaaaacgaggtaccctcaggttcagaagctgttatatggtattttaattactaccaggaagctgtctcattactttcaaggtcacccggtaacggtggtcacatcgtttccactcggcgatgtactgcacaaccgcgaagcaaatgggcggattgctaagtgggctttggagttgatgtccttggacatatcattcaagcctcgcacttcaatcaagtctcaagcgttagctgattttgtcgccgagtggaccgagtaccaagaggatacccccgtggagaaaatagagcactggaccatgcattttgacgggtcaaaaagactttcgggcactggagctggagtggttttaatttccccaactggagaaagattaagctatgtgctttggatacacttttcggcgtcccacaacgtcgccgagtatgaagccctccttcatgggctacggattgcaatttccctagggataaagcgtttaatagttcgaggcgattcacagctggttgttaaccaagttatgaaagagtggtcctgcattgacgacaacatgatggcatatcgacaagaggtacgcaaattggaagacaaatttgacggactcgagctcagtcacgttcttcgacacaacaatgaagccgccgacagacttgccaattttggatccaagcgtgaggcggcgccctcagatgttttcgtcgaacacctttatacaccgacagtacctcacaaagatgctactcaagttgtgggcacccatgacgtagctatggttgaagccgactggcgagagcccttcatacgatttttaacttctcaagagctccctcaagataaagatgaagccgagcggatttcaaggcggagcaaactttatgttatgcatgaatctgagttatacaagaaaagcccttcaggaatcctgcaacgctgtgtatctttagaggaagggagacaattgctgaaagacatacattctgggatatgcggaaaccatgctgctgcacgcaccattgtcggcaaagcttaccggcagggttttttctggcctactgcagtgtccgacgccgacaaaattgtgcgcacatgtgaaggttgccaatttttcgccagacaaattcatctaccagctcaagcgttgcaaacaatcccgctgtcttggccgtttgcggtttgggggctcgacatggttggcccgtttaaaaaggcagtcggcggttacacgcatctctttgtggccattgataaattttccaagtggattgaagctaaaccggttgtcacaatcacagcagataatgctcgcgatttcttcatcaacattgtgcacagattcggagtacccaatcggatcatcactgataatggcacacaattcaccggcggagttttcaaagacttttgtgaagactttggaatcaagatttgctatgcctcagtagcacacccaatgagcaatggacaggtggagagggccaacggcatgatacttcaggggattaaagctcgagtttttgaccggcttaaaccctatgccggcaaatgggtgtcacagttaccatcagtactttggtctttgcgtactacgcccagtcgggccacaggccagtcaccttttttccttgtctacggggcagaagcaatgttgccgagtgaagtcgagttcgaatctttgcgcttccgtaatttccgagaagaacgctatgaagaagaccgagtggacgacttgcaccgactggaagaggtccgcgaagcagctttgattcagtcagctcggtacttacaagggttgcgacgttatcataatcgcaatgttcgatctcgtgcctttctagtcggcgacctggttttacggaaaattcaaaccacacgagatcggcacaagttatctcctctatgggaagggccatttattatctctgaagttacccggccaggttcatatcgacttaagcgcgaagacggcactctcgtcgacaattcttggaacattgaacatcttcgtcgtttctacgcttaa

SEQ ID NO: 100841 - DNA, 6042 bp, Oryza sativa
  Clone ID: PAT_MRT4530_98518C.1
atgggttccatctccggcatcgacggcctcgtcttcccacccgggcagacgtttcggttcggcagcctcgacttcgtcaccaacaacttcggcaagatttctctcctcgactcggaatcagaccagtcgggagagaaccggatttcggtcccgtttggattcccgaacgcggctgaaagctacttcaagaccatctcaaccgagtcggcttcaaaccactcggccgagatcgcatcttctccaacgataccagatcaagatgatggggcttacccaccagtcctgatgaagctccccgacgatttagcggccgtctccaccacgacagcgtcttcatcccgtaggcctaggcggaagtcggcttcaacaccgatttcgcctagcttcagggaagtcggcgtcatcctccaaccactcggcacggtttcgacggatcagctggatgactacaacagctctcccaccgtcgactcacgtcctactgacatcgtggagtacgacgaatttagttctcgctacaacgacttcgacgacttcgacgacttcgacggaagcctagatgacaactacacccctctctactttggcgttttcatggccaataatgagacggaggagcaacgccaagcccgggagaccgaagaacgttgccgactggaggaggagcatcaagcacaagaacaagaacggctacggcgtgagcagcaggaccgtgagcggaccgcgaaggaggctgaggatcgacgtcagcgagctttggaagcagggcgccgagcgcgtgatctcatcggccagcaagatgtcgaagggacaccggttttccgcacccctcaacagaatgcggttgccgcgatcacccttctcgacaccctcctcaaccaaaacgagctcaatcgatccgaccacgtcgtcaacatcttgaaccagacgaagaccatgattgcggcttcggtcccagttaactccgaaagcgtccacacgccgactggcagccgagttccccacttccgatctcatgactaccgtcatccaagcctcagcatcaccggcgcaggatccaaccgcaggagcaggggtcacgacgagcggtctgttcactcacctcccgaccttcatagggagcgccgagtggaacggcctcgctcaccacctcgtcgccgccccatcgatcttcgcgacacaatcatacagcgccgagcagctcgaggctaccatcactcgccggaccgccacgacgacgaccttgacggagtagcagccttcaccgacgacctgcgtcgagtggattggccagccggcttcaaaccgactggaatagagaagtatgacggcaccactaaccccgaatcgtggcttaccgtctacggtctcgcaatccgcgcagcaggaggagacaacaaggccatggcgaactatttaccagtggctttagcggattccgcccgatcttggctccatggattgccccgtggtacaattggatcttgggccgaactacgcgaccacttcatcgccaacttccaaggcaccttcgagcgtcccggcacacaatatgatctctacaacgtcattcagaagtccggagaatcccatcgagattacatccggcgattttctgaacaacgtaacaagatctccgacatcaccgacgacgtcatcatcgccgcgttcaccaaagggattcgccacgaagaactagtcggcaagtttgggcgtaagcctcccaggacagtcaagctcatgtttgaaaaagccaacgagtacgccaaagctgaagacgccgtcaccgcatcaaagcagtcgggtcccagttggaagcaaaacaagggtacgccggctacgggaggaggtggaagtaacaatcataaggaccgcaagcgtaagcctgcggaacttgttgcaaccgccagtcactcttctcgacagcgttcgcgcgtcaacacgttcgacaagatcatgaactcccaatgcccgcaccatcctaactccaaccacgtggccaaagattgtttcgtctacaagcaattcgcggatcaatacaccaagactgcacgaaagaactctgacgaagaacaaagcacgtcgaggaagaaggatgacggcgacaccccggcaggttttcaagatcaccgcaaggagctcaaccatatcttcggcggccccctggcttatgagtctaaacggaagcagaagttgactgaacgggagatcaatgctgttcagcccgacacgccccagtatcttcgatggtcagagattgcaatcaagtttgaccgctcggatcatcctgaccgagtggtccacccggggcggtaccccctggtactagacccagtggtccgtaatgtcaagcttcgcagaactctcatcgacggtggcagtgcactcaatatcctcttcgccaagaccttggatgatatgcagattcctcgctccgagctaaaaccaagcaatgcgccttttcacggagtaattccaggactatccgcaactccactcggccagatcaccctcccggtcacttttggtactcgggaaaactttcgcacagagaacatcagcttcgaagtcgccgatttcgagacagcataccatgccatactcggacgcccggcgttagccaagttcatggccgtcccgcactacacttacatgatgatgaagatgtctggtccccgaggagtcctatccctacggagtgacatcaagcaagccgtcacatgcaacaaggagagttgcgacatggctcaaacccgcgagatggcgtccgcccgagaggatatccgactggctgcagccacggcgagcgaaggagaagtgcccgctaccaagatttcaaagagtggagaaagcgaagccaagactaagaagattcccctagatccctctgatcctactaaaactgctaacaataaagatatctttgcgtggaaaccatctgatatgcccggtattcctagagaggtgattgagcactccttacatgtcaaagaagatgccaagcctatcaaacaacgactccgccgattcgcacaagacaggaaggacgcgatcaaggaggaattaaccaagctgttagcagcaggcttcatcaaagaagtccttcatcccgactggctggcaaacccggttctagttcggaagaaaacagggcaatggcgcatgtgtgttgattataccgacctcaacaagtcttgtcccaaagatccttttgggttgcctcgcattgaccaggtagttgactcaaccgccgactgtgagcttctcagttttctggattgctactcagggtatcatcagatccgactgaaggaatccgactgcttgaagacttcattcattacgccctttggagcttattgctatgtcaccatgccgttcggactaaaaaacgcaggagcaacttatcaacgtatgatccaaagatgcttctcaacgcagatcggccgcaacgttgaagcctatgtggatgatgtagtcgtcaagaccaagcaaaaggatgatttgatctcggatctagaagaaaccttcgtgagcatccgcgctttcaggatgaaattgaaccctgaaaagtgcaccttcggagtaccgtcagggaagctgcttggctttatggtgtctcataggggcatccaagccaacccggagaaagttactgctatcctcaacatgaaaccgccaagtacccagaaagatgttcagaagctgactggatgcatggcggcgctcagccgatttgtttcaagacttggcgagcgggggatgcccttctttaagctgctgaagaaaacagataacttccagtggagacccgaagcacagaaggccttcgaagatttcaagaaacttctcaccgagccaccagtcttagcctcaccacacccgcaggagccgttgttgctgtacgtatcagctacctcccaggttgtgagcacagtcttggtcgttgagcgcgaggaagaaggccatgtccaaaaagtccagcgaccgatttattttgtcagcgaggtcctagccgactccaaaacgaggtaccctcaggttcagaagctgttatatggtattctaattactaccaggaagctatctcactactttcaaggtcactcggtaacggtggtcacatcatttccactcggtgatatactgcacaaccgcgaagcaaacggacgtattgctaagtgggctttggagttgatgtctttggacatatcattcaagccccgaatttcaatcaagtcccaagcgttagctgattttgtcgccgaatggaccgagtgccaggaggatacccccgcggagaacatggagcactggaccatgcattttgacggatccaaacgactttcgggcactggagcaggagtggttttgatttccccaactggagaaagattgagctatgtgctttggatacatttttcggcgtcccacaacgttgccgagtatgaggccctccttcatggactacggattgcaatttccctagggataaagcgtctgattgttcgaggcgattcacagttggttgtcaaccaagttatgaaagagtggtcctgcattgacgacaatatgatggcatatcgacaagaggtgcgcaaattggaagacaagttcgagggactcgagctcagtcacgttcttcgacacaacaatgaagccgccgacagacttgccaattttggatccaagcgcgaggcggcgccctcagatgttttcgtcgaacacctttatacaccgaccgtacctcataaagatactactcaagatgcggacactcatgacgtagctatggttgaagccgactggcgagagcccttcatacgatttttaacttctcaagagctccctcaagatgaagatgaagccgagcggatttcaaggcggagcaaactttatgttatgcatgaatctgagttatacaagaaaagcccttcaggaattctgcaacgctgcgtatctttagaggaagggagacaattgctgaaagacatacattctgggatatgcggaaaccatgctgctgcacgcaccattgtcggcaaagcttaccggcagggttttttctggcctactgcagtgtccgacgccgacaaaattgtgcgcacatgtgaaggttgccaatttttcgccagacaaattcatctaccagctcaagagttgcaaactatcccgctgtcttggccgtttgcggtttgggggctcgacatggttggcccgttcaaaaaggcagttggcggttacacgcatctctttgtggccattgacaaattctccaagtggattgaggccaaaccggttgtcacaatcacagcagataatgctcgagacttcttcatcaacattgtgcatagatttggagtgcccaatcggataatcactgataatggcacacaattcactggcggagtttttaaagacttttgtgaggacttcggaattaagatttgctacgcctcagtggcacaccccatgagcaatggacaggtggagcgagctaatggcatgatacttcaagggattaaagcgcgtgtctttgaccggctaaaaccctatgccggcaaatgggtgcaacaactgccatcggtactttggtctttgcgaactacacccagtcgggccacaggccagtcaccttttttccttgtctatggggcagaagcaatgttgccgagtgaagtcgaatttgagtctttgcgctttcgtaattttcgtgaagaacgctacgaagaagaccgagtggatgacttgcaccgattggaagaagcccgcgaagcagctttgattcggtcggctcgatatttacaagggttgcggcgctatcataatcgcaatgttcgatctcgtgcccttttagtcggtgacctggttttgaggaaaattcaaactacacgagatcggcacaagttatctcctctatgggaagggccatttattatctctgaagtcacccggccaggttcttatcgactcaagcgcgaagacggtactcttgtcgacaactcttggaacattgaacatcttcgtcgtttctacgcttaa

SEQ ID NO: 100842 - DNA, 6724 bp, Oryza sativa
  Clone ID: PAT_MRT4530_98519C.1
atgggttccatctccggcatcgacggcctcgtcttcccacccgggcagacgtttcggttcggcagcctcgacttcgtcaccaacaacttcggcaagatttctctcctcgactcggaatcagaccagtcgggagagaaccggatttcggtcccgtttggattcccgaacgcggctgaaagctacttcaagaccatctcaaccgagtcggcttcaaaccactcggccgagatcgcatcttctccaacgataccagatcaagatgatggggcttacccactagtcctgatgaagctccccgacgatttagcggccgtctccaccacgacagcgtcttcatcccgtaggcctaggcggaagtcggcttcaacaccgatttcgcctagcttcagggaagtcggcgtcatcctccaaccactcggcacggtttcgacggatcagctggatgactacaacagctctcccaccgtcgactcacgtcctactgacattgtggagtacgacgaatttagttctcgctacaacgacttcgacgacttcgacggaagcctagatgacaactacacccctctctactttggcgttttcatggccaataatgagacggaggagcaacgccaagcccgggagaccgaagaacgtcgccgactggaggaggagcatcaagcacaagaacaagaacggctacggcgtgagcagcaggaccgtgagcggaccgcgaaggaggctgaggatcgacgtcagcgagctttggaagcagggcgccgagcgcgtgatctcatcggccaacaagatgtcgaagggacaccggttttccgcacccctcaacagaatgcggttgccgcgatcacccttctcgacaccctcctcaaccaaaacgagctcaatcaatccgaccacgtcgtcaacatcttgaaccagacgaagaccatgattgcggcttcggtcccagttaactccgaaagcgtccacacgccgactggcagccgagttccccacttccgatctcatgactaccgtcatccaagcctcagcatcaccggcgcaggatccaaccgcaggagcaggggtcacgacgagcggtctgttcactcacctcccgaccttcatagggagcgccgagtggaacggcctcgctcaccacctcgtcgccgccccatcgatcttcgcgacacaatcatacagcgccgagcagctcgaggctaccatcactcgccggaccgccacgacgacgaccttgacggagtagcagccttcaccgacgacctgcgtcgagtggattggccagccggcttcaagccgactggaatagagaagtacgacggcaccactaaccccgaatcgtggcttaccgtctacggtctcgcgatccgcgcagcaggaggagacagcaaggccatggcgaactatttaccagtggctttagcggattccgcccgatcttggctccatggattgccccgtggtacaattggatcttgggccgaactacgcgaccacttcatcgccaacttccaaggcaccttcgagcgtcccggcacacaatatgatctctacaacgtcattcagaagtccggagaatcccttcgagattacatccggcgattttctgaacaacgtaacaagatctccgacatcaccgacgacgtcatcatcgccgcgttcaccaaaggaattcgccacgaagaactagtcggcaagtttgggcgtaagcctcccaggacagtcaagcttatgtttgaaaaagccaacgagtacgccaaagctgaagacgccgtcaccgcatcaaagcagtcgggcctcagttggaagcaaaacaagggtacgccggctacgggaggtggtggaagtaacaatcataaggaccgcaagcgtaagcctgcggaacttgttgcaaccgccagtcactcttctcgacagcgttcgcgcgtcaacacgttcgacaagatcatgaactcccaatgcccgcaccatcctaactccaaccacgtggccaaagattgtttcgtctacaagcaattcgcggatcaatacaccaagactgcacggaagaactctgacgaagaacaaagcacgtcgaggaagaaagacgacggcgacgccccggcaggatttcaagaccaccgcaaggagctcaaccatatcttcggcggccccttagcttatgagtctaaacggaagcagaagttgactgaacgagagatcaatgctgttcaacccgacacgccccagtatcttcgatggtcagaaatcgcaattaagtttgaccgctcggatcatcctgaccgagtggtccacccggggcggtaccccctggtactagacccagtggtccgtaatgtcaagcttcgcagaaccctcatcgacggtggcagtgcactcaatatcctcttcgccaaaaccttggatgatatgcagattcctcgctccgagttaaaaccaagcaatgcgccttttcacggagtaattccaggattatccgcaactccactcggccagatcaccctcccggtcactttcggcactcgggaaaacattcgcacagagaatatcagctttgaagtcgccgatttcgagacagcataccatgccatactcggacgcccggcgttagccaagttcatggccgtcccgcactacacttacatgatgatgaagatgcctggtccccgaggagtgctatccctacggagtgacatcaagcaagccgtcacatgcgacaaggagagttgcgacatggctcaaacccgcgagatggcgtctgcccgagaggatatccgactggctgcagccacggcgagcgaaggagaaatacctgctaccaagacttcaaaaagtggagaaagcgaagccaagactaagaagattcccctagatccctctgatcctactaaaactgctaacaataaagatatctttgcgtggaaaccatctgatatgcccggtattcctagagaggtgattgagcactccttacatgtcaaagaagatgccaagcctatcaaacaacgactccgccgattcgcacaagacaggaaggacgcgatcaaggaggaattaaccaagctgttagcagcaggcttcatcaaagaagtccttcatcccgactggctggcaaacccggttctagttcggaagaaaacagggcaatggcgcatgtgtgttgattataccgacctcaacaagtcttgtcccaaagatccttttgggttgcctcgcattgaccaggtagttgactcaaccgccggctgtgagcttctcagttttctggattgctactcggggtatcatcagatccgactgaaggaatctgactgcttgaagacttcattcatcacgccctttggagcttattgctatgtcaccatgccgttcggactaaaaaacgcaggagcaacttatcaacgtatgatccaaagatgcttctcaacgcagatcggccgcaacgttgaagcctatgtggatgatgtagtcgtcaagaccaagcaaaaggatgatttgatctcggatctagaagaaaccttcgtgagcatccgtgctttcaggatgaaattgaaccctgaaaaatgcaccttcggagtaccgtcagggaagctgcttggttttatggtgtctcataggggcatccaagccaacccggagaaagttactgctatcctcaacatgaaaccgccaagtacccagaaagatgttcagaagctgactggatgcatggcggcgctcagccgatttgtttcaagacttggcgagcgggggatgcccttctttaagctgctgaagaaaacagataacttccagtggggacccgaagcacaaaaggccttcgaagatttcaagaaacttctcaccgagccaccagtcttagcctcatcacacccgcaggagccgttgttgctatacgtatcagccacctcccaggttgtgagcacagtcttggtcgttgagcgcgaggaagaaggccatgtccaaaaagtccagcggccgatttattttgtcagcgaggtcctagccgactccaaaacgaggtaccctcaggttcagaagctgttatatggtattctaattactaccaggaagctatctcactactttcaaggtcactcggtaacggtggtcacatcatttccactcggtgatatactgcacaaccgcgaagcaaacggacgtattgctaagtgggctttggagttgatgtctttggacatatcattcaagccccgaatttcaattaagtcccaagcgttagctgattttgtcgccgaatggaccgagtgccaggaggatacccccgcggagaacatggagcactggaccatgcattttgacggatccaaacgactttcgggcactggagcaggagtggttttgatttccccaactggagaaagattgagctacgtgctttggatacatttttcggcgtcccacaacgtcgccgagtatgaggccctccttcatggactgcggattgcaatttccctagggataaagcgtctaatagttcgaggcgattcacagctggttgtcaaccaagttatgaaagagtggtcctgccttgacgacaacatgatggcgtatcgacaagaggtacgcaaattggaagataagttcgatggactcgagctcagtcatgttcttcgacataataatgaagccgccgatagacttgccaactttggatccaagcgcgaggtggcgccctctgatgttttcgttgaacacctttatacgccgacagtacctcacaaagataccactcaagttgcgggcactcatgacgtcgctatggttgaaaccgactggcgagaacccctcatacgatttttgacttctcaagaactccctcaagacaaagatgaagccgagcggatttcaaggcagagcaaactttatgttatgcatgaatctgagttatacaagaaaagcccttcaggaattctgcaacgctgcgtatctttagaggaagggagacaattgctgaaagacatacattctgggatatgcggaaaccatgctgctgcacgcaccattgtcggcaaagcttaccggcagggttttttctggcctactgcagtgtccgacgccgacaaaattgtgcgcacatgtgaaggttgccaatttttcgccagacaaattcacttaccagctcaagagttgcaaactatcccgctgtcttggccgtttgcggtttgggggctcgacatggttggcccgtttaaaaaggcagtcggcggttacacgcatctctttgtggccattgataaattttccaagtggattgaagctaaaccggttgtcacaatcacagcagataatgctcgagacttcttcatcaacattgtgcatagatttggagtgcccaatcggataatcactgataatggcacacaattcactggcggagtttttaaagacttttgtgaggactttggaattaagatttgctacgcctcagtggcacaccccatgagcaatggacaggtggagcgagctaatggcatgatacttcaagggattaaagcgcgtgtctttgaccggctaaaaccctatgccggcaaatgggtgcaacaactgccatcggtactttggtctttgcgaactacacccagtcgggccacaggccagtcaccttttttccttgtctatggggcagaggcaatgttgccgagtgaagtcgaatttgagtctttgcgctttcgtaatttccgtgaagaacgctacgaagaagaccgagtggatgacttgcaccgattggaagaagcccgcgaagcagctttgattcggaccagccagggtacacaaacgacaattgttgacatacagacccacgccttacaaaaatataaaagattacaaatgcagcggaaaagatacaagcgagctaagcctgaagacttgactcctgcagcgggcgactccattccacaggcaaaccttgacggcagcgacgaaaccaacctctctgagacggctccaactgagaagaacttcaactctggtgtgggggaaaagagagcaagactgagtactacccactgtactcagcaagtcataccggaagaggaggcagtgggcggtcccctcttgcgccgcggtgaatccggcagctggacaaccgaacacctcggccgacccaactccatcacgcccaccctcgccaccggtgcctaggaaagggtcgagctatacttcagatcaagcagttacccactcccgcttgtggcggggcccacgggtcagcggctcaaaggggagaggaagggggcgccggcatgtgggccccacgggcagtggctcaaggtggccggtctaccgtggaccgggaccacgcgggtggtccaccgccggtccacgggaccgacggtccggatcggccgggaggccgatcggacggcacggcggcggctaggcacggctcggctcggcttcaaaaccggccggccggccatggcaaccggcggcgacgcgcacggtcgccggcgacggcaatcggcggcgcgggaagcgacggcggacggggtacaggacggcggcgtcgaccgaaggcgacggcgagcgcgtggagagaggcggcgcaaacgagagagaggggaagagggaggaggggggatcctcaccggcgagtatggcggccggagcggaggatgaaggtggcggcgacgacctggcgatgaggaggggcggacgggcggcggcggcacctacggagggagttgagaaggattag

SEQ ID NO: 100843 - DNA, 227 bp, Oryza sativa
  Clone ID: PAT_MRT4530_9851C.1
atatatcaggagcaaccaatccacccaaaacaggacccaaactgggagattaggaataacagtacacacatggtgatttgttatggcccctccacaaggcttgtatttctagccgtctccaataagaaaaattcagggaaattccttgaacccatatccgtggagccacacgcaacaatgggcatttggcattctggacatgcccaccggttgccttttaatcacct

SEQ ID NO: 100844 - DNA, 129 bp, Oryza sativa
  Clone ID: PAT_MRT4530_98520C.1
gttgcccacgctggcttgtggtaagtacgataagttctcccagggcatcccgcgaatcggaggaacctcggcgactatttcaaagtacactggagcgacaagagagccggaatctaagcaacatacaaa

SEQ ID NO: 100845 - DNA, 951 bp, Oryza sativa
  Clone ID: PAT_MRT4530_98521C.1
atggtgtccaagaagaagaagacggtgtcgaggcacaccacggagtcggaggaaggcaggcactcgttcgagatcgtcgggtacagcctcaagaagggcatcggcgtggacgagttcgtcgaatccgccaccttcgccgtcggcggctacgactggtgcatccgcttctaccccgacggcaaaggcgatggtgccaaggactacatctcggtctacctcgagctcctgaccaaggactgcgccgtccgggcggcctacgacctgagattggttaatcttgccaccgggttgccaaagagtgtctactctgaaacaactcacaggatgttcaattctgaggacagtagcaaatttgctccgcattacgcgactttcatgcacagaagtcaactggagatggaagcgtcaggctacatcaaggacgatcgcctcacaatcgaatgctttgttaccgtcgtcgtccaggaatcgatggcgtctaataccgtgaaggcccatgaattaatcaaggtgccgccgtcagatatattggaaaattttggcgaattgttggagaagggggaaggggcggatgtgactttcgttgttgggggagagaaaatcgccgcgcacaagatcgtccttgcagcacggggcctcctgcatttcatctacaccgattcgttgccggacatggatgatctcagtgatgacgactactatgagatgatcaggcttttgcttgtggctgctgataggtatgccatggacaggatgaagttgcagtgcgaaagcatcctcggcgagcatcttgatgtgcagaccgtcgcaactacattggctttagctgatcagcacaactgcaacggccttaaagatgtttgcattgagtttatcgccactcaaaacaagatggatgatgtggtggcaactgaaggctatgctgaggacttgcccttctgtcttagttga

SEQ ID NO: 100846 - DNA, 186 bp, Oryza sativa
  Clone ID: PAT_MRT4530_98522C.1
atgactaccaccgctgtagccctctcttcccctcatgttgccatcttcctccacggcaacctcgaggaggaaggtgaggttggtgaggagcacaaggaagaggaggagcgggagcgtgcgagtggaggtggacaaggacataaacaaataatagcatcggtggaggatgaggaggcaatggaatga

SEQ ID NO: 100847 - DNA, 182 bp, Oryza sativa
  Clone ID: PAT_MRT4530_98523C.1
aggtacttgcttgggtgaaggaaaagaaaccgagcataaggaatgcaaggatgatcaaagaagttgattggggaccaaactaagacattctccaagtctacttctacctcaccacgccacttttggtccatagaagacaagagataaagttctacacgttttggattcggattcaggcctca

SEQ ID NO: 100848 - DNA, 273 bp, Oryza sativa
  Clone ID: PAT_MRT4530_98524C.1
agcacaacaatatttgctggtggcatgcataatgatggctgaatgttgtggctgttggtgatgcatgaatggtgatggaacttggaggaaggcacagatgagggcacaccatgagtgtggaatggattggttttgagtgtgacattgcaattgtgaaaggagaatttgttgcttggccaattgaaaagaccaagggacatgcatgcactgtgatgtgtgcccaaatgatgccagaccacgaaaagttggatgctgccactgtaagatgtcttc

SEQ ID NO: 100849 - DNA, 137 bp, Oryza sativa
  Clone ID: PAT_MRT4530_98525C.1
cttccttcattctttgtttgtaaatgaaattttagcactcattttaaagtttttacaatcagtggtagagtatacagatgctggtctggggtatcaaacatggttatgtactggctatcccttacacaaaatactag

SEQ ID NO: 100850 - DNA, 505 bp, Oryza sativa
  Clone ID: PAT_MRT4530_98526C.1
aggcattatccatgttgtgctgttggattgaaaatcccaattcagatgcattcaagcgtcatttggctagagtagctgattttctatgggttggagaagatggcatgaaagttcgggtctgtgcgggtcaattatgggatgttgctttcgcagtccaagcgatattagcgtgtagcatcgcagaagaatttggaagtacccttaagaaagcacatggtttcataaaaacttcccagaaagtaccgtcacatatctaaaggaggatgggccttccaggttgcagatcaggggtggcaggtttcagattgcacagcagaagctcttaaggtgcagatcaaaatttaaatattaagtgaagaacaaattagcgctacctgatgcagacatgggtcaagcagggttgattttccatttctattcatctgtctaggtttaattgattctgattgattattctcgaaagtaaaatgaacactgaaaacaagataaaggcatgggttgattt

SEQ ID NO: 100851 - DNA, 402 bp, Oryza sativa
  Clone ID: PAT_MRT4530_98527C.1
atgccagcaagggagggtggcggcctgacaatagggaagagggaaggcaacagtggaggcgacgaagacagttggagcgaggcgcgtgcgatgaaggttgacgaggagactgtacccggtggatccagcctcacaacgacgactggcgtgaaaaccacatcctggtttaccggagtgggcgacgggaacgttcttgatgtcgcgaccttcctagaggctcgttttcgaaggaccattcccaagccaatctcttcttcagacttttgtttatcttgcagtggtgcttctgactgccacaagatgcctatgttggcgggtctgcgtgggggagaatggatccatcttgtctctcgttctctccctctcaaacccaaaggcatggacggagacagtctggtgtag

SEQ ID NO: 100852 - DNA, 2432 bp, Oryza sativa
  unsure (1)..(2432): unsure at all n locations
  Clone ID: PAT_MRT4530_98528C.1
atgtggaagctcaagattgccgagggaggaccatggctaaagagtggaaacagtcatgttggaagagaaacatgggaatttgacccaaattttggaacaagtgaagagcgggaggcggttgaggctgcacggatagagttccagaagaataggttcagaacaagacacacctccgatgttttggctcgcatgcagttagctaaggcgaacaacttcagtattgatctacagaaagaaaaagatggaaaccccataaatattgacacagctacagtatcagatatactgaagaaggcactcagttatttctcagccatacaggcatatgatgggcactggccaggggatttcccaggcccactgtttaccactgcaaccatgatcatagttctatatgtcacagagtcattaactattacactgtcatcggaacatcacaaggagatctgtcgatatctgtacaatcgtcaggtgcttggagtttttgactggtcaggtgtaaatcctattcccccagaattatttcttcttccatctttcgttcctatccaaccaggacgattatggagtcacttccgaatggcttttattcccatgtcttatttgtatggaaaaaagtttgtcggtcctataacaagattggttatatcattaagggaagagctacatattcatccctataaaaagattgactggaaggaggcacgcaaattatgtgcaaaggaagatgcctataatccacatatgtggctacaagagtgcctatctgactgcctttatagttttggtgagccgtttcttacacgttggccaatttcctacatgagaaaaagagctctataccaaattgctgagttcttgaagtatgaagatgaaaattctcagtatatctgcattggtgctgcacagaaggcattatccatgttgtgctgttggattgaaaatcccaattcagatgcattcaagcgtcatttggctagagtagctgattttctatgggttggcgaagatggcatgaaagttcgggtctgtgcgggtcaattatgggatgttgctttcgcagtccaagcgatattagcgtgtagcatcgcagaagaatttggaagtacccttaagaaagcacatggtttcataaaaacttcccagattatggacaatccttctggtgacttcagcagaaagtaccgtcacatatctaaaggaggatgggccttccaggttgcagatcaggggtggcaggtttcagattgcacagcagaagctcttaaggctttgctactgctgtcaaagtgtttgtcagatggtgcagattatcaaatggaaacctactgctactttgacgcggtgaatgtattactctcgttacagaacccaaatggtgggtatggagcatgggagctagctcgcacatatccatggatggagattttcaacatgacagagatatatgcagacatcattgtggagcatcagtacgtagagtgtacctcatcagtcatccaagcattggcattgttccgggagaagtaccctgggcatcggaaagatgaaatagatcaatgcatcaggaaagcaacagaattcatcgagaagttacagaatgatgatggatcatggtttggatcatggggtatttgcttcacgtatggaacatggtttgcaatagagggtctgtcagccgtggggcagtgttatgatgacagcacctgcattcggaaagcctgtaagtttctgttatcaaagcaactaacaaatggtggatggggggagagtcatctttcatccagaaccaaggcatacacaaacctagatggggagaaatcacatatagtcaatactgcatgggcaatgttggcactcatgaaagctggacaggtagagagagaccccgctcctctgcacaaagcagcaagacttatcatgagcatgcagctcagtgatggtgactttccacaagaggaaatgatcggaagtttcttgaaaaatggccccttgtgttatatggcttatcgcaatatattcccaatatgggctcttggagagtatcagaaattagtatttcagaactatcagacctctagcatcaagcaaacaaatatagctccatctgctggcaatgctgctctgaagaattcagcaagtacaacagcgccaacttgatttcttggcagaatcaagcaaacagtccagtgtattgtaggtcatgtgaaagagtacaaaactctaaatctagaatctgctgtattgttttggtcgattttatgagatccttatgaattttttgtacattctttagatctgtgcaagaacatgtacatcacatttcacatttaggtactttgaaaaaggataacaaactttgcccctgangaaataaanaaagattaaaaaaaaattaaacaaatacaaaaaaattnaaggggggcggccct

SEQ ID NO: 100853 - DNA, 269 bp, Oryza sativa
  Clone ID: PAT_MRT4530_98529C.1
gtgggaaggtgcaaagttccaggggaataaccattttcctaagagaattcacgttttctgtgggcttgaagtcaacttacattttatatattttccattcacaccttacagattgataagagtaattcctactccaaaattcttcttttatgaagcagaccgaaagagatgaagggcatttatatttcatggggctatgttgctctaaataaaattgtacacccttaagctatttccattttccagtttgtgagtgttgtttccactta

SEQ ID NO: 100854 - DNA, 2041 bp, Oryza sativa
  Clone ID: PAT_MRT4530_9852C.1
atggccatgagtaggctctcgtttaggccgcggccgctcgacatccacaagaagctccccatcctcaagtcggcgcgggagttcgaggacgatgaccccacggccgcggcggtcgcggtcgcaagggcaggggtgctgctgcggcagtccgcgccggagctcactgctgctactactgccacggagggcgagggaaatccaacacccactaagaagaacattcaagagataccaacgcctcagtttgatgctgtggacacctatgaaagggactacactcgaaccttcgcacaaccaacctgttatatacgtggaagaggagccagggctgagattggtgaatttgtcgaatatgatctggacaatgaagatgaagactggcttgaagacttcaacaatgagcggaagaatcttaaccctgaaaaaaatctgttgagacaccactatgttattccccctgtgaagcatgtatttttgctacagtttgaaatggtcctacattacaggttggaagtcctcctattcaagttggaaattttggaccacaaagctcgagaaagagcaggagccattacaccaactttcataggacctgtaccagtcctcttgcagcttgatgctgcaatggagaattgcttctctgtgcaggcattgcagtacttatctgttcggtatggagttttccaagctgtatatagttattggaaagacaagagggaacgatggcaaaagcctattctgcggcgtttgcagccgcctccaccagtgaatgatacaaacccttataatgtattcagaccaagagagaaggcacatcgacttcatacaagaaggatgcaaaggcgagaaaataatattcaatcattcgaaaaacttcgcatggtacggcgcaacttggaccaggcaaaggcacttatggatgctttggttaagagggaagagacaaaacgggaggccatggaatgcgaggtcaaccttcgacgcattcagatgaaatataagcatgaagcccagcttgttgatgaagggactgcactgtcaggcttccagcaagtttctagtagatttggatcgagtgaagatgattacgcagattcagatgacacgacaactgaacaaccatatatccggccacctgttttccgtcctcgattcgctgatcataagctatccgtaatccctacattgcgtataaagcgtgagcgcgaactaaaaaggaggccacagcagaatggctgggtgtttaaaagggatcctgaggagccagtattgttattcacaagaccattggatcctgagaagttgctagcagcaggtgccggggtaggattgggcgaggtggtcgcatcatctttgatcgatggaaccctcttctccaaacaccaattgggcaggaaacctcctattatgtaccgtacagccgtaggcctccctcacctgaaagttgaagcaattagccatctgcacgtcctacttatgtgacctatacagctagtgagaagtgaagcactcgagcaattgatcctgctaaggcgccaaattggtcgatggaatacttttttggccgcccgggttgtgagctgtacagcaggctcagaccccctcagtgaatactgggtgtggccaggctatatctgctaacgtttctcttccgatctgggcttaatcatcttttcacagctgttgtaaaattattaatatgtaggtgaaagagtagagcatttttttgtctaggcttgtagggtcagtatctaacaccgtgctctctcattgattattcatttggagaagggggaatccttctcattgataaatcaacctttctgtataatgtttcaacacttggtgcatttgtgttcaatcaatgtgcacgtatgtaaaaaaaataaaaaaatgactcgtgacttctgctctccctaggttaggtagtggtagggcactaggtgcgtggaaatgggatatgtgaaacaatgttgcatgatgttttgttgaaatgttgtattagtttaaaaaaaaaaaaaaaaaaaaaaaaaaaaaaaaa

SEQ ID NO: 100855 - DNA, 1629 bp, Oryza sativa
  Clone ID: PAT_MRT4530_98530C.1
atgtcggtggcgctgtacgcgcgtgggggtggctgcggcgcgaaggcggccgcagcgcggcgctcggggcgcggcggtggtgggcggaggcgcgccgcggtcgtgctgctgctcgcgctggcgtacgtggcggggctgctcgtgttcgtgcttgcgggaggcggtggtgttggagttggagggcgcgtggaggtggggcgagaggtgggggtgatgacggtggcctcgctccggaggcggcgcgccgcggcggcggcggcgccgcagcccgggtcggtgtaccgcagccacctcgtgttcgagcggctctggccggacatccgcgacgacgccagctccgcctccgccgccgcctcgtcgctctcctccacttcttggcgtcgcagcatgttgatgacatcgcactatcagaatcctggggagctatggatgccttgtgtcaacaggaagctgattcgaccagagttgccaccttcaaatggttatctcatgatcgaagcgaatggtggtctgaatcaacagcgtctttcgatctgtgatgcagttgctgtggccagtttgcttaatgcaactcttgtgatcccagcatttcattttaatagtgtttggcgtgatcatagcaaatttggtgacatctttgacgaagaccattttattgagacactcaaagaacatgttagagttgtgaaggaattacctgtagatgttttgacgcgcttcgatcataatatcagcagcataccaaatatgagaactaaggcctattcatctccaaatcactatatgcagaaggtgcttccgaaattgctggagttaggggctgtgcgaattgccccattctcaaatagactggcacaatcagttccatcaaatctccaggccttgagatgttttgttaactaccaagcgttgagatttgctgagccaataagagttctcgcagaggatatggttgaaaggatggatatggtagctttttcatgctgtacatatgatggtggcttgaaggagaaaactgaaatggaaaatgctcgtgaaagaagctggagaggaaagtttcatcggcatggtcgagtgatcaatcctgaggcaaacagaagagatggaaaatgtcctcttactcctctagaggttggtatgatgctgcggggcatgggatttgacaataccacctccctctatgttgcttctggtaaaatatacaatgctgaaaaatacatggcaccgcttcgacagatgttccctcttttggcaacaaaggatactcttgctttgcctgaagagcttgctgagtttgaggggcactcatctcgattagcggcattagattactcggtctgtcttccgagtgaggtctttgtgacaactcaaggtgggaacttccctcactttctgatggggcacaggcgctacctgtttggcgggaatgcaaggacaataaagccagacaaacggaagctggttttatctttcgatgatccgaatatcagatggaatcggttcaagcgccacatgcaggatatactacaccatagtgacatgaggggcactgcattgaggaaacccaatgattccatatacaccttcccaatgcctgaatgtatgtgccagcaagatgggatgatgtag

SEQ ID NO: 100856 - DNA, 180 bp, Oryza sativa
  Clone ID: PAT_MRT4530_98531C.1
atgccccaagggaaaacggcgctctcaagcatcaccattgctgccctggaggggctgggcttcgcctaccccgcttgtgccacaccagccagccacggctcctcttactcgcaccacgccgctcccaccgccatcatcatgcctacttcctaccgctcctaccatgccaacccgcgctag

SEQ ID NO: 100857 - DNA, 834 bp, Oryza sativa
  Clone ID: PAT_MRT4530_98532C.1
atgtggctaaactgtctaccgtcactgctgaaacgatcgcatccctgcgtgtttcgtccgcgtcatccaaacgcatccgtttccatctaccgtctagattccgaccctcgggcgcattgtttcatgaatccaagtactccacgatcattagcatcaccggtctccacgccaccaacgatgcatgtagtttatcgcatatattcaactggttcatggaaatgcagttggaaggcctataacccttatgtgacctacaagcacccttatgcaggacatgtcaacttatttcttaagcaacgtatatcatggattctagatgaacatatgcttaaccatcagggccggccctggggggtcagccgtgcgcaggcccgaggccctcaaaatccaggggcccacatggctgatgggccatggcccatggcgaagacggaagacgaagaggagcgaaggaaaggctggaaagcgaagcgatttgactcctgttcccatcgccttgatcacgcctcctgcgtagcctcgatcacgccactggtcaatcactcatcgctgcaaacgctgcgtcgcaaggatcaatctgagttgcaaaaacccagcaggcaagatcgaccggacgagatcctccgcctcgcggattatcacgctgctgggttgagctctcgcctagtcgcctctcggcgtctggcgtcgcaaggagtcgagccgtcgaggccatcaggccaaccgcccggcggcggcggcgcggcgcgccctcatcggccaatcgacggctcggcggcgccaggtgcctataggctgcagcctgctgccctgctcctcgaggtaattttcttc

SEQ ID NO: 100858 - DNA, 368 bp, Oryza sativa
  Clone ID: PAT_MRT4530_98533C.1
gtgctactaaacaactattggtaagaccgtaaaacagccagggaatggataattttctgggaagggcatacatcaattatccggcattcctttcatggcacagttttcttcacattttttttcattttttgtgtaacattcggcattcctttcatggcacaatttgctttcgccatatttttcattagttgtcctgtgttacactcaattgttatgttgttcgggctcattattgttttactatctcagctggagcccattaatgacatcagtacaattaaaagccagagtgctttctttgtcctgaagggtagattataatacgctcttcgaattttttttgtctaaacccttaggggtatatattt

SEQ ID NO: 100859 - DNA, 297 bp, Oryza sativa
  Clone ID: PAT_MRT4530_98534C.1
atgaacaagcgccaggaggttgacgtgaagcggcaacatcatcgagcaggacctagaagcacttcagagcaggagcgggagctgagtccgactggcgatgaggaagaaaagaggcaccttcgccggtcaagcccgccgccgtcggattctccaagccagtgctcgcatgtgccgccgctgccactcccaaatctgtggggcctagtcacgcccgatgccgccgccgtccgattcgccggtcacgcccgtcaccaccgccggacaaggcgagctgaggcctcgcccgcatccacctag

SEQ ID NO: 100860 - DNA, 305 bp, Oryza sativa
  Clone ID: PAT_MRT4530_98535C.1
atgggaggggagtggggaagtcaccgtcagtgccacttctactacttccaccgtcaacggtctccggtcatcctgccaccagatttgacccccatcgccaccacggacgccgttgccgagagcatgttgaggctggagggagccgctattgtcgagagcacgcacctggaggctggatatgggagaggggagtgggagggtcaccgccgccacactctttattgcgccaccgcgaccagcctcctcccataccaccatcagatctgcctcccattgccctcgtcgccatcgctgtcgctccacag

SEQ ID NO: 100861 - DNA, 187 bp, Oryza sativa
  Clone ID: PAT_MRT4530_98536C.1
cagcccgggctttactgcatgttcctacgtgacacactggatgatcgacagtccctgcaaactgtcgctagctgctgtctgcaatgcatatgcagaacagaacatgcacttggcttactgaagaacagctgtgcagggcaactcgaatactgccgacctctcaatgagccaacctaagatgcatgcc

SEQ ID NO: 100862 - DNA, 3306 bp, Oryza sativa
  Clone ID: PAT_MRT4530_98537C.1
atggcgggttcgaggccagcgcgcgagacgacgaccgacgcccccgccgagccgtcgtccgacggcgcggtcgcggccgcaccctcggcggcggcggcggcggagggcgacgcggagatcaccaggccccgcaacgacaagcgcgggtaccgccgcgtcgtgctccccaacgccctcgagtgcctcctcgtcagcgaccccgacaccgacaaggtctccgtgctttcgctggctccttcgatcggggatgtgccgggggttttggcggcggcgtcgatgaatgtctcggtgggctacttctgcgatcccgagaggctccctggccttgcacatttccttgagcatatgcttttctatgctagcgagaaataccctgtggaagacgattactcaaagtatattgcatagcatggtggttcaaccaacgccttcacatgtcgtgaacgtacaaacttttattttgatgtgaacaatagttgcctggatgatgctttggataggtttgcacaattttttataaagccattgatctcacccgatgcaactctaagggaaattaatgctgttgactctgaaaataagaaaaacttgttgtcagatcctttgcgaatgagtcagctccagaaacatttttgctcggagagccatccatatcacaagtttagcactggaaacctggacactttgctggttaatccaaataaggaaggattggacacactggaagagcttattaaattttataattcacattactcagctaatttgatgcaacttgttgtgtatggcaaagagagtcttgacaaccttcaaaatcttgttgaaaataagttctctgatgtcaggaatactggaagggaaagtttttcctttcatggtcatccatgttcaagtgaacatctccagatcattgttaaagcggttcccataaaagaaggccacactttgagaatacagtggccaatcaccccaaatattcagcactataaggaagggccttgcaagtatgtgagtcgtctagttggccatgaaggagaggggtctctattttacgtgctaaaaaatttaggatgggctatgagtttgtatgcatgggaaggtgactggagttatgagttttcattcttcaatgttgttatacagctcacagatgtaggctatgagcacatggaggacattattggactgttattccgatacatagcattgctccagacctctggaactcgtcagtggatttttgatgagcttgtagctatttctgagatgggattccactaccgagacaagagtcctcctatccattatgttgtcaatatttcctcaaacatgcagatctttccgccggaagattggctgattgcatcatctgtgccatcaaagttttctccagatgctattcagaatatattaaatgacttgactccagataatgttagaatattctgggaatcaaaaaagtttgaagggcaaacaaacttaacagagccttggtatggtacatcatattcagttgaagcagtcactccttccatcatacagaaatgggtaaatatggctcccatggaagatttgcacattccaaaacctaatatcttcattccaagtgatctttcattgaaaaatgttgaggaaaagggaagttttccttgtatgcttaggaaaacaatgttttcaagagtatggtataagcctgatacaatgttcttcacacccaaggcctacgtcaagatggatttccactgtccactgtccaatagctctcctgaatcgacagttcttactgatatgttcacgaggttgataatggattatttgaatgattttgcttatgatgctcaaattgctggtctttactactttattaggccaagtgacactggatttcagataactatggtcggttataatgacaaaatgagaacccttctggatactgtcattggaaaaattgctgagtttgaagtgaaggttgaccgttttgctgttataaaggaaactataataaaggactacgagaatttcaaatttcgacaaccatatgagcaggctttttactattgttcattgatattagaggaacaaacgtgggcatgggatgaaaaacttgctgcagtatctcaaattgaagcaagcgatctacagatttttttgcctcgtctgctggggaaaacatttattgaatgctattttgctgggaacatggaaccgggtgaggcaaaaagtgttatacagcatgttgaagacatcttattcaatgcacccatcagtttctgcaaagcattacccccatcacagcatcttacaaagcgaattgtaaaacttgaaaggggttggaggtattattatccagcattgtgcctaaatcaccaggatgaaaaaaattcttccattctgcattatattcagattcatcaggatgatctcaaaaaaaatgttctacttcaattgcttgctcttgttgctaagcaaccagcttttcaccaattgcgttcagttgagcaacttggctacataacagtgcttacacaaagaaatgattcaggtgttcggggattgcaattcataattcagtcaaccgtgaaggatccatcaaacctggatgacagagtggaagcttttcttaatatgtttgaagggactctataccaaatgcctgatgaagagttcaagagtaacgtgaatgctctcattgacatgaagttggagaaatacaagaatataagagaggaatcagcgttcttctggaaagaaatttcggaaggaactctgaaatttgatagaaaagaagtggaggttgctgcactgagggatcttaagaaagaggagttgatagagttcttcaacaatcatgtcaaagttaatgcaccacaaaagaagatactcagtattcaagtttacggcggtctccattcctcggagtacgaaaagatagtccacgatgagccacgaccaaattcctatcaaataacagatatattcaacttcaggaggtcgagacctttatatggttcatacaagggaggtgttggtcagatgaagctataagtcaacccttttgatattcttgcaaattccaaaagaataatccttttacgtgtaattttgatcattattaaagaaacttttttgtggacagatgttgatacatctgtatttccacagttttctttcgatacactagtcaagcctagacctttcaattctcctggcgatcactttgtgggttctaatcacgatcatctatatcattcttaaaggaactttttgtggatatatgttcataaaaaaaaaaaaaaaaaaaaa

SEQ ID NO: 100863 - DNA, 3208 bp, Oryza sativa
  Clone ID: PAT_MRT4530_98538C.1
atggattcgaggccccccgagaccgacgcccccgccgaggcggtcccaccggcggcggcggcggcggcggcggcggcgggcgatgtggagatcaccaggccacgcaacgacaagcgcgggtaccgccgcgtcgtgctccccaacgacctcgagtgcctcctcgtcagcgaccccgacaccgacaaggcggcggcgtcgatgaacgtctcggtgggctacttctgcgatcccgaggggctcgaggggctcgcgcacttccttgagcatatgcttttctatgctagtgagaaatatcctatagaagacagttactccaagtatattacagagcatggtggttcaaccaatgccttcacaacttgtgaacatacaaacttcttttttgatgtgaaccatgattgcctcaatgatgctttggacaggtttgcacaattcttcataaagccattactgtcagccgatgcaactcttagggagataaaagctgttgactctgaaaatcagaaaaacttattatcagatccttggcgaatgaaccagaagatctttcatcagaaacatatgcctagtgaaactgattgtcatctctggttgaatctacaagttttgcttactgacaagagtgttgtgattctaggaaagcttcaaaaccatatttccttggagagccatccatatcacaagtttggcactggaaattgggacactttggaggttaaaccaaaggagaaaggattggacacaaggcttgagcttattaaattttatgattcacactactcagccaacttgatgcagcttgttgtgtatgggaaagagagtcttgacaatcttcaaactcttgttgaaaataagttttgtggtgtcaggaatactggaagggaacgattttcctttcctggtcatccgtgttcaagtgaacacctacaggtccttgttaaagcagttcccattaaacaaggccatactttgagaatactatggccaatcaccccaaatattcgacattacaaggaaggttgggctatgagtttggaagcaggggaaggtgattggagttatgagttttctttcttcagtgttgtcataaagctcactgatgtaggccacgagcacatggaggatattgttggactgttgttcagatacataacattacttcagacctctggcactctgaagtggatttttgatgagcttcaaactatttgtgagacaggattccactatcgagacaagggtcctcctatccattatgttgccaatatttcctcaaacatgcagatctatccgccggaagattggctgattgcatcgtccgtgccatcaaaattttccccagatgctattcagggtatattaaatgagttgactcctgataatgttaggatattctgggagtccaaaaaatttgaagggcaaacaaacttaacagagccgtggtatggtacatcatattctgtggaagcagttcctccatccattatacagaaatgggtagagaaagctcccgtggaagatttgcacatgccaaaacctaatatcttccttccaagtgatctttcattgaaaaatgccgaggagaaggcaagttttccttgtatgttgaggaaaacactgttttccagagtgtggtataaacctgatacaatgttcttcacacccaaggcctatatcaagatggatttccactgtccactgtcccgtagttctcctgaatcatcagttcttactgatgtattcacaaggttgctcatggattatttaaatgattatgcttatgatgctcaagttgctggtctttattacggtgttaggccaaatgacactggttttcagataaccatggttggctacaatgacaaaatgagaactcttttggagactgttattgggaaaattgctgagtttgaagttaaggctgaccgtttttctgtgataaaggaaactataacaaaggagtatgagaatttcaaatttcggcaaccatatcagcaagctttctactattgttcattgatattagaggagcaaacgtgggcatgggatgaagaacttgctgcagtatctcaaattgaagctagcgatctcgagaagtttttgcctcatctgctggggaaaacatttattgagagctactttgctgggaacatggaaccgggtgcggtaaaaggtgttatgcagcatgttgaagacatcttattcaatgcacctgtcagtctgtgcaaagcattaccctcatcacagcatcttacaaagcgaattgtaaagcttgaaaggggtttgaggtattattatccagcattatgcctaaatcaccaggatgaaaattcttgccttctgcattatattcagattcatcaggatgatctcaaaaaaaatgttatactccagttgcttgctcttgttgctaagcaaccagcttttcaccaattacgttcagttgagcaacttggctacataacactgcttagacaaaaaaatgattcaggtgtccgtggtttgcaatttataatccagtcaaccgtgaaggatccagccaacttggatgctagagttgaagctttccttacgatgtttgaaggaactctataccaaatgcctgatacagaattcaagagtaacgtgaacgctctcattgacatgaagttggagaaatacaagaatataagagaggaatcagctttcttctggggagagatttcggaaggaactctgaaatttgatcgaaaagaagtggaggttgctgcactgagggatcttaagaaagaggagttgatagagttcttcaacaatcatgtcaaagttaatgcaccacaaaagaagatactcagtattcaagtttacggcggtctccattcctcggagtacgaaaagatagtccacgatgagccacgaccaaattcctatcaaataacagatatattcaacttcaggaggtcgagacctttatatggttcatacaagggaggtgttggtcagatgaagctataagtcctttttttttttatgcttgcaaatttcgaaagaataatctttacacgtaatttcgatcgttcttattgtgggcatatgttgatacatctatatttccacagttttctttcgatacactagtcaagcctagacctttcaattctcctggcgatcactttgtgggttctaatcacgatcatctatatcattcttaaaggaactttttgtggat

SEQ ID NO: 100864 - DNA, 1092 bp, Oryza sativa
  Clone ID: PAT_MRT4530_98539C.1
atgggactgaacagctatatacagcaggagagctgtttccaggaaactataacaaaggagtatgagaatttcaaatttcggcaaccatatcagcaagctttctactattgttcattgatattagaggagcaaacgtgggcatgggatgaagaacttgctgcagtatctcaaattgaagctagcgatctcgagaagtttttgcctcatctgctggggaaaacatttattgagagctactttgctgggaacatggaaccgggtgcggtaaaaggtgttatgcagcatgttgaagacatcttattcaatgcacctgtcagtctgtgcaaagcattaccctcatcacagcatcttacaaagcgaattgtaaagcttgaaaggggtttgaggtattattatccagcattatgcctaaatcaccaggatgaaaattcttgccttctgcattatattcagattcatcaggatgatctcaaaaaaaatgttatactccagttgcttgctcttgttgctaagcaaccagcttttcaccaattacgttcagttgagcaacttggctacataacactgcttagacaaaaaaatgattcaggtgtccgtggtttgcaatttataatccagtcaaccgtgaaggatccagccaacttggatgctagagttgaagctttccttacgatgtttgaaggaactctataccaaatgcctgatacagaattcaagagtaacgtgaacgctctcattgacatgaagttggagaaatacaagaatataagagaggaatcagctttcttctggggagagatttcggaaggaactctgaaatttgatcgaaaagaagtggaggttgctgcactgagggatcttaagaaagaggagttgatagagttcttcaacaatcatgtcaaagttaatgcaccacaaaagaagatactcagtattcaagtttacggcggtctccattcctcggagtacgaaaagatagtccacgatgagccacgaccaaattcctatcaaataacagatatattcaacttcaggaggtcgagacctttatatggttcatacaagggaggtgttggtcagatgaagctataa

SEQ ID NO: 100865 - DNA, 226 bp, Oryza sativa
  Clone ID: PAT_MRT4530_9853C.1
acgcggacgcgtgggttcatatttaaaaaaaaacaaaaaatattgcttacatatggatggcataaatttggggacagcttgttctattagccatcgtgctctccgtactcaccgccgttgtgtcagaagcgtcggactacaacgacaataggctagaaactgacaaatttttgaaggcgcgcgttccgaaacccgaacaccatagtgccggaactacaacgcgcgg

SEQ ID NO: 100866 - DNA, 3580 bp, Oryza sativa
  Clone ID: PAT_MRT4530_98540C.1
atggagatggcggcgaatccaggtggttcaggaacctgcagcgatgcactattccgggagctatggcatgcttgtgctggtccgttggtcacggtcccgaagcgcggcgagcgcgtctactactttccccagggtcatatggaacagcttgaggcgtctacaaaccagcagcttgaccagtacctgccgatgttcaatctaccatccaagatcctatgcagcgtggtcaacgtagaactccgggcggaggctgattcagatgaagtttatgctcaaattatgctgcaaccagaagctgatcaaagtgaactcaccagtctggatcctgagcttcaagatcttgagaaatgcacagctcattccttttgcaagacattaacagcttcagatacaagcacacatggcggtttctctgttcttaggaggcatgctgaagaatgccttcctcagctggacatgtctcagaatccaccatgtcaagaactggttgccaaagatctccatggaactgagtggcatttccgtcacatctttcgtggacaacctaggaggcatctgcttacaaccggttggagtgtctttgttagctcaaaaagattggttgctggcgatgcatttatcttcctgaggggcgaaagtggtgagctacgggttggagtaaggagacttatgagacaagtaaataacatgccatcatctgtcatatcaagccacagcatgcatcttggagtccttgcaacagcttcccatgctatctccactggaaccctcttttctgttttctacaaacccagaacaagccggtctgagtttgttgtgagcgttaacaagtaccttgaagctaagaagcagaacttgtctgttggaatgaggtttaagatgagatttgaaggtgatgaagctcctgaaagaaggtttagtggaacaattattggtattgggagtgtgccagcaatgtcaaaatctccatgggcagattctgactggaaatctctgaaggtccaatgggatgaaccttcggctattgtccgtccagatagagtttcaccatgggaactggaaccattggatgcgagtaatccacaaccacctcagcctccattgaggaataagcgtgcaaggcctccagcttcaccttctgtggttgcggaacttcctccaagtttcgatgtggactctgatcagatctcacagccatctaatggcaataaatccgatgcccctggaacaagcagtgaacgttctcctcttgagtcccaaagtcgtcaagtgaggagctgcacaaaggtaattatgcaaggtatggcagttgggagggctgtggacttgacaaaactaaatggttatggtgatcttcgcagcaagttggaggagatgtttgatatacagggggacttgtgtcccaccctgaagagatggcaagttgtttacaccgatgatgaggatgacatgatgcttgtcggggatgatccttgggagaatgcatctaccatggttcatgcatcatgcatagctgaccctggaccagtgtggatcccatgccaggaaggatggctggggaggcagcatttccatcacctggcactccctgcgtgattgggccatccgtgttcaatcctgctgtgtgggggtagtaggatgccattggcatcctttatccatgtcctcagttttggtaaagctggtgactggtggtagacctgcaagaacggggcccggggctcgccatctcgtcgctgcaaccagtaaatagagctcgtcaagcagttcatgttccgtttcttcatgcaatgcatggagtatcatcatccgtagctaagcatcagttcttcagaggcggcaaaccagcgacgcggagaggcggcgacccagcgtggaggcagcgacccagctggcgggctccgacggcgcggagaggcggcgaaacggcggcacggagaggcggcaaaccggtggcgcgaagaggcggtgaggagaggcggcgacccatcggagaggtggcgaaccggcggcgtggagaggcggcgaagggagcccgcgactcggcggactggctccagcggcgtgggcttcttccacgcgtcgtcatcgtcgctcattgccggagcgaatggcggcagcgacggcggtggcggagctcgaactttgagttggggaacgtggtggcggcgacttggcaggctggctccgacagtggcgctgggttggtgtgggcgctggagcacgagagaggaggggattattgacgtggggaagagaatccatgtggggccaccatttggcgaggggaaccgccggcgcagcaccctcgtcctcccgcacgtccgatctgcccccttccacgccgtggttccgggagctgtggggggtcaacgccgacaaatagtagcagccgccgtcgccgaagctgatggtaatgaaaacggaaataagcatttcacttgtcacagggagaatgcaaactatggtctaaaatctgcatctgaaaataaaattgagctgctgaggggtgctcatagttgggccgacagtaatttaattgaggatgtactggcctctgtgaacaatgatgttggtgaagcatctgctttgttgaaagctatggcgtctccttgttttccaataagggaggatggactacctgatcagctttcttctgagattaataaaacacatggtttaccatcaggaaatggtacagcagaaaataatcttgtaaatgactcgcagttgttgcctctgccaatgaatatgtcgtctgtacccatagaaccggaagtggaagagctcgatgacgattactttaaccacaggaaagatgcattgaagattatgagggctgccacgaagcattctcaggctgcgagtaatgctttcttgagaggtgaccatgctgctgccaaggaactttccctcagagctcaagaagagcgatccgctgctgaagagctgaacaagaaggcagcaaaagaaatatttcgcctcaggaacagcaataatagcatttggaagctagacatgcatggtctacatgcatcagaggctgtggaagtactggaacggcatcttcacaggatagaattccagccaccagggaataatgcagcttcatctgatgaagtagctaggtctgaacccagagtgtctggtccaagcattgagcccggcccagggaaggtggtgtttgttcgtcccatacaggctatcttagaggtgatcacagggattggcaagcacagcaaagggcaggcctcactacctgttgcagtcaggggcttcctcattgaaaatgggtaccgatttgatgagctgcggcctggtgtgttctctgttcgtcctaaattccgtcgccggtgaacctgtggaagtgtgtactgtaccgccaaatggagcattacgctttgtggcatgtcatagtttatttactttgaaattgaatgtaacatgcaatagtttatttacgttgaaattgaatgtaaccatttgtaaaatgctcaagttgtttatctaaaacagaaagccaattcaattctgtaaccaaacgaatcggcaacgagtgcaatgtgctagtgttgacagc

SEQ ID NO: 100867 - DNA, 568 bp, Oryza sativa
  Clone ID: PAT_MRT4530_98541C.1
gcaaaaaacaaaaatgagcatttttcctttctccggaaaaattgttttgtacattaaaagggggcagtaccctttataaagccccacaagggggagtttacttccttacaaaaacgaactactaacacaaaaacaatagggaatgtgaatcagggaccacaatccccaaccaatggattgagcaactaagcggtttcaggttacaattaattcacataacccacccgatgaagcattacccgaaaggcgggcccccttcgctgtccttggaggggtcaacttcggaagggggcatgaactgccacatcgggtaccccgggtttccaacaaaaggcattatcagtttttgccccgcggtttgcccctgggcatgggggaagggggcaaggggtgcttgggggtacggggctggcatcaatggggggggaggcatgtaggctggagttgcaatcaaaatcttcacctgctgctctaagggctccttctctactttcagcttctgcttctcataacaaagctcggccttttttgccttaagttctttaatcttatcttcacggacccgtgg

SEQ ID NO: 100868 - DNA, 272 bp, Oryza sativa
  Clone ID: PAT_MRT4530_98542C.1
ccgccgccggtaaccgcgcggttaccgcggttaccgggcttaccgcgggggtacggtaatataaataccgtggtaacttccgccggggcgcggtaaccctggccccggcggtaaggtaaaccctttactgatttgaggttactacggtaatcgcgactgccgccgtccggccgcctcccctcgatctcctttgaatctgccgtcgctccccaccgctcgaatccaccatgatcaaacccaccagccccgctgctataatccgccagcgccat

SEQ ID NO: 100869 - DNA, 250 bp, Oryza sativa
  Clone ID: PAT_MRT4530_98543C.1
tgggatcctcgagccggccgggaccccccgcctcgccgtctcctggtggtaacatcaagcttcacgcagctccccgctccggtcaaatgcgcccgaagcgaggcgtcagctcgtcggagacgttgaataacaatacggcgaagtggacgaaaccgctgttctagaagagtgcgagaaagttcgagacccggcgaggagctggcgatgaagagagaccttctacggctcgacccgcgcgccaaggtgagtg

SEQ ID NO: 100870 - DNA, 1236 bp, Oryza sativa
  Clone ID: PAT_MRT4530_98544C.1
atggcgaagaaatccaagctgaagaaggagggatccagtacgacgaggaatccggcggccgagctcaccgacgacctcatcgtcgacatcctctcccgcctccccgcaagtcggtctgccgatgcaagtgcgtatccaggcggtggcgcggcctcatctccgaccccgaccaccgcaagaagctcccccaaaccctcgccggcttcttctaccgcagcgagaacgaatcacgctgcccccaagctagcgcgccatttcgtcaatgtcaccggcagaggccggcctctcatctgcccaaccatctccttcctgcctcgcttcgacttggagggcatgaggatggtggactgctgcggcggcctcctcctcttccgctgcttcatgagctcggacgaattctgctacctcgtgtgcaatccctccaccgaggaatgggttgccttcccagattccggctacaaccccgagtggcagttcttcacccatttggggtttgatcctgccgtctcctcgcacttccatgtctttgagtttgtgatgggtgattgtggatttgtggaaggggtggagatctactcttcggaaaccggattatggaatttcatggaaagtgaatgggaccctgaaaccaccgtatatgatcgcacaaggacctttttcaatggcatgctgcatttagttgaagaggggattgcgatattatcagtagatgtggaaggggagatatggcagagcattggcgccccgagaccggaactagaaaatgtggaagatatgtttgctttggtgtcttgtttcatcggtcaatcccaagggaaattgtgctacctcagtgcatatgacactgtcccttggaacctgtcaatatgggttcttgaggattattccaaggatgaatggacattgaagcataagctgactaccgaacagctgtctgagaagataaactgcaagtgcaaaaccgacttcgacaaggcttggtactaccacgtggtcgcagttcattcagagtgcaatttgatttactatattgctggcggagatacactgatgtcatatgacatgggtcataaacaatcgtgtgttattgaaaatcttgggccggtgttgcttggcattttttgccatgaaatgagtgtaagggttgcagtcaaagctgactacggttctggatcgcctgacaaagttctcagaggcttcactgaagcattacgaggagctcaagcagaattatga

SEQ ID NO: 100871 - DNA, 626 bp, Oryza sativa
  Clone ID: PAT_MRT4530_98545C.1
atgcctagtttctctgttaaatccacccatttacctttaattcacttacatatgggacctgccgagcacggcgtctccggcgtcgaccatcgtgccgcgaaggttagcgcatcctccctcggcgagcgccctggcgacaagcgccggaccaccatcgccacccgaccacacagcgagcgcgcatctctccactagacgcgctcgtccgcggcctctcggcggccaccaccggctacggcctcgcggcgcccggcagatcccacggcgcgcgggagtttcacccggaattggaggaggccgaggactacgcgtttcttggacgtgaggtggatgaggctcgccaccggcgtggagtgcgtccgcagcacggctgcggcggccgtcgcgcgttcctcccagagtcgcgcgacgaggtcgacgtcacgatgacgagctatttctacccttccgtgccgtctctctaccccctccgcctccacttgctgcggccgcgcgggtacctgccgagcacggcgtctccggcgtcgaccatcgtgctgcgaaggttggtcgcggcaattacggcgttgcgcgcgacagcgacccccgcgacgagcctgcgcgcgtcggccgagcgtgacgattag

SEQ ID NO: 100872 - DNA, 675 bp, Oryza sativa
  Clone ID: PAT_MRT4530_98546C.1
ttagccatgcttaattaccactagctcagttgcgtgctgggcactgtttgtatcagtcatcaacagatcgatcttatagcacaaaacaatcttatagcacacagcatacagcaacacgaacatcagaataacaaaacaagcacacatacaagacttcctcctctacagatggacatcaacgaacaatttatatggaaaaactcggcactccccaaggtccaattttttgcttggctactgacaaaggataggctacccacatgcaagaaccttcacaagaaaacaatcatccaattgccgttgtgcgctatttgtcagtctgctgatgaaacttcaagccacctttgcttcctatgcccgtttgtggtcagcttctggaattcaatccacagatatcctggaggcgtgcacactcatgacctgcacttgattgctctaccaaacaatctgccgcaggcacatttcaaaaccttctatctgctttgcctatggagtatttggaatcaccgacaagaagttgtcttctctgaccagcaatcatccttacatcggcttcttctccgctgtaaggatgagactactctgtggacagaacgacttcttctgcgcgacgatcgcctagttgctataacctggaaatgtattttcaacatcgcaattaattctctacacatg

SEQ ID NO: 100873 - DNA, 522 bp, Oryza sativa
  Clone ID: PAT_MRT4530_98547C.1
gagataatatacttcagttgtaaataagcagaagaaacactgaatgacaggtggattcagttatgttcactatggtcgtttttctacacatgtaaataaatatcagtttgtcaccaaactgtcaacaaaaaatgagagaaagaagaaaacaaaaattgcgtatggccaacaagaacacgggccaaaattccaatggacatttcttctaacaaagatgcagctataagtgacaggtatcttgccacacaattatcccctgaactacagcaagcgtgtccgaaaagaacttgctcaatcagtagcaactttcctcctggcagcccttgcgttatcatattcaaacttgagcacatctggaatgtgtgaagtatccttcatatacaaccacctcgctattgcactctcctcaatcattggaaaatattcaacaagcatggtgttgacaatccaataccagattgcaccaaacacaaggcctactaccgcgccggcaaatacctgcgcgacggtgtggtagccgag

SEQ ID NO: 100874 - DNA, 431 bp, Oryza sativa
  Clone ID: PAT_MRT4530_98548C.1
tctgattggctcctgctatggtcgttgtccgcgttcacgcaggtgccacttgcccacaacgtggagaggaacatcatatcatacgtgctacctcctcccctgctgcgcattttctttcctccccggaatctgcatctccgacgacgccgaccggcagaggagcaggacggcagtagcctaatgtctgagcatgtcctacagcagatgctgctccacatggccaccgacgccggcaaggacatctgccaagaaggtcggcctcgtctaccagctcaacataccccccaagaataccggagctgacgaggagacacttcgtcgctacctcaaaggggctaggccaccacaagtgccgccgaggtgaagccagatgcgacctactccttaacggattgtgacttactctcgatcgccacggctaagatgaaccc

SEQ ID NO: 100875 - DNA, 349 bp, Oryza sativa
  Clone ID: PAT_MRT4530_98549C.1
tccaccgccatgcggtgttcacaagcccaagtcgcgtcgcaccgaagcagagtttacaaggagaggagcggagcgccatcagccggccgaacgagtgagccgatggctctcgctctgtgcatctatgatgttgatgccgttgcctacgtggcacgggtgctcgcggaggggctgacgacgccgagggagtacctcttgtggtccgagtggcggcgattaggaggatagtggcggcggaggaaggtacgggcgcttccacgatgacgcacgcgactacggtggtccgtctactttatcgacaggattgttaatgggggtgattccggtaaggacccccatgttgttaagg

SEQ ID NO: 100876 - DNA, 675 bp, Oryza sativa
  Clone ID: PAT_MRT4530_9854C.1
atgtccatggccggcgacgtctggttcggcttctcctgggtgctcaaccagctccccaaactgagccccatcaagcgcttcccggacctcgccgccctcgctgaccggcactccgacgagctccccggcgtcgacgtcttcgtcaccaccgtcgaccccgttgacgagccgatcctctacaccgtgaacaccatcctctccatcctcgccgccgactacccggtggacagttctaggcgtaaaagcctagcaaaagctatttctgaaaaagcagcaaatgaggttgaggtagcctcggcttcaccacaaatggctgcacattttggttacagaagggagagtcagatggggagggagagtgttgtgtacataggtggcacgcaagaaacgggtggacgtccacccgagaaattagaatccatcctcggttgttatttctttagttttttcctcactgacatatatgggtcccatgtgtgccacgtacgacaaaaccactatctaaacagcgagggactcgatttgctccggttttcgaagatggaggaggtgttatacccagtattgcagctgagggagacactatgggaggacgacatggggcaccggggagagcgaactggaggaattcgaggtggaaggggtgttggacaagctgcgagcacgcggagatga

SEQ ID NO: 100877 - DNA, 266 bp, Oryza sativa
  Clone ID: PAT_MRT4530_98550C.1
atggtgggcagtggatgtggcgggggcgcagccagtgggatcgagcctgccctccacctggggatgcggaggatggtgccggcggcgggcgtcgacaacgatggcccggcaaaggtggaggcgaaccccgtcgacgaaggagaagcggtgtcggcgacggcttctgggatgcgtcggtggcaaggagatccggcgggggggcgggcgggagaggaggcgtcggtggcagggagatccggtggcgggcggcgggagaagaggcacca

SEQ ID NO: 100878 - DNA, 2526 bp, Oryza sativa
  Clone ID: PAT_MRT4530_98551C.1
atggcacagccacgcactcacgtcgtaggcggcctccgcgccctccgaaccgcgatcgtctcgccgtcgccggcgccgcccgcaggcgagcgcgctctacctctcaccttcctggacgcgcagtggctcagcgcccaccccgtcgagcgcgtcttcttctaccgcctcggccccggcggcgacgacgtcgacgccgtgctgtcccggctggtcgagtcgctggcccgggcgctccacgccttctacccgctcgccggccgcgtccgcctcacgcccggcgagaccaaccggtacgagctcttctaccagcccggcgacggcgtggcgttcactgtcgccgagcacgacggcgtcggcgtcggcgtcgatgagctggcggacacggacgagccgagggaggttgccaggattgccacgttcgtcccggagctcccgaagggcggcgcggtgctcgcgttgcaggccaccgtgctgccgcccgaccgccgtggcctcgctctcggcgtcaccgtccaccactccgcctgcgatgggcagctgcagaacgtcaagaacgccgtcgccggcgagcccgcacgtcgcggcgtggcgccgccgcgttgcacgtcgctcgtcgccacgctcggcctcacgtggctgtgcttccgccgcgctgggcccgacggcgaagaagggcctcgcggtgacggccgcgcccacctcgtcttccccgtcgaccaccggtcgcggctggagccccgcgtccccgaaaagtacctcggcaactgcatcggcccgggctttgccacggcacacgagacggagctcgccaccaccaccaccaccgccgatggcctcttcacggcttgcgccgcggtcgccgccggcatcgacgaggcggtgcgcggcgagccgacatactgggagcggtgggtggagcgcatcaccgaggcgtgcgcggacgacatgtcgctgtccgtggcaggatcgacgaggttcggcgtgtacgacatggacttcgggttcgggaggccggcgaaggtggatgtcgtgtccgtggcgaagaccgacgcgatgtcggtggccgaggaccgttccggctccggcggcatcgagatcctcagtatttttcaatattttattgaccactctatgctcatagtgaaaaaagaatgtgcttcacgatgctggagccaaaggttgaaagcttccccgtcccaactagtcagagtcggtccttcaccaaccatcaccgagggcctcctcacggcctgcaccgctgaccgctgtcgccgccggcatcgacgaggtttcggcgtgtacgacgtggacttcgggttcgggagggcggcgaaggtggacgtcgtgtccgtggagaagaccgacgccatgtcagtggcggaggaccgttttggctccggcggcatcgagatgggcatcgctctgccgtcggagcgcagcgcatggcgaggttccggagcgcacacgcacggagagcggtgcgaacagcggaggcacaccggtgaaaacatcgacgatatgccgaagcggccaccgccgtcggagagccaccacggggccagccgctcggcgaagcggacgtcgtcagcgtcgagtagccatggctcatcagggagcgtggaggagcggccgtactccgttcgggtcgtcacggctcatccgggcgtatggaggaagggatcggcggcgccgtcgtgccgacaccgctcccggcgaacggacaagcggccgtcttcgtcgggtcgccacgggtccgggcgcacagcgaacaagcatgagaggccggcgccggcgacgcggccgcggcagcggcggaagaggaagtatctgtaccttgtgatggacgactgggagaaggggtacggcatctacagggtggacgtgagctcgttcgaccctgacgccgagttcggctccgactccgaagcggagtgccaggcgcggaacagggacgacgagccctccccgctcgtccgcgtggaggcgccgatcaattactccaggtggatcacggcacacggctccaagatcttcatgatgtcgccggtgtccgccgaagtgatccccggcatcccggtgttcgacacggtgaccagggcgatgatggtctgcccgttgcccaagaatctcggggaacagcttcagcccttttgcgtgtccgtcggcgacaggctcgtcaggctgtgcaaccctggcttccaagtcctcggcgcccagccgccgcctcgcagtggccatggctacgtagacgttccgtgggcctgggaggaaatctccgacgacaacgcgttttcgatgcctcccttcacctccgacagggtgagcgcctacgcggtgcaccctgacgggcggcgaaccatctgggtgtccgtcaggaagccggtcgtcgacggcaggggcggcggcagctacggcgaccggaacaacaccttctccttcgacacggagcacctcgagtggacgcacgtcggcgagtggctgatgccgttcgtgggccgttcacgtcgcggatcggctcggagatga

SEQ ID NO: 100879 - DNA, 1650 bp, Oryza sativa
  Clone ID: PAT_MRT4530_98552C.1
atggcacagccacgcactcacgtcgtaggcggcctccgcgccctccgaaccgcgatcgtctcgccgtcgccggcgccgcccgcaggcgagcgcgctctacctctcaccttcctggacgcgcagtggctcagcgcccaccccgtcgagcgcgtcttcttctaccgcctcggccccggcggcgacgacgtcgacgccgtgctgtcccggctggtcgagtcgctggcccgggcgctccacgccttctacccgctcgccggccgcgtccgcctcacgcccggcgagaccaaccggtacgagctcttctaccagcccggcgacggcgtggcgttcactgtcgccgagcacgacggcgtcggcgtcggcgtcgatgagctggcggacacggacgagccgagggaggttgccaggattgccacgttcgtcccggagctcccgaagggcggcgcggtgctcgcgttgcaggccaccgtgctgccgcccgaccgccgtggcctcgctctcggcgtcaccgtccaccactccgcctgcgatggggtgagctcgacgcacttcctccacacctgggccgccgcctgcgccggcgaccgggtgctcccggagccacccgtcattgaccgcacgatcatccgcgaccgcaacgacatgtacgacgcgttcgcctcacccgcgagcgaagccaaacatgcgttcgattcgcccgacgtcgccggcaagctcctcgccaccttcactctgtcgcgacagcagctgcagaacgtcaaggacgccgtcgccggcgaggccgcacgtcgcggcgtggcgccgccgcgttgcacgtcgctcgtcgccacgctcggcctcacgtggctgtgcttccgccgcgctgggcccgacggcgaagaagggcctcgcggtgacggccgcgcccacctcgtcttccccgtcgaccaccggtcgcggctggagccccgcgtccccgaaaagtacctcggcaactgcatcggcccgggctttgccacggcacacgagacggagctcgccaccaccaccaccaccgccgatggcctcttcacggcttgcgccgcggtcgccgccggcatcgacgaggcggtgcgcggcgagccgacatactgggagcggtgggtggagcgcatcaccgaggcgtgcgcggacgacatgtcgctgtccgtggcaggatcgacgaggttcggcgtgtacgacatggacttcgggttcgggaggccggcgaaggtggatgtcgtgtccgtggcgaagaccgacgcgatgtcggtggccgaggaccgttccggctccggcggcatcgaggtgggcatcgctctgtcgccggcgcgcatggagcggttccggagagtcggtccttcaccaaccatcaccgagggcctcctcacggcctgcaccgctgaccgctgtcgccgccggcatcgacgaggtttcggcgtgtacgacgtggacttcgggttcgggagggcggcgaaggtggacgtcgtgtccgtggagaagaccgacgccatgtcagtggcggaggaccgttttggctccggcggcatcgagatgggcatcgctctgccgtcggagcgcagcgcatggcgaggttccggaggtgggtcgccgacgacattgcctggctcctcgtcttcccaacacaactag

SEQ ID NO: 100880 - DNA, 278 bp, Oryza sativa
  Clone ID: PAT_MRT4530_98553C.1
aaatgagaggcaggaaaaaggtgagcaaggaaaaaagaaaggcaggcagtgtggctccctctgcttttgttggtgagccaacaagagacaaaaacatggccacactttggagagtttgggagggtggtctctcacggcataaagtcctaaaaaaggagggaataggaggtgatacggttgggtttgacaccggctgggcagccaagaagcagccactagtcctcccagacctggccaggagggtcttcatcaagaggttgaccctgccacttggatga

SEQ ID NO: 100881 - DNA, 924 bp, Oryza sativa
  Clone ID: PAT_MRT4530_98554C.1
atggcgcagaaatactcctgtggtgcctcctccgctctctccggccgtctctcctcccgcctcttctccctcttgcggcgacgacgcatcgcactggattccagccgccgctcgcgcctgcgctgccacctgaacccggagctccgaccgaggacgtgcgtgacgaggtccttgcggctggcgcgcgagcacatcttcggcggtgggtggccggtgaggcgacgaggagcatccgcatcgctcccctgcggcatcctcaaccgccaccgtggcatggggaaagaggggagaggaggcggcggcgggctggactgcgcggcttcttcgtcgtccttacctccggatctgcgcgtggatcgagaaagcctgacgacggcacgtggctataacagcgaggggaagacgaaggggccgcgacgaggggagaagggtggggaggagggcggcgaaggcctcccgtggcgcctgcttcttcgcggggaggtcagtgatggcgacctccatcgcctccatcgccaccgaggagcacaccgcggtcatcctcatccccgcgccgccggcgctgccaggggctctgggtggcgtgacggaggtcacagccgagaaggagaggaggtggtggcgacgcccgccgcggaggccaaggcgcagcaggagtcggcgtcggcggggccgaagtcgcgcagatcgatcttgcgatgcagtaggagtcgggcagtcggcgccggcgaggcagaggtcatgcagctcctctcccaccggctgccgcgcgccactctctcctctcccgctctcgccggccgctgcgagcccctcctctcccaccggattgaattgccacgtaagcgccacatcaacgctacatcagatgaagacagtcaaattagccacgtatgtgccatttcagccaaaaccgccatctaa

SEQ ID NO: 100882 - DNA, 1737 bp, Oryza sativa
  unsure (1)..(1737): unsure at all n locations
  Clone ID: PAT_MRT4530_98555C.1
atggctgacaagacccttcgcgagttcgctgctccctctgctgacaatgtggccattggaccgcaaatcaacatgggagacgtggattttgatttgaagtccaccctcatcacgatggcgcaggctagcccattatgtggcaagcctaacgagaatgccaacgctcatctgcagcagttcctggagatctgtagcatgtacaccatcaagggcgcccaggggccggttggccaccttgggcttaggatgcaggtccctgccgatggcaaccctaggaaaggaaggctcggaaggcgtgatatcatcgagatcgagccattgagggcgaggcgtagcacatgccgtttcctctttgatctggtggatgttggcgctctcgagctcaccaccggaaagtcggctagcgaccaaggagggcggcggtggggccttctccgaaggtggcgcatcctcttaggcgcgcgggaggcagtgaacgccggtggcgggcagtggtggcggcaaatccgccactactgttgccggatttggcccgcccaggctggatccggtcgaagtgggtggcagcgccatcgcgcggcgtggcgcgtggccggcggcgggctgctgcagttcatgttggcgcgcgaggccagcgcgcgcgggtggcagaggccggcacatgtgaggcagtgcacgtcgccctattggcggtccggtggggtggtcgtcgtcggggcgcggcggcgactctggcgcctctctgaaccactgtggggtgctttcctgcaaagcccggcggttcttggtggagatgtggcctccgccacaaagctcttctttgatcttgtcggaaacatggaagactccgatgtctctgtagccctgtcttcaactttcagttcctcttccagcaggctagacctcctcgccttccttgatgctccacccttctgttggccgagtcggagttgctgcatcatatttacgaatgatgtcgatactgaggaaaacaacatccttacttctgaaattaaacatcatcgatcaaggcccggcctgcaccaccccggcggctgcaacgccgcctggaacaccatgccggcgaacagagtggtcatcgccatcaggcatcagccaccggcggctttcgatctcgctgacaccgctggctgacatatcgcgcgccatcactgccaccgccgctgcagcctgcactggcaacaccaacatccctagagagaaactgcaaatattatcgttgccaagcaacgtcgcaccccaacgacgtagcagctctgactccacaccaccaggccgggcggagagaggcaggagcacgccgccaacgggcggcagtcctcccntcgccggcacgcggccctcgcgccaccgtcgccgccgcaacacggccctcgaactgcaccgccaccaccgcagcgcggccctcgcgccgctgtcgtcgtcgaagcacggcccaccctccgccgccgtcgtggcagtgcggccctcgctccgccgctgctgccgccgccaacgnccttcggccgcagcactccgtgcccacgacggagccgtcgccctgcaccgcgcggccagatccggccgcgggagcaccggatctggccaccgcggtgccggatccccagcctccctcgccgtcgagcgcgcctccctccgcctggctcgccacgctccgccccgtctccctcgcgccagagacgacgcgtcgccgtggttacgcctcgccgccgccat

SEQ ID NO: 100883 - DNA, 3232 bp, Oryza sativa
  Clone ID: PAT_MRT4530_98556C.1
ccgcccccgccgccctcagccaccgcctccgcgtcaccgtccgacgtcgccgcgctcgattgtgcaccgtcgtttccccttttgctctgcttcaccgccgccgcgctcgattgtgcgccgccgtggtccgcacgcacctcctctcccctttcgccgcgtgccttcttccgccgccgcacgtgtgtcgccggtgaccatctaggctgagcggcgacgcggcggcagcaccaccgccggcggcgcctccgccgccctcagccgcctcccccgctgcctccgcgccgaggctgcagccctcagcaactgcccccgcctgtctggactgtcacatgtacgccacgtagaccaaaaccaccgcagattgggttgaggggggtaatttgttcggtttgtatagggtaatttgtccggtttgtatagttgagggtgaagaatgtccggttttgtggttcaggggggtaattcggacgaccgcgatagttcggggggtaattcgtactttttccttgcatggcgccagcctctttggcgccgtccccctgccgacgtggcggggcgatgctgagggaccgcgcgttcgacgccgggtacaaggacgacgtcttcgtctgctcgtcgctgctccacctctacgcgagatggggcgccatgggcgacgcggtcaaggtgttcgtccgaatgccgaggagggaccgcgtcacctggagcaccatggttgctggtttcgtgagtgctggacagccactggatgcgattcagatgtacaggaggatgagggaggatggtgtgaagggagatgaggtggtcatgattggggttatacaagcgtgcacagcagccagaaatgtccgaatgggagcttcagttcatgggcatctcttacggcatggaatgaggatggatgttgttactgcaacaagcctcgtggatatgtatgcaaagaatggactacttgatgtggcgtgccgagtttttggtctgatggtgcaccggaatgatgtctcatggagcgcgatgatctcaggttttgcacagaatgggcaatcggatgaggcacttcggttgttcagaaatatgcaggcttctggtattcagcctgactcaggagcacttgttagtgctctgctagcttgctcaaatattggattcttgaagctagggaggtcagtacatggtttcatcgtgaggaggtttgattttaattgtatcctcggtacagcagccattgatatgtactcaaaatgcggctccctagcaagtgcacagatgcttttcaacatgatcagtgatagagacttgatcttgtggaatgccatgattgcgtgttgtggtgctcatggacgaggccaggatgcgctcactttgttccaagaaatgaacgaaactggaatgagaccagatcatgccacatttgcttctcttttgtctgctctaagccattctggtcttgtggaggaagggaaactatggtttggtcgcatggttaatcacttcaagatcacacctgctgagaaacactatgtctgtctagttgatcttttagcacgttccggtcttgtggaagaagccagtgacctgctcacatcaatgaaagctgagccaaccgttgccatttgggttgctctactttcaggctgtctgaataacaagaagctggagcttggagaaagtatagcagacaatatccttgaattgcaacctgacgatgttggcgttcttgcgttggtctcaaatctctatgctgctacaaagaaatgggacaaagtcagacaagttagaaagctaatgaaagattctggaagcaagaagatgcctggctgtagctcaatagagatacgcggaacacgccacgtgttcgtgatggaagaccagagccatcctcagcgtgaagagatcgtaagtaaggtggcaaagcttgatttagagatgaggaagatgggctacattccgagaacagagtttgtgtaccacgatctggaggaggaagtgaaggaacagcagctcagctaccacagcgagaggctggccatcgccttcggtttgctgaacacaggcccaggaacaaggcttgtgatcataaagaacctcagggtctgtggtgattgccatgatgccatcaagtacatctcgaagatcgcggaccgggagatcgtagtgcgagacgccaaacgcttccaccatttcaaagacggagtctgctcctgcagagattactggctaccgagaaccagcatggcaagaggatgcgtgttgctgtatgtatacccaactgatccccctaggcggggaccatcagaagaagttcagccacgcaaggcggccacgtccgtccgtccgtcacgggggacccggcggcgtggtagtggtgcggtgcccgtcgccttcgccattcccggccgcgggcgtcatctgtcgcggcgaaaacgacccgggaggtggcggcaaaggcttttgcttcctacccgctggggcgcgcgcgtcgccgatgatcacccaagaccgctgcactgcacctgccccatgtgggagcagcatccagcatggccagttcgcaacgctacaccgctccgatgtcgtcgtcatcctcgccgcctcctctgcgccctcatctgcgtcgtcggcctcgccgccgtcgcccgctgcgcccgtaaccgccgcaacagcggcggagccggcgccggcgccggctccgcctccccgtcgcacagcccggcccacgcggggcacttcggcggaggagggagcggaggtaggcggcgtgacgacgacgacgacgacgacgacggcggcgacgaccgccgccaaggggctgaagaagaaggcgctgaaggcgctgccgaagctggcgtacgcggacgcggtggcggcggcggcggcggcgaggggcacggtggtgggggaggaggaggaggggaaggtggaggtgctcgccgagtgcgccatctgcctttccgagttcggcgagcgggaggaggtccgcgtgatgccgcagtgcggccatggcttccacgtcgcctgcgtcgacacctggctccgatccaactcctcctgcccctcctgccgccgccccatcgtcctcgacgacccctcgccgcccaagcgctgccgcaagtgcgaggccatagtcctcgaggccgtcgtcgccgcctcctcctcctcctcctcctccgccgccaccgccaccggcagcggcggaggcggcggcggtggcggtggccgattcttgccgtag

SEQ ID NO: 100884 - DNA, 214 bp, Oryza sativa
  Clone ID: PAT_MRT4530_98557C.1
cgccacgcgtcgtgcagactcactaatagaaacctcgcaagactgatcgaaaccgtcgaatcggagccgcgcactgtcgcatcatgagagaagactctcgcgtcgagagtccgcgtcacagaggcggcagtacgctgtgcccgagcgagctgcaagcatgcgtactgctcatctatgcgccgtgatcactgcgcgcgcgcgcgcttctgcgctg

SEQ ID NO: 100885 - DNA, 304 bp, Oryza sativa
  unsure (1)..(304): unsure at all n locations
  Clone ID: PAT_MRT4530_98558C.1
tttttttagtcgatatcaancatcaacaatcaataaaatcgatcggcagatttctgatcaaaacatacattacagaaaagtagagtggaaaatcgtctatgtggcatccaaggatctggagtacttaacaccaggaaacagtagttcttaaattctcaaatccaacgagaacagagggggagagggtacaacagattaatcgcgagcaagacgacagcagtngccgcctaggcttgcatcgtcatctccgggcgtgggngacgccgccgggggcggggtcgcaaganancacctngttgggcag

SEQ ID NO: 100886 - DNA, 494 bp, Oryza sativa
  Clone ID: PAT_MRT4530_98559C.1
cggacgcgtgggtaagatgttagcttatggaccactgcttgatgaagaacctgatttaaaattgtatcttaaattttgcagttcattcttattgtaactgctagctcaattggagaggagctattctatcgtgtcgctgtccaggtatttgcttcatgtccattatctatttctgcttaattagatttctttcgaagtcctattacagattacttaccttacctacatggcttgtaattgtaaatggtactacagtaatgatctgtgcagtaattggcatgcgttttcttttccttattctcacgttgtagagcgaatataactgaaattgtagggtgcgttggctgatatttttctgagaggcacagagctcatgaaagacgctcgagggattgcatccctggtatgaattctactgctttcagttcgatggaaatggagtcctgaatttgggatatttgcgctgatcttaactgtgctgattgatatgtgta

SEQ ID NO: 100887 - DNA, 975 bp, Oryza sativa
  Clone ID: PAT_MRT4530_9855C.1
atggcgcccaagaggaagccggacgacgacgacgacgtgggggaatcaaccgacgagttcgcaaatccatccggcgacacgatgcagttcaccaagccggtttacctcgtggcggtgcgcgacgacgaccaggcggccgcctactccgttctgaagatcgatgccgccgccgttgccggtaacgacgagccgcggcgcgtccgcgccgtcgccgtgctgacgaccggcaccgagcctggcatgtccttcgtcacggcgcgttcgaggcacgggtcgtggattgtcggcgtcggcggtgggctaagagccggcaccatcatcttcgacccgggcaccatcatcacgcggctcggctaccccaagcacaagcccgtcttgatctcccatggcagcgagccggaactagtggtaggtacttacgcttttcatgtggtgaacaaaatttgggagaagatccatgaaaagaacctgccttttgttggtcaggcagtgcaccttggcggcagcctcttcgccgcctgtcccatatccaacactgcctcaacctcaacatctgcctctgtgttccacatgtccatcaaaatctcctcgtccattccctcattatcaatccaaaagttcaaggtgatggcatcagtggacaagattaccttcccgctcttctgccccatgggaatgggcagcttctgttgcatcaggttggggccatctcgtctccggcacagacgaaaaaccaactatcgtcgctggcgcagcccaaaaaccagctgcttgaaggaggtccatgttatctcgactgcctttcggatagagaacattgaagctatcatgactcattgtcagtcccaggaatctaaggctaaggatcagctacttgcactacaagtgaaggaacagatgcattcatgcgaatccaaggaaatacatggtttgctgggttctggcattcctgtggttgctgccctctccatgtaa

SEQ ID NO: 100888 - DNA, 116 bp, Oryza sativa
  Clone ID: PAT_MRT4530_98560C.1
tttcttcccgtccggcaacgcagcctcaccgttgaggcggtggagaatgccgcggggaccccactcaccgcatgcgccatggccgccccggaggcaccctcctgctactgaaggga

SEQ ID NO: 100889 - DNA, 1224 bp, Oryza sativa
  Clone ID: PAT_MRT4530_98561C.1
atgagaagagcttggtttcatgactctcatctagcacaagctcccggtctgactcaagccgagtgggctgggcctgggccgcatcacgcaggcacacgagctgggatgggatcatttggactcttccagttcgcgccttatataatgacctcacgcacgttggctcgtcaatcatcatcggagcagacacgagagcggcgatctcatctcaggcgcaacgctctgcaagtctcggagcgctgccggagctggtcgctgcacggcgagctattcggcgatggatcaggggagctcttcgtcgatgtcctcgtgctcttcttccacgacggcgtctaccgggcccgatcaaagaagattgtcggcggcggcaccgacgttcgacccgtctatggcctcgagttcgtccatggcggctacgacggcgggcgttccagggagctcgccggcaatggcgcctctgcttacctctgcgaggatgtcctcgggctcttccgcaagttccactacttcgttcgacccagcaggatcgtcggcgttggcacctgcgcgctccccgaggcctggattgtcggcgtcggcacctgcgttctacccgacgacggcctcgagctcttccacgccgactttcctccggagatgctctggcatcatccttgtggagaacagaagatcaaaggaggacggccggaccttcttggtcgtgagtttggtattcttgctgaacagaagaggttgattcagagacatttagatctgaaagaagaaatgcatttgcgccataacaaggagatcgagaatgccttcatttcggagacaaggctggcccggggtgtggagcaagatctgcttggggactgcaagaaggccgtgctagtgcagcaagatcaatctggaaaagaagaagaaagtcatcagtgcctgaggcagctgcaagacgtcaacggcgagcagcttgtgggggtgccgaagctgggtcttcctggagctgaagaaaacgttgcatgcaacaacactgcttcccataaagaattcagtgaatttccaggtccagatattaagtttgggagcatcaacatcagagatataccattgctgcagggaaggcaagctgcagttattctgcccaatcctcagctagatagaagaacttccggtttaactccagctggagccagttccctggatcaggagacagatcaggagctgaatgaaaagcttttgtag

SEQ ID NO: 100890 - DNA, 691 bp, Oryza sativa
  Clone ID: PAT_MRT4530_98562C.1
gtggtagtcgatgtacccgttgacagcgaggcgcctatggcgacttcatcaatctcaaggatttgctggcccagccttcgaaaatgctcataggggtagggtttacgtatgtgcgttcatgccgagtaacagaggagagggagagagtagggcgttggtgctccggtggccggggatcggcgacgttggtggcagatgatgttcttgggcgacgcgcatccggggagggtggtgtcaagcaaaggggagaaggagatggccggaacggcaacacaaagagctcagctctggccagctatggtggtggcctggcttagaggtggagggagaggggaaaggggaaaacggactctcctcgcggctgcgcggtggcgggcgacctgggatgcggcttagccgctgacttcgacaacgccgtcgcatccccgtcggatccacaacggcgagttcatgcattcagcgagagtggcccgatccgtgcggaggtcgccagatccagtcggccgtccatcgcggtctgcccgtcaggcctcgccgcggctcatcgtcaccaagcaagcagcccatcgctacccaccgtggcgcctggattcagcggctgtttgctccacctgacgcatgcatgttgctcgccgccagggctagggagctgagggtccgacgacacagagaaagagaggaagaagaagaa

SEQ ID NO: 100891 - DNA, 168 bp, Oryza sativa
  Clone ID: PAT_MRT4530_98563C.1
gttttatccaccaaacgctctcagaaccatagatgcaaatgtcacatgccatgtatgcttccttttctcctgcttaccaacctacaaacaagaatgcgcattctcatcaagtacacagtttccgtagcctattgcctctgatcctatgatacacatggatctacaaaa

SEQ ID NO: 100892 - DNA, 1056 bp, Oryza sativa
  Clone ID: PAT_MRT4530_98564C.1
atgttgtgccaagcgctcgcccccggtgaccgcgtccaccgctccccgaccgtaggaggcgccagcgccgccgaggaggaggagggcggcatcggccaggaagctaccgacaagaacgacgaagaggaggagcgccttgaggagcttgatggggaggcttctcaacggcggtcgtcgtccgcgggggccgatggtgattgcaccgtcgtcgttgtcatcgccgtcgttgccgccgccgccgtcttcgccgctgtcgtcaccgccgccgtcgtcaccgccgccgtcgtcaccgttgccgtcgttgccgccgccgtcgtcgccgcctccgtgctcatgggtggtagtcacagagagagggatcgagtggaggggaagatagagagagagacaactttatcaaaatttggtaaggttgaaaatggcatcaaagtgaacaggcccttaatcttgctaaattttgtctacaccaacaaatgccgagtaacagaggagagggagagagtagggcgttggtgctccggtggccggggatcggctacgttggtggcggatgatgttcttgagcgacgcgcatccggggagggtggtgtcaagcaaaggggagaaggagatagccggaacagcaacacaaagagctcagctccggctggctatggtggtggcggtggtggtctggctcagaggtggagggagaggggaaaggggaaaacggactctcctcgcggctgcgcggtggtgggcaacctgggatgcggcttagccactgacttcgacaccgccgtcgccatccccgtcggatccgcaacggcgagttcaagcgttcaacgagagtggcccgatccgtgcggaggtcgtcagatccagtcggccgtccacgccgtccatcgcgcaagaagcaagcagcccgtgatccagcccgtcgctgccctctccgctgcccatcgtggtgcctggattcagcggctgttcgctccgcccgacgcatgcatgtcgctcgccgccggggctggggagctgagggtccaacgacacacagaaagagaggaagaagaagaa

SEQ ID NO: 100893 - DNA, 230 bp, Oryza sativa
  unsure (1)..(230): unsure at all n locations
  Clone ID: PAT_MRT4530_98565C.1
acagacttcgtactggctatcatgacgaccattctgcatcgtgcctcggcctcactatcttctccaagagaccatgagacagccttcattagctggaagctgagcttatacctgactgggacccacggatgaccaacatggaagacaccaatgtcgtttttttttgagngangggggggcggcaacctagcagcagggaggggaacatgaggtcactgagttggagggga

SEQ ID NO: 100894 - DNA, 2097 bp, Oryza sativa
  Clone ID: PAT_MRT4530_98566C.1
atggccaaaccaccagcaacaacaacgctcgtcctatgctgccatctcgccgtggctgccgcagcagcagcgacatggataggacatgacgatcagcaagacgacgacgtgtccacctacatcgtgcacgtcatgcccgcgcacgcgccacgcctcgccacgcaccgcatcgcccgcgaccactacgcccccttcctccgcgagctcctcctccccccgcacgtcgcccgcccgccgccgcgcctcctctactcctacgcgcacgccgcgacggggttcgcggcgcggctgacggcgcggcaggccgcgcacctcgaggcgcacccctgcgtcgccgccgtggtccgcgacgaggcctacgagctccacaccaccctctcctcctcgttcctccgcctctcgccgtcttccgggctacaggcggagtcgaacagtgccaccgatgcggtgatcgctgtcatcaacagtaccatgcgtccttcgtatcagacccgtctttgtccccaacaccgcctcctacctttcgtggcgaatatgttctacgaggggtacgagcgtgcgagtgggaaaccgatcaacgagacggaggattccaagtcgccactagacacgacgggtcatggcacccacagcgctgccattgcagctggctctcctgtgtcggatgccaacctctttggccttgccaatggcgttgccaagggcacggctcccggtgcacgcatcgccgtctacaaagtgtgctggaaaatggggtgcttcggctccgacgtcgtcgccggcatggacgaggcgatcgccgacggcgtcgacgtcatctccctctcgctggctgtcaaccgcaaaagaacttttgctcaagatcccacggccattagcggcttcaatgctgtccgtaagggcatagttgttgttgcatccgctggtagcggcggtccaaaggaatcaaccgtcaccaacacggcgccatggttgttgacagtcggtgcatcgagcatgaaccgccaattccagacgatcgttgtgctcggcgatggccagacattttctggcacatcgctctatctcggcgatacagatggctccatgaaatcgcttgtctttggtggtttcgccggctcagccgcttgtgaaatcgggaaacttgatgctaccaaagtcgctggcaagattgtcctgtgcgaggcggacaggtcttggatgcggagaaaggagtcgccgttgctcaggctggtggattcggtgtcatcgtgtctagtcgtagtagttaggacaccatatccagttggtaagatcctcttctttggcacggtgctcagctcgtcgccgaggatcgcgtccttctccgcccgtggcccgagcctcgccgcgccggagatcctcaagcccgaccttgtcgcccccggcgtcagcatcctcgccgcgtggtccggcctcgtctcgccaaccgaactcgacgtcgacacgaggcgcgtcaagttcaacatcttgtccggtacatccgccgcgtgcccgcacgtgagcggcgtcgctgcgctgcgcaagatggcacggccaagctggatccctgcgatgatcatgtcggccctgacgacgacggccggccttgacccggggctcgtctacgacgccggcgtcgacgactacctcgacgtcctgtgcgcgctcggctactccgacgaggatatcgtcggtatcttcttgagggacggaacgatcaccaactgttcgacgcgggcgagcaccaccgtggcggacctgaaccgcgcgtccatctcggtggcggtcaaggcgtacggcgacgatatcacggtgcgacgcaccgtgcgcaacgtcggcggcagcgtcgacgccgtgtacaccgtcggcggggtgccaccgccgggcacgcagctccgcatcaggccgtcgaagctggtgttcgacgcggagcaccagacgaggacgtacgacgtcgtcatccgcacggtgtcctccggcagcttcgacgagtacacgcacggttccatcgtctggagcgacggcgcgcacaaggtgaggagccccatcgccgtcacctggccgccgtctcagagcgccgccgtcgcggccatttga

SEQ ID NO: 100895 - DNA, 2187 bp, Oryza sativa
  Clone ID: PAT_MRT4530_98567C.1
atggccaaaccaccagcaacaacaacgctcgtcctatgctgccatctcgccgtggctgccgcagcagcagcgacatggataggacatgacgatcagcaagacgacgacgtgtccacctacatcgtgcacgtcatgcccgcgcacgcgccacgcctcgccacgcaccgcatcgcccgcgaccactacgcccccttcctccgcgagctcctcctccccccgcacgtcgcccgcccgccgccgcgcctcctctactcctacgcgcacgccgcgacggggttcgcggcgcggctgacggcgcggcaggccgcgcacctcgaggcgcacccctgcgtcgccgccgtggtccgcgacgaggcctacgagctccacaccaccctctcctcctcgttcctccgcctctcgccgtcttccgggctacaggcggagtcgaacagtgccaccgatgcggtgatcgctgtcatcaacagtaccatgcgtccttcgtatcagacccgtctttgtccccaacaccgcctcctacctttcgtggcgaatatgttctacgaggggtacgagcgtgcgagtgggaaaccgatcaacgagacggaggattccaagtcgccactagacacgacgggtcatggcacccacagcgctgccattgcagctggctctcctgtgtcggatgccaacctctttggccttgccaatggcgttgccaagggcacggctcccggtgcacgcatcgccgtctacaaagtgtgctggaaaatggggtgcttcggctccgacgtcgtcgccggcatggacgaggcgatcgccgacggcgtcgacgtcatctccctctcgctggctgtcaaccgcaaaagaacttttgctcaagatcccacggccattagcggcttcaatgctgtccgtaagggcatagttgttgttgcatccgctggtagcggcggtccaaaggaatcaaccgtcaccaacacggcgccatggttgttgacagtcggtgcatcgagcatgaaccgccaattccagacgatcgttgtgctcggcgatggccagacattttctggcacatcgctctatctcggcgatacagatggctccatgaaatcgcttgtctttggtggtttcgccggctcagccgcttgtgaaatcgggaaacttgatgctaccaaagtcgctggcaagattgtcctgtgcgaggcaggacaggtcttggatgcggagaaaggagtcgccgttgctcaggctggtggattcggtgtcatcgtgtctagtcgtagtagttatggtgagtatgctaaggccactgcccatctcaacccaggcaccacggtgcctaacgctgccgcattggagatcttgcgatacatggccaggacaccatatccagttggtaagatcctcttctttggcacggtgctcagctcgtcgccgaggatcgcgtccttctccgcccgtggcccgagcctcgccgcgccggagatcctcaagcccgaccttgtcgcccccggcgtcagcatcctcgccgcgtggtccggcctcgtctcgccaaccgaactcgacgtcgacacgaggcgcgtcaagttcaacatcttgtccggtacatccgccgcgtgcccgcacgtgagcggcgtcgctgcgctgcgcaagatggcacggccaagctggatccctgcgatgatcatgtcggccctgacgacgacggccggccttgacccggggctcgtctacgacgccggcgtcgacgactacctcgacgtcctgtgcgcgctcggctactccgacgaggatatcgtcggtatcttcttgagggacggaacgatcaccaactgttcgacgcgggcgagcaccaccgtggcggacctgaaccgcgcgtccatctcggtggcggtcaaggcgtacggcgacgatatcacggtgcgacgcaccgtgcgcaacgtcggcggcagcgtcgacgccgtgtacaccgtcggcggggtgccaccgccgggcacgcagctccgcatcaggccgtcgaagctggtgttcgacgcggagcaccagacgaggacgtacgacgtcgtcatccgcacggtgtcctccggcagcttcgacgagtacacgcacggttccatcgtctggagcgacggcgcgcacaaggtgaggagccccatcgccgtcacctggccgccgtctcagagcgccgccgtcgcggccatttga

SEQ ID NO: 100896 - DNA, 159 bp, Oryza sativa
  unsure (1)..(159): unsure at all n locations
  Clone ID: PAT_MRT4530_98568C.1
tcttatataaccgttanattctttntccagtttttnggctgtntgcattcnatgcagaggccgggggtggactcatttggaatgtatcaccttggngtatttaactnagncttaataaaactcccattatctaaaaaaaaaaaaaaaaaaaaaaaaaaa

SEQ ID NO: 100897 - DNA, 479 bp, Oryza sativa
  Clone ID: PAT_MRT4530_98569C.1
accgttttgatgatggtagaatggcaattttctagtttgttgatggcactttgggaagtgggcgtttgcagatggtgcatataaagaagagtatatttcacaaaactcttttagtttattatgccaaaccatggtgatttatgattaatgacatctatatactctaaactattcaaccctgcgaatttcaattaatactaattttctcgtcatgttgagccacattatcctgaaccattatggttattggatagttgttctctgtctgatatttgcaaccagatcagaccagctgctccattcacatatcgagctcttatgtggtacttgccttatgtgcttgttatgctgtttcagtattgttcgctattatattatagaacatcctaaataacattatgttctaaactttaagagttgtgcattaaagctgaccattattcttgacatttgcacagtttcaatgttttgcagactta

SEQ ID NO: 100898 - DNA, 1457 bp, Oryza sativa
  Clone ID: PAT_MRT4530_9856C.1
tgaagtgaatgaggcctccttcttttataggcaagtaatgatggttacactatgcgaattgtccaatttgccctgcaaccatcattgagtagctatcaggagcgtccacatggaaggccgggatatctcatattaagcaagtaggcacggtggcttaccaatacgcccaatcccgtggtggaacatgtcacgcccagaaattcccgaatagaattccaagcagaatgtgcattaaaatccccgtccaggaccagccggggtacacaaacgacaatgttgacattcagatccacgtcggaaagaggctgtgacaggaccattcgcataaccccctctaaccaagcacaccacacctcaggtttcacccccactcctcgcaaggcagcgggcagtcccctctcgtgcctaggtgaatccggaagccgcatagaccgtcgcagggcccatccaaactccatcacgcccacccttgcctggatgcgtcggctagaggaaagctacactacaagcccagccgttgcccacgctggcttgtgaagcatgacttgccttgctctgctgctggaggaacctcggcgactatctcaaagtacaccggagcgtcggaggaatcggaatggccggccgaccggccgcggcgacggcgacggcgcgcgcgcgaacgcgttgccggcgacggcaaccggcggcgagggcgacggcgcaaaaggcgacgcgaaggcggctacgctaagcggcggctaggaaggggaggggacgggcggcgttaaaggcgaccgccggctcggctcggcatcaaagccgacctgccggccaggtctagcggcgacggcatgcggccaacgacggcggcgaccggcggcacgggaggcggcggcggcggccgaaggcgacggcatgcgactcgagggtggccggcgcggaagaagatgatggcgaacggcgacggcaagccacgggaggacgacgtcggtgggcggacgagcttcggggtgccctaaggaaggagaagagagggattagagagagagatggaccacggcgaccggaaaccatggccgaaggcggcggtggaggtggtgctcacccgagtgcgagggaacgagggctccggcgacgaacctcgacggaggaggggtggacggggtggatctcggccacgcgaacccgacggcggcgaaggcggggcgcgcgggcgtggtcgacgtggcccggaggaggcggagacgagggcgcggcggcggttgcgggcgcgacggcgcgagcgagatcggcgggaggtgggggaaggacccgacaggtgggccccacctgtcggcgaccccgagagaggaggcggcggggcggcctggctgggcctcggcgtcctgcaccggaagaagacggcaacactcgcaaccacgagtagttcctattgagcaaccggtctttccgccacctcggtacgtgttcgacat

SEQ ID NO: 100899 - DNA, 584 bp, Oryza sativa
  Clone ID: PAT_MRT4530_98570C.1
aaggaaaacatgcgttaaatcaactattattttgaagatgtagtacgctgataaacgacccgcacgaaatggtaagaaaacactctgtcactcctactacaatcatctaagtatgccgaccaattgattaatgccgacccaaattgacgcaaatgaatgaacatttataacgtgctttccaaaagagatttggttggccccaatgaacaccattcataggatcttggccagggccgcctgtgcacttgtgttaactacttgtcttttgacgggggactttgaactgtagaaattagtccccttcgatgacacaatggaattactcgtggtctttgacccatttttgaacgtagtctccgtcgaggcttctgcagatgaatggctttcctttttattaaccgatgcagttgtaggtactattggacacctggtgcttccgggggctgacttgttctacgttgaagctcacttatatgacgttgatgctcggtctgcagggatgagccagaaatcctcgtaaatgtaatgcgtgccaattaaggccttggcttgttcctcggttaggccgagcgccaatcccaccc

SEQ ID NO: 100900 - DNA, 536 bp, Oryza sativa
  unsure (1)..(536): unsure at all n locations
  Clone ID: PAT_MRT4530_98571C.1
gaaaagaaaatatcaatctattgatggtgtntcttacgatgctaccataatagcatgtgatcatcactggaatttgttggtcttgtctgttttattttacccctgttgtcaaaaccatgaagtttgtggaaatcaatgagagcagaactgcaagggatgcctatcatggtatagcaatgctgcagcctcactcaacccgttacaagctttgccctggggatacaattattggacttggtcgacaatctcaggagccctttgggcttcaagcgaatcgtggaatttacagactgcaataggaggcccagctataaacaaaaaggggaatgtcattggaatgcttttccatagtatgagttttactcctttcttgccgtctaacatcattttgaaatggtgggactatttcaaaacaaccgggtattctttatgctttaaattaatgatgatcttcttaactgatgtttgactggggtcagcggctcatacatgctggatgagatgtcgttcctgtttaaaaaaaaaaaaaaaaaaaa

SEQ ID NO: 100901 - DNA, 741 bp, Oryza sativa
  Clone ID: PAT_MRT4530_98572C.1
ccggccgttgtacttgacacactctcacaacactctatcacaaatagagttcgacccgaggaatgccggagacacacaaccttcccaatctgtcaaaatcctagctactgtccgatgcagcgctgctgcacatggcgacggtcttaagccaagctatgacgctcctgttacatacgacagcgtcataatactgctacaaaaaacacgcgcgtgatggccatgcagggagtgcttgaggacgaaagatacgagatcgagagccaggttactcgataatcagctacgccgaaaccgagaaagaagcaagctattcaaaagcagtaatgaccttacctcagaatgatacgaatagcactctcatctaccaggccatacctatgagatgtggcaaccgaacgttaattactgtgggcgcggatgcatgtttattactcatacaacagtcaaactaaccaacaagctttagtttgctaacaaacggcatacatactgggcatactatcctaactactacatttgagcataatagcatatgctctgtaggccaaaggatgagactgcatcgaataatgatacggctacggatggtagagaaaagaggtagcatatcaagacgaacggtatacgcactgttcgtaaatcacaggatatgctctgtaagataaggagcacaaggtggatgtagcgagtgctacaacaggggcactacacttaactgtctgacgtcaaacgactacctaa

SEQ ID NO: 100902 - DNA, 363 bp, Oryza sativa
  Clone ID: PAT_MRT4530_98573C.1
atgggttgctacaccaccaaatttcggtatcataaatttttgcccaccgtcttccaccccacctctccggcggcggcggcgccggcggcggacgcggccatggcgaccccgtcgtacgcggcggtcaagtgcctcaacacgtcgtcctccagccgcaagcgcttcgtgttcaagtccttctcgcagcgggtggaggagatcgacatcgacgtgtaccgcagccttcacgaggtgaaggcggagccatcgagcggctcctcgttcttcctcgacgccctcgtggagtggagggtatcaccacttcatccctctcttgcttccgttcttcaattgttcctgcaagaggttgaagctcttgctaaa

SEQ ID NO: 100903 - DNA, 1830 bp, Oryza sativa
  Clone ID: PAT_MRT4530_98574C.1
tcgtgcaagagcacaagagtgcacgaagacgagacgagagcgagctgttcatcctcccactccacctcggagctgagctctgcttctctcccgatctctccacccaccgcagcagcatcctttcgacctctctagggttccagcctcgagttggcctcgttcccccccccccccttcccacattcgctgcgaggtttgggattctcttccggatcggattggtggagtggcagggaattgttagatatggagcggtcttctcagttgaatccaaatgccactccctttgtgcctcccccaaggtcttcgtttgaagaaagcttgagcggaaggaaggcctctgagaagcaagtaggtgattcagaaaaggatgagactgctgacaagtcttctgaatatgagctcccagattccctttctttggacgactatggtgaaagcctaggaaagctcaacatttctgcagaatcttcatcaaaaggagctgctagtaccgcgcttgatccatcgcactacgaggaaaatggtgttgataatcatcttgctgtggtagaatctctctcgaagatgttcccagatgtgtctgctgacttcattgttgaagcactgagggcccatgattttgatacagaactaactattgatatgcttgctgatctgtgtgaaggtgatgattaggggcatcctgctgaagtgtcagcgaaggaaatagctatggagtgtctgaccacaagttttactaggaatccgggaagggagtataatctcatatgtccgagcgaagctctgtctgaaaaacaaaggattcaaagaagggttctatgctattttccagcttccacaaactcaagacgatgtcgcaagttcacaactatggcatatcctgttagcccaatagctggcagacgttcaaattggagatcttttgctgcaagtctgaatttggaagatggtcctgcatcctctgactcaacatcatccccttcagagcaaactagtgatggtggtgaagtttatggtgacccttctgaaaatctgaattctcggaaacttaaatctgacgagttgaaatctcttttggctgattcagaacgatctaagcttttgaaaaagcttagtgaagcaaaccaatacaaccggttcctcaagagacagttgcaaatgaaggataatgacgttgtgaagttcaagagtgaacttgccgttatggaacttgaactgcaggctctggttgccctagctgaagagattgctaattttgatgttccatctgggtctaggaagataaatggaaaatatatccagtcacatcttctcaccagattagaagctgttcatgataaggttatggaacaaattaaggatgtagactctttaaagcaccaagaaatttctgtcttctgggttggcattgctgagaatgtacaaattatgggctccttcgatggctggtcccagggagaggcaatgtccatggagtattcaggttaccaagcaagattctctgcaactctgaatcttagacctgggaggtatgagatcaaattcttggttgatggagagtggaggctgtcactggagtacccaattgatggcgaaggttcaatgcagaacaatatacttgttgtaaattaatgtagatatctgttggctcctagtttgccatagttgtaacttgcagctataaaacctagcgcaagattgaactgtactcgattgctatcatgcatccgatttgcaaaatttccctttaccatgaaaaaaaaaaaaaaaaaaaaaaaaaaaaaaaaaaaaaaaaaaaggggcctcgtgccgaattcctgcagcccg

SEQ ID NO: 100904 - DNA, 676 bp, Oryza sativa
  Clone ID: PAT_MRT4530_98575C.1
tctctctccccccgcgtcgcccacgcgcaggcgacacggggggcgaaccctacctccgccgccgtcccccttcccctccccctacctcgccgccggagctctccaccggcaaagccagctggcgagctaggatggcggcggcggggccttcttcgcggtggcgtcccttctcaggcgcgggagaggagacgttcgccggcgtcggggagaggcggcggcgaggcctccggactaggcggcggtagatctggtgccgctgtcgccggatctggccagcccctccggttttcggccggagtgctggcggcggtgccgtgggggcagcgcgtgcggaggcggcacggtcggtggcggctggtgcacgagtggcagcggagtccggcgcgcgcgtgggtgatggccggtgcgcgcatggcggcgcggaggccggcactcacgaggcggcatagcggcgcctaccagctccggcggtcggcgaggcgcgcctggccctgccggggctgctccgctgggggcgccgggggtgttggcgacaccggcgtttctccagccggccctcacccccacacccaccccgtcacggagtcacccctccggcgtcgacagcagccacaaccaccctatgctctcttggctccttcttgcaagcagaagggggtgagctccgacgcctccc

SEQ ID NO: 100905 - DNA, 916 bp, Oryza sativa
  Clone ID: PAT_MRT4530_98576C.1
cgatcagtggataagaaagctccattacacttggaggatgacattacaggaaggaactaccttctttccaaatgcaggctattaagtatcccttgtatggtagatgcccttcatgaacttatggactccaccgttttggacatggaatcgacatggtctcattacatgacaagctccccagagcgtaagcagaaatatcaggaaattctatcacagctgcatctagaccgtccctctctcggatcaaaaggctggtacttcacattctatttttctgaggctgctttgcagttcatcaaatcatttccacttccagatgctaaaccaaattgccaatcaggtccttgggagccatcttttgatgatctcgaagcaacagagaactattgcaagattgcaaggtcagcctatcgtgtaataaaagtagtttctggtcctcacaatatgacatttaattcatacttccatgtgatctggagcttgagagcagctatacaagaactgcctagtataaaaccacgcgtccgcccacgcgtccgggcatatatgcagaagaaatttgacagaaattggaagaagtggtacttgtggctgtcgatagctgtggttctagatcccagatataaactcggattcattgaactttgcttcaggcaagcttttagccatgttgctggaatgtatttctccgaggtgcgtgcaaagcttcatgagctatacattcaatactcttatgtgaatgagcaaagtaaggagatattggatcacaagaacaattgttcagatatacaaattagtgctccattacataacaagggccagaattctaccacagcccaagctgcagttgaggaattcaaagagctttatgaatatcttggtgggggactctgtactcaagacgattcttttgata

SEQ ID NO: 100906 - DNA, 463 bp, Oryza sativa
  Clone ID: PAT_MRT4530_98577C.1
attatcttatttgcgttgaaacattcagttatgctgtatatatcacagttaaatactaactcaaattttatcgatttcctttcggaattaattaccaagaacagaatcctgcacatgacaaacaattggctctctcctctagtcctaccacatctcttgctcccaagtcccaatttgtccaattcctcaaaaatcacgagaagaagcaagagaataagacttcatcacttgggtagcctttaaaagactgcttccagccagagaaggaagcaatgcaaaaaatttcagcttatataaagaccaaataatttcattgggatggtaggcaatgaatgattgcttccagcctctttgggaagcaatataaatgcattcagcgatggaatcaacttaataatattattgggatgtaaggcaatgaatcctttatgaaaaaacttatgtgatgcgaaataaatgcaac

SEQ ID NO: 100907 - DNA, 1110 bp, Oryza sativa
  Clone ID: PAT_MRT4530_98578C.1
aaacatagcagccggctaaggtttctcccccctgccgcgccgcgccgcctcgccgccaacgccatggatgcgcagcgagctctcctcgacgagctcatgggcacagcccgcgacctgacggaggaggagaggaaggcgcacaaggaggtgaggtgggacgacccggacgtgtgcgccgccttcatggcccgcttctgcccccacgacctcttcgtcaacaccaagagcaacctcgggccgtgcatgaagatccatgatctgaagcttaaggagagctttgagagttctcccaggcgtgaaactcacatgcgaaggtttgaggcggaacttgctcaacaatgtgagaaactggttatagatttggatagaaaaataaggcgtggtcgagaaaggttggctcaagatgttgctgtgccacctcccgtcatagggaaaacatctgagcagctttcaattatagaagaaaaggtcaagaagctgttggagcaaattgaggagcttggtgaagctggtaaagtagatgaagctgaggcacttatgaggaaggttgaacttctaaatgctgagaagacagctttaacgaatcaagcagataataaagtggctatgcttccacaagagaagaagatggaactttgtgaaatatgtggatcattcttagttgcagatgatgttcttgagaggacacaatcccatgtgactgggaaacaacatattggctatggtttggtcagagattttctagctgaactccaggctgcaaaagagaaggcaagagacgaagagaggattgcaagggagaagaaagcagaagaacgtaggaaacagagggaaaaagagtatgatgttggaggcagggacggtggttctagaagagagaagtctggggatcgtgactatgaccgtgatcgttactatgaccgcaatcgtggaagagaaaggtctcatgatcacagagatagaggatcagaatatagaagcagttcctacagaaatggtagggattctgaaagagacagacaccgatataggagtgatgacatgagaaaggacaggagtagagtgaggagcaggtctcgttctccaagcaggcatggcccagatcagtga

SEQ ID NO: 100908 - DNA, 207 bp, Oryza sativa
  Clone ID: PAT_MRT4530_98579C.1
atggatattatgacatcgtggaagtttagcagcctctcaaaaattttcaggttgagatgtggcctgcccatctggaccgacccatcaccagggaaatccgaatctgcctcatggaccggcatggagctcataatcttatatcaggctgatgtcaacatggttgatccaccgacgccctttgcaaagattgacagaaggctggatcct

SEQ ID NO: 100909 - DNA, 1840 bp, Oryza sativa
  Clone ID: PAT_MRT4530_9857C.1
ccctctcctcctctccctccttctcttgggcctccccttccccctcggcccagctccctgctcttcccctcccacctgggccgtgtcccggcccagccgagccttcccaggccgcgccgcacgatcccctttccttcctggtcaattccccccaatttcccccttgattcgtgcccccaatcgtcgggaacgcccgcgccaaccccggtcaccttccatggccgccgaccacgaattccgccgccgttccccgtctctcccgtggccggctcccgatccgttctccagttttagccccctcccgcgttctcccgtggcctcaccacctctccccgccgccctcctctctctcccacgccgccggccgcctccagccgcctgtgccacctcacccgcgcaccgtccggccgtgccgtcgcctctcccggcatcgcagtcacctccccttccccggcttgccctccgtttcccgcggagacccccggagttacgttcccgccggcgtccagtggcgtcgccggtgcgccgatcgacgccgccgtctcctccttcgacaccgtggcatcgttccccggtcgtcgtcgtcgtcgtcctctcgtcgttcccggtcgtcgtggcgttcgtccctccgtcgagccgttctcgtccgtcgtccgcatccgtcaagcaagccgcggcagccccgtcctcgtcttcgtcctcggctccgcgtcatcaagccttgtgccagccgcgtctcgccttcgtccaaggatcgccgctgaagtcgttccctcgccgttcgcctccgtcgtccccgagctgtcttcgccgcgcccgttcatcgttgtcgttcccacgcctcgtcgcgtggtggtaaggatccgtcttctcgcttccccgtcctcgtcctttcggtgtcgccccgtacccgttgtgcggttgtcgaccccggtacccgtgtaccggtgtcggtagtcgttcgcttgtgcgtgtggtgaccgtgttagtgtgcccgctcggtagccacgtggtttccacgtgtgcagcccgtgtggtgtctagtggagtccgtttgtcggccactcgcctcggttgacacacgggatccgcttccgtcgacccgtggaccgtctctgtgtactcggttttctttttatgtattgttattgtttctttataagcttgtagctttgcttgtgtgcttcgcgtagcttctgtcgttccggaggttccagaagcgtggttcgcggtcgtcgccaaaggttcggaaggccgttctctctctcttcctctttcaaaacccctaaaacctgttttccggtggggtttgggtgcatgccagttgtgggaagtagcaccccggccactataaggattaagctcgggcctctgttgcaaagcactaccgtacttccacatgtctagtgggtaaggcttagtttgtggcccagtctggttataaacagaagtacacggatggagatggacgaagtcgggggtcgatggacatctctaggacaaatgaaggctacacgagctgcggcccggtagtcgagatgtcgtggcacagggccggtgtcctgctgttaggggctcagtcctgcctacctgtcccggaggttccggccgtaggtggggttgggttggtactcttgtctatgactaggatgggttggaaactatgtcatgtcttccgtccatatgccgtggtggtatgtggcacgtggttgcacctgaggaagacgtgtcctgtggcacttgtgggtgtgtcttgttgagtacggtgattgtactcagtcttgctcaatttttcccaaacccagaagaggagcccctagatgatgaatgctttggtgtc

SEQ ID NO: 100910 - DNA, 212 bp, Oryza sativa
  Clone ID: PAT_MRT4530_98580C.1
ggggttcctatctactctcccccttcgattaaggctgagacgcacgtcgaggataaggtatgccttcgtcggggataatcgcgcatgcccaaatttgcctggatttaatggaagctgctactatagtttggctactgtatgactacactcatcagtactgtatgcgagctagctagactgagaggcgaaggcataagcggagagggatacaa

SEQ ID NO: 100911 - DNA, 171 bp, Oryza sativa
  Clone ID: PAT_MRT4530_98581C.1
atgctggaaaaacaaaaagaggccgaggtggccagcttgtcatcgcggtcggagtcggagcttcacgtcattgccgcgacggtggttgggctctcagtctccatgttactgcctggggaagacgggttcaacgacatggatgaggaggagagcagcggcggcgtgtgctaa

SEQ ID NO: 100912 - DNA, 425 bp, Oryza sativa
  Clone ID: PAT_MRT4530_98582C.1
tttttcatagaaaatatgcggaggtccaaaaagcgtcaacacgagtcgacaaccggtccataccagaggtcggtcgatgcccggcagctatccccgggcatggacgactacgggatggatgatcgccacatggatggtctggagggcgatgacggtgatcagccatctcctggcgaggccaacttctccgtcgacgtcgacgccacgacgttgcccacaccaaattccgataaccagccatctgccagaagagcggagtgttggcgacacttcgaattattcaccgagatggttgacgggacaggccatctcaaccggcattacttggcgcatctcaagaacaaggcgccggcaggagcaagacagacacatttgtccttcggccctgacggttcagtaaccaccaagaacgatattacatctat

SEQ ID NO: 100913 - DNA, 200 bp, Oryza sativa
  Clone ID: PAT_MRT4530_98583C.1
ctaaacccaaaaccaagggccgcgtccgcgcgagccgagcacctggggacgcgccgtctcgtcacgactcacgagtgtgtcgcsctcggccgccacaccagccgcaaacccccacccgcggtttcgccctcccgcctgcaggctagatgcagcagcttgcagcctccctcctygkgstccttcthamggycgcaacgccc

SEQ ID NO: 100914 - DNA, 219 bp, Oryza sativa
  unsure (1)..(219): unsure at all n locations
  Clone ID: PAT_MRT4530_98584C.1
gtactactaactgctccttccagacacagcttagctactggattactgccaattgagtcttgttattcggttcctcaatttatcaagttcttcagagcatgcagtcgaagtccataatgtccaatactgagagcanaaagttgtccgatgactatgaacttgtggatgtgcttgaccggagcaggttctcaataggtaaggaggggagtgagcaagtct

SEQ ID NO: 100915 - DNA, 428 bp, Oryza sativa
  Clone ID: PAT_MRT4530_98585C.1
aaagaaagcaagaaagtcaagtgcagtaaatttgtggaagcagtatataggaaacgaccaagcctctccatcctcagagaacaaatcaacatggaacccggattcagagcttaaccactacctcgtcaccaatcatactaagcatgatccgacgcttggtggcgacgatgtcgatctccttgggtggtggaaagagaaagagcgaactcttcctcaagcattcagcgttactggaatcattagggagaaaagaacgaaggtcatgcctgacagccgagacagttgagtcaatcttttgtcttaaagactggatggaagcagatgaacgaatgcaacattgtctacatgatcaagagcttgccgatgcaatggaagacacattggcggaaatttgccttaccaaagatcatggtggtgttgatccagag

SEQ ID NO: 100916 - DNA, 273 bp, Oryza sativa
  Clone ID: PAT_MRT4530_98586C.1
atggcgtatatgcagagggcaggaggacggtgtgacgtcattcggccggcgggaggcggtggccggcggcgggcgaagtcgacgggcggtgaccggccggtggggggcgccgaggccggctccctggcagatggcaggaagcggggccccgtcggcctggatggcggcgggtgcaggtcggtgtcgggggcggcggaagacggaggagggacctcgtcccccagcgccatgctggcggatggtgccggcggcgtcgctgttggtatttcttaa

SEQ ID NO: 100917 - DNA, 2799 bp, Oryza sativa
  Clone ID: PAT_MRT4530_98587C.1
atgcggaggtccaaaaagcgtcaacacgagtcaacaaccggtccatcccagaggtcggtcgatgcccgacagctatccctgggcatggacgactacgaaatggatgatcgccacatggatggtctggagggcgacgatgatgatcagccatctcctggcgaggccaacttctccatcgacgccgacgccacgacgatgcccacaccaaattccgacaaccagccatctaccagaagagcggagtgttggcggcacttcgaagtattcaccgagatggttgatggtaaaagtatacctcatgctcaatgcaaatattgcgacaaaattttgtctacagctacttcttcagcgacatgccatctcaaccggtattacttggcgcatctcaagaacaaggcgccggcaggagcaagacagacacatttgtccttcggccctgacggttcagtaagtacatggacctatgattcaaaaatagctagagaagagattgctaagtttattgttgctgaggatctaccaattagaatgggggaaagcaaacattttgagagaatgatccaaaaagctttttgcccacagtacaaaaaagtttctaggaaaaccaccaagaacgatattacagctatatatcgttctaagttgagtgtgttgaagcaaactttgagtactactagtttttcatttgctgtgacatcggacatctggacatcccaacaccaaagaacatcttatcttagtgttgttcttcattatcttgacaacaatcggtcgttgaataagagagtcatagggttcaaactcatgacgtcacacacgggagatgccatagccacgataatcctagaggtattgagagaaatcaatttacaatctagggttgtttccattactcttgacaatgcatcagcaaacacaacggccatgtcgattttggagccggatctaagaagttatgttggaggctttgtcattcatcagagatgcatttgtcacgtcatcaatctcatcgttcaaccaggcatgattgttctggataaattgttaaacaaaattcgccgttctgttcgtatcataggaggtaacacagtggtcaaagcgaggttccaagactactgtaaagcgaagaataaacctggacggatgtttggcattgatgtcaaacataggtggaacacaatgtacctattgctgcgacagttaaaagggatcagcaacatcgactcctacgggtgccattccctccttggaggtgtttccttgtggactctctcccacctttgggtgaaaacccagtccaacttttgggcgggcgtcaacaatggctttggtcgttgttcacctccttggaggcttcgccttaaaggtcatgctcttccctcggtctctttagtgttggaaaccgccaaggttgccatgaactcaataggtgatgcagtggggcttgattattctgaagcttttcaacatgtcaatgatgagctctatagggttttccgtctataccgaaccaagcttggtggtactccccgagttcctgagcagacctcacaaaagaaagcaagcaagtcaagtgcagtaaatttgtggatgcagtatataggcaacgaccaagcctctccatcctcagagaacaaatcaacatggaacccggattcagagcttaaccactacctcgccaccaatcatactgagcatgatccgacgcttgatggccacgatgtcgatctccttgggtggtggaaagagaaagagcgaactcttcctgtgttagctcactttgctcgagatattcttctggttccagcctcctccgtctcttccgagcaagcattcaacgttactggaagaattattgaagaacaatggtcatgcctgacacccgagacggttaagtcaatattttgtcttaaagactggatggaagcagacgaactaacgcaacactgtctacatgatcaagagtttgccgatgcaatggaagacgcattggcggaaatttgccttaccaaagatgatggtggtgttgatctggacatcgggcaaagcacatggtcagaggcaaaaaccctaggcacccggggcgtcgggagtcggtcctcggcggcagcggctctcagcgtcggcagccctcggtgcgggccgcacggcgtggcgacagcggctatgcgcggctgcgcgatgtcggtcctcggcggcggcggcggctctcggcgtaggaagccctcggcgcgggccgcgcggcgcgacgacagcggctatgtgcggccgcacgacgtcggtcctttgcggcggctctcggcgtcggcggctggcacgggcagcgccgcagggagcaggcggcggcggcggcgggtcggcgcggccgcgcgggccccggcgaaaaccctaggcacgacacgactcctcagggttgtcgatgctctacaagatccaccctcaccgccttggctgggcaacgacatcgacacattaccgcaggttggtaatccagaggaccaacccgacaaggcacgggagaggccttcgactgacagggaagaggctacccaatctcacatcatcaacacgggagtgaagtctgaagagatgggcagcagtcatattcgcagattacaaactttatacaaacaacagggagcaagagacgggcagcttgagcttgcgaagcactcagaaggcctcggccatgagccgggcagcttgagcttgcgaagcactcagaaggcctcggccatgagcccccgaaacatgttgactgcaacggcggtgcaccacaggagccaggggcagagctag

SEQ ID NO: 100918 - DNA, 261 bp, Oryza sativa
  Clone ID: PAT_MRT4530_98588C.1
ctagctagtacacagagctagaactattaacataggttggatatcatgggtgccatgataatacaaacctatgcatattgttttccgcaacatactatctacaaagaggggcatgaaggggaagtactagtcagtggcatagaattactatgcctgcctagtacgataatagtacccttgtacataactacacaccattcgctaatacgctaataggagggccctacaaatagtagggctagctaggttggcaaaaggcta

SEQ ID NO: 100919 - DNA, 417 bp, Oryza sativa
  Clone ID: PAT_MRT4530_98589C.1
atggaagcatgggcacggttgttcgccggctccggcctggcggcgctgtccatgcgcctcaccaagcagctctccaccggcggcgaccacctcgccgcagccggcgtccagcagaacggcggcgccagcaaggccggccccagcaacctcgtcctctcgccgctgtccatctactccgcgctgtccgtggtcgccgccggcgcgcgcgggcgcacccagagcgagctcctcaaagccctcggcgccgggtcccgcgaggagctcgccgagaacgtcgccaagacgatggcgcgcgccctccccgacggcaccccgcagcgcggcgggccgcgcgtcgcgcacgcgtgcgcgatctggcatgagaatttttggtgggggatatgtttgatctcaatcgttttccggactattcaataa

SEQ ID NO: 100920 - DNA, 1152 bp, Oryza sativa
  Clone ID: PAT_MRT4530_9858C.1
aaaaggtttataaaaagaaaaatccctaaaagtcttctttccccccccttttccttcttgggccggctcggcccacttctctccctccctctctctctctcctcccctccggcccatcggctcctccccgagcgcgcgccgctgacaggcgggcccgcccgccaccctcgctgacgggtggggcccacctgtcatccccaaccccgcgccgcgcccgccgccgcccgtgccctagcgccgccgccgccgccgattccgccgcatcccgccttccccgcgcgccataaagaggggcgaattactccccgtgattccctctcccgattccccctcttttccctctctctctccctcggattcgtccgatttgaatcccgcaatcgtcgccggcgtcttcaatggagcccgagaactccgcggccggtttcctttctctccggccgccctctctctctcccgtcgctataaaatcaatccccgagctccgctcctccgtttccgccactcgccgctcactctccccgtcggaatcgagcccgcaccgtcgcactttctctccgccgtcgccgccgtgctccggttcgccgccgccgtcgctccggacttcctccccactcggcgtcacctccatcggcttcgccgcgttcccgtcgacctcgtccgcgcctccgtttcgctcgccgaccgccggagcaccgtcgtcctcgtcgtcccgaaccgcgccgccgccttcttccgcttcggccgccgttcccgtcgtcgccgtcgaccggggtgagccgaagaccgctccattcgcttcccccttccctcctctctctcgggtgccgctccgccgcgccggtggtcgccggcggtgaccatcggggcgcgggcgcgtccccctaccttcggccgtgccggcgaggccgccttcgggcgcgccctcgcggctgccaggtgggacccggccgtcagccgcccgagcccgcgggtgcggctgacgcgtgggacccacggcgccgaccgccgccagccgcgtgctcccggtccaccgtggaccgagaggctgacgcgtgggccccactcccgtggacccggtccgcgcgccctctccctcggcttgttcaccctagagtaaacaaaacctcaactagtggacactctactcgt

SEQ ID NO: 100921 - DNA, 312 bp, Oryza sativa
  Clone ID: PAT_MRT4530_98590C.1
atgacccaaccaacacactgggctttgccagcccacgtgctgaagcatcggcccaggcacgacctaacacgactcgggccgtgccgggccggcccgaaggcgcgacacccatcgtgcttcttcaaaaaaagtctaatttccatccctcatttcttcgggccatatttgaatgattatcgggccatgccgagccggcccaccgtggcaaggcatcggcctaggcatggcctagctgtcgggtcggaccggcccgggcacaaccccaattgggtcgtgccatgcctgggcctcgggccttatggccatctataa

SEQ ID NO: 100922 - DNA, 1216 bp, Oryza sativa
  Clone ID: PAT_MRT4530_98591C.1
ctcgtgataaatggggccatttcttaatgggccgcgggccttttttttttttttttgggactgaattcatgtagtattagattatcagaaagaagtacagaaatgaacttgatgggtactcactgctcatcggcacaagggtaagttcgctttatttatatattaggtacaatgccgtagaaagggatgagaaacagaacagaaacaaattgtggaagtatgattaattagcaccagaataggtgtagaggtgggaacaatcatcaacggtagtaggccatgtggcgtgaagatcggaacggtgaagcatcaaatggagaggagcgcctgggctgggtctcaggacggggatgttctttcttagggagtttggtctcagatcgcagccatgactcgacaactgacagcaagtttttggcactctttagctcctcaacgtcagagtattttgctgattttctcaattcaccttcttggatgtatgcaatgtcagtagcccatgattccaatccatcaaatatatgagtggcatagacaatggttgcttctctctgttcacactcttccttaaagaagtcaaggagatccattctagtcacaacatcaagatcaacggtgatttcatcaagcaagagtaccttgtatggatgaagaagacccatgcagatttgtaccctgcggcgttgtccatctgagactttatgcatgcgccattgcagatcaatatctagtagatcaacaagcttctctcgcctaacaggatcaaccccatcaactccaaaaatcatgtgttcagcagagaagtcgccttgcagaggaacgtcaccagctgaaccgatagcccgactccatgaaccacctaagtaggaaaggtcaccgttgcacacaagctgtgtgtcatgaaaagcagaaccattaagaacacggacaacatctcttcctccaaccatatgtttccccgcaagaatcttcaagagagtggtcttgcctgatccgttcgcgccgatgaggaggcatcgtgagccgggggcgatgcggagattgaaccgcgcgaagagcggcggctgcccgtcgtagtcgaactgcagtgcgctcacctcgatgccgctcctcctccacccttcgtcctcgccgccggccatctccgcagcctcgccgccggtgggtgatccgagcggagtttggtgggggaagtgggaacctagttctagatcgc

SEQ ID NO: 100923 - DNA, 853 bp, Oryza sativa
  Clone ID: PAT_MRT4530_98592C.1
atggccaacgaggagccgaagagggagatcttgctagctttgtactgcaagaagctgtatcgattatggagcggaaccatgaaggaggccctggacgtacggtggacctgcaagggcgtggtgtacggcgacaggcagagaagagagaacaccaccatggtgagcagaagcaagcaggcgctggcgacgccgctgtctctcttcctcctccacctgctgcttgctgctctcgcccttcgtctcgtcgccgtagcatcagccagcgtcgtcatcagcgtggcggaggaggccgagaacaacgcgacggcgccgtgggcgacagaagaaaggttagtggtggtggtcgagctcgggtcggcggcggcacgtcagctgcagctgggcggaggaggagtggagcttcatcaccggcggcgcgagctggccgggaagatcccgtttggtccgttgcgtcctgacgggagcgcctgcaggccgcactgccccgcgaagtcaggcctgccgtacaccagggactgcaaggtgatctacctgtgtggcaggggtcgctaagctagctagctatacgaccccggccgcttctcttgctgtactccacgtcgtatacactatcaatttggcagatgcatgtttgctgctgctttcggtgtacgggtatatatgcctcgagccaatatctgcattcccgtgtgacctcggaaatgtctgcgttttttttttcttctctcttttggtgtttttcattatattctgggaaagtatcaaatgtctattcagtttcaatgggccatctcttacaccccgacatcaatcatggcattttcttggaacccaaaaaaaaaaaaaaaaaaaa

SEQ ID NO: 100924 - DNA, 261 bp, Oryza sativa
  Clone ID: PAT_MRT4530_98593C.1
atgtcactgggtcggagacttatcgtgtcttggtgccatgttcttctctttgaagggacgcgggccactcgagactaccgtgaaggccggcggcgccgccgcccaccgctgccatcaagcaagctcgaggtggcgctcgtgcaagcctctcggcgccaccgccccgcacatctcttggatgatttgatgatgactaggtgcattgggaaggcacactggtggagaaaggggctttactcccggttcgtaacccccctgtag

SEQ ID NO: 100925 - DNA, 3579 bp, Oryza sativa
  Clone ID: PAT_MRT4530_98594C.1
ctatgatgggtccaggatttcttcaactgtaaagctttcattgctcttctccttagctggtggcctgtaactgtaagtaagtttcttctccacaacaggtacaatattcgagaatatcacacagagaagtgctgttgcctgtttatcggtacacagccctttcttcatgtgcttaataaatatccgcgcaaattcaagccatgaaaaaactgataaggcacgatatcttttgcctcgtaactccccagtatgtggatcattaaactcaaagaagagtactttcctcatttcaggtgatcgcatagcagtacgataccagcctggaagtttgatatcacccaaagccttgacaaaattaccccaatcagcagaaccaaccatgaagtccttacgaatgtccaaagaggtgaacaaattcatgtgggccgaacaagatctcagagcactacaatttttgtagaaacctctataattggcactgagaccagtctcatgtgtggggcttctaagatccttaactaatatatcaacaaacattggagagtcaccttggccaggacgaagctcatggatccctgcttccagcgcttcaagcttcctgcggttaaacctgaaccagcagctaattatgctagctacatcacccatgttgagtttgtactcctctctcctgaggttccaccttatttttactcctttcttaaaagctatacaacccagatcagggaggaacaccagatcagctattgtaaacctggaagcaaatctgttggcagcatggataatctccaacaactttaaaagttggcagatgatttttcttgctggttttccaagtatgataagatatgaacagaacccgctcactcgcagatctggtggtatccatatgatttcaaaaagggaatcacctaatgatctgatatgttgttctaaaggaatgcacttgaaaccgccaatcgtatcattgcatccacccctcatacgtggcattataagaaaagttgaatccctgtctgcttttaaagattcaagagtcaagctcttggcaataactcgcctaccatggtagacatagacatcatgcagagagacgcgatgttttgatagagctaaagctacaatgtcttcagctgaagacttcagtttcattgtcagtggaactatttggaagtccagcactttgacaaggatctggagtgttggagcagaatttttaactatgtcatgctcattgccaggggttgagccactacctgaactatgtcctttaatgcagcagtgtgcatgtgatgcagcaagatgagaataataggccggtgggaccacagacactgcatgggtgcatcgtgcatagatatagcaaagattgttggtcagggtctgaagttcatcagctgtaaaatggttctcatcataaaggacatggtaatgagttggcctgctagtaccctgtatgccagcatggctacacaggtagaaatagaactctgtaggatggcaaatctggcggtccttgacagttccaggaaggatgtttccgctcttgtcagtcatgtctcgcctcccatgaacctctgggaaaagccttgtgtgatgccttttctggactactacaaatgtgacaggtggtagatatccctcctccaaagatgcacaagcctttctgatggcatccatttcatgaagaagcacacggctgaactgaccttcacttacaccatctctatagaagattatcctctcaggccttctgccagtcttcttgcggaatgcgataaggaactccctgatcatcccaccatttacaaccttcactggatctttaccaacactaaagagatcttctattatctcctgtctatgtgattgagcagagaccagacctcggtatttggtgatttcaggccaatccattgatgccacaaccgcagcaatagatgatgcagagtcctctccaggtggagtgtgtgacatcagcaccaaagatgattgttgggacttcttgacattgattttgagtgcaacattttccaaatattgcttgttcggcctgctggcatgccttggcaaacaacattgagatacaatgccaaggtcattctcacatacccttttaattttcccataagaaccactaacttcaagcagaattacaattaaaagctgcaggcctccctttccctctctggctagcagttctgatgttctgctgtgaacatccctcagagcattctctatattgttaggatttgatgaccggacatccacaactggtcttggattgaaagacattccagtggcattgcacatctgaatcaggtcaccacagaacctttgtacctcctctggacgcattcgtgaaaaactcagacatgtccagttatccacagttcctccattgatcattttcttgttaatcatgttccactgtccaacactgggtgcacaagttttctcccttccagaatcatgatacttcaacttgatgccgaactcctgagcaaacctatcatctgtatacttgttgtggagaaccatctcatgaattctctgttccctctgctgggggcgttgacaggttgctctaaggatgttggtcacctgtttgttgttaagcttcttggagtacctctgcccttctacaatcttgcacacctccataggcaagtatacaggacgagaatcactgccagactgtaggcagggccaagaagcatacttcagtctgtaattgtacctatcccagaagtactgaacaacagtcttccttgtcccattatcatcaacaggaaatagcatgtaaacaaaaagataattatagcagaagcagaggaaagataagtacatcagctggctcataggaatgggggtaatccctgttattttgtatcttctgatttggtcctcttggtggtttgtttcaatgcgaaccccacgtaatgctttctttatcttcacacgatcccggtctgacaaaggtcttgaggtgtcacgtatgttcaggaactcctccacaaattggatcactgtcacaggcttaaaaaatgatgttgcagatatatctatattcagcgaaaggcccatctgtgttgggcgcaggctctgatagtaacctctccaacactcaagtccctcaccaatgtcaccccggtgaccaaattgaatggtttcttggggcatatccctctgtcttccaagcaaaaactgctggaggtggtagaagtctgttctgccagcaatccgaattgtgatcttgtactccctctccgccctttctttatccttcttttcgggatcaattagcttaaccacaaactcctccgattcaaaagggagtgaaccagcagtatagagactttttcttccatcataagcaggcaatttgccaccaagagatgtcttcccatgcaacttgatgagctcattgagtacttccctatttgttgctcttgattttgactcaggattgattgaaaccagaaactttatgcaagaaaggaaacgcgacgctccgaccaaacacccacgaactggatgagattggaagccacgctccatacaaaactttaacggcat

SEQ ID NO: 100926 - DNA, 186 bp, Oryza sativa
  Clone ID: PAT_MRT4530_98595C.1
atgaggaggaacactgttcttgcccttgtgtcctggctcatgctgcttgcactcttcatcaccaccgccactgcatcgctgccttgcaggtgctgctggctggtgcagcatccaaaggtgacctgtggccatgcctactgtggcgaaaactgctgccctcctactccaccgccatcgtcgcgctga

SEQ ID NO: 100927 - DNA, 694 bp, Oryza sativa
  Clone ID: PAT_MRT4530_98596C.1
atttgcttccaggtttacaatagctgatctggtgttcctccctgatctgggttgtatagcttttaagaaaggagtaaaaataaggtttaaccgcaggaagcttgaagcgctggaagcagggatccatgagcttcgtcctggccaaggtgactctccaatgtttgttgatatattagttaaggatcttagaagccccacacatgagactggtctcagtgccaattatagaggtttctacaaaaattgtagtgctctgagatcttgttcggcccacatgaatttgttcacctctttggacattcgtaaggacttcatggttggttctgctgattggggtaattttgtcaaggctttgggtgatatcaaacttccaggctggtatcgtactgctatgcgatcacctgaaatgaggaaagtactcttctttgagtttaatgatccacatactggggagttacgaggcaaaagatatcgtgccttatcagttttttcatggcttgaatttgcgcggatatttattaagcacatgaagaaagggctgtgtaccgataaacaggcaacagcacttctctgtgtgatattctcgaatattgtacctgttgtggagaagaaacttacttacagttacaggccaccagctaaggagaagagcaatgaaagctttacagttgaagaaatcctggacccatcatag

SEQ ID NO: 100928 - DNA, 188 bp, Oryza sativa
  Clone ID: PAT_MRT4530_98597C.1
atatcacccaaagtttacatgtcacatatgatgatatctgagcttatttttaacttcgaaccactatctgttaaaactattaaagacaccgcaggtggtaatggtctggtgcaccatatactaggtgatacatattaatgacttaaagcaaaacttacttaccaattcataaatgaatacaaatgtga

SEQ ID NO: 100929 - DNA, 3994 bp, Oryza sativa
  Clone ID: PAT_MRT4530_98598C.1
caatatccccccccacccaaaaaactgctacgtgcgcagggtctctagcggcggcactgcctgacccaacgcacaagcacaggcaccatccggacgcacgcaaaccgtaaatcggatacggcgctcccccccccacaactcggcgacaggctccgctcgcacccaccaaactaccagaatctcggcctctccttgccaacaatctcctcagcagtagaacatgacgtccttgacgttctccttgatcttgggaagctggcgcacctccacagggccctctcgcgccacagcctgcccgctgctgcccggggtcgtgccaccatccgcactctctcctttggcatcgtcgcggtggtgtaaaggaggagcgcgggtactgcagggcggtggctccacccaaccaggcccgaggccaggagcagggggatagcgacgatttgtggctccggcctcgaccgccgggggcctcatccagtcctcaacggacaggcgctaccaccgaccgcctgggccaagatccggcctgcacgaagtcatgggccggggataatcccacccggcgtggtgtcatccgtgcgcggccatgagtccccaacgaacgagtgcatgagctgcagtttgccccgtcgcccgctgcatggtccagtgggcaaagcggggtggtcgaggagcagtaataggctacaggtgagacacgtggtggaggagcaaggtcccctccagcccgagctcatgaaggtctagcgcgccaaggagttcaagccccccgtggtatgaagaagccctgcccggcaaacccacaaccatttattcccttcgtttttcttgctcgtcaggtgattgatgaattgcttgcttgccatggctgttttatgtgtgatgaaatgttcgtgaaaaaaaaaaaaaaaaaaaaaggggtcgagccaccatccgaactctctccttccacgtagtagcgagcgcggaatgcagcaagatgagcatagtaggccggtgggaagtagacagacacaatttcaatcttaatgaaatttggtcggctccttcgccgacccacagacactgcccgggtgcatcgcgcataggtatagcaaagattgttggtcagggactgaagtgcatcggctgtaaaatggttctcatcgtaaaggacatggtaatgagttggcctgctagtaccctgtatgccagcatggctacacaggtagaaatcgaactctgtaggatggcaaatctgacggtccacgacagttccaggaaggatgtttccgctcttgtcagtcatgtctcgcctcccatgaacctctgggaaaagccttgtgtgatgccttttctgaactactacaaatgtgacaggtggtagatatccctcctccaaagatgcacaagcctttctgatggcatccatttcatgaagaagcacatggctgaactgaccttcacttacaccatctctatagaagattatcctctcaggccttctgccagtcttcttgcggaatgcgataagcaactccctgatcatcccaccatttacaaccttcactggatctttaccaacactaaagagatcttctattatctcctgtctatgtggttgagcagagaccagacctcggtatttggtgatttcaggccaatccatagatgccacaaccgcagcaatagatgatgcagagtcctctccaggtggagggtgtgtgacatcagcgccaaagatgattgttgggacttctgacacaaatggtatgccattgcggataaaggctcgctcaagaacagtgttgcgccctccgaccttgacattgattttgagtgcaacattttccaaatattgcttgttcggcctgctggcatgccttggcaaacaacattgagatacaatgccaaggtcagtctcacagacccttttaattttcccataagaaccactaacttcaggcagaattacaattaaaagctgcaggcctccctttccctctctggctagcagttctgatgttctcctgtgaacatccctcagagcattctctatattgttaggatttgttgaccggacatccacgactggtcttggattgaaagacattccagtggcattgcacatctgaatcaggtcaccacagaacctttgtacctcctcaggacgcattcgtgaaaaactcagacatgtccagttatccacagttcctccattgatcattttcttgttaatcatgttccactgtccaacactgggtgcacaagttttctcccttccagaatcatgatacttcaacttgataccgaactcctgagcaaacctatcctctgtatacttgttgtggagaaccatctcatgaatgctctgttccctctgctgggggcgttgacaggttgctctaaggatgttggtcacttgtttgtcattaagcttcttggagtacctctgcccttctacaatcttgcacacctccataggtaagtatacagggcgagaatcactgccagactgtaggcagggccaagaagcgtacttcagtctgtaattgtacctatcccagaagtactgaacaacagtcttccttgtcccattatcatcaacaggaaatatcagctggctcataggaatgggggtaatccctgttatcttgtatcttctgatttggtcctcttggtggtttgtttcaatgcgaaccccacgtaatgctttctttatcttcacacgatcccggtctgacaaaggtcttgaggtgtcacgtatgttcaggaactcctccacaaattggatcactgtcacaggcttaaaaaaggacgttgcagatatatctatattcagcgaaaggcccatctgtgttgggcgcaggctctgatagtaacctctccaacactcaagtccctcaccaatgtcaccccggtgaccaaactgggtagagaagaaggatctggacactgtgacataattccaagatggtgactccctaaggacaacatcaagaacttgaatggtttcttggggcatatccctctgtcttccaagcaaaaactgctggaggtggtacaagtctgttctgccagcaatccgaattgtgatcttgtactccctctccgccctttctttatccttcttttcgggatcaattagcttaaccacaaactcctccgattcaaaagggagtgaaccagcagtatagagactctttcttccatcataggcaggcaatttgccaccaagagatgtcttcccgtgcaacttgatgagctcattgagtacttccctatttgttgctcttgattttgactcaggattgattgaaacatcgtagtggaagaggttgttgtcggcgacattgacgaggaagtggttcgcgcggatcatcaccttcttcccggccgctccgaaccccggccgcgcagggtgggcgagccccttcttcgacaccggtgccagatccttgtccgactccaccgacgcctcgccagccggcgcggccgcggccgacgccaccgccgcgggtggcgccagcgcggtctccgacacgaacagcttctgctcgaactccttggccagagccgtagcggacggcgccgtggaggacgacgagggagccggcgcggccgccgccggctggtacggagccggagccgacgagtgcgacggcggaggcgcccggatggtgacgggcgtgctgcgcgcgtagccaccgatcaccggaacccccggggagggcgcacggtacacgcccccgggctggtacgcgccctggtggtgcgccgccggcatcggcgcgccgtagacgacggccggcggccccggccgcgggtactgcggctgaggaggccccggccgcggcgtcatccccggcggcggccacacgaagcccgaggcgggacggtacggcggggctccacccccaccaccaccgccaccacggccagggacgtcgccgcggccggagtagggcggccgctgctcgccgccgcggccacctcggcctccgccgcggtaggccat

SEQ ID NO: 100930 - DNA, 791 bp, Oryza sativa
  Clone ID: PAT_MRT4530_98599C.1
ggcagcagccctctcctgctgcgtgcgtccccattcacaggagtcctcgagtctcgcccccgggccgtccgcccatctccgacgccgctccccgaagcgaagcagagatggatacatcaggacctgcagcattcgtcaatggagagattctgaagatgttcgtcggccgaagagtgcgcacggtggtccaagcccagcgcgaggaaggcgggttgcttatcgggcagtccaccgatggtcatcagctaaccatcaaaggggcctccggtgcccctatgtcgcactatgtggagattattgggatcgctgaacccaatcaggccatccgggctgaagtttgcacagattttggtgaaaacttcgatcctgcaccattcaatggactgtgcaagcttgcgaatggccagatgaaggatttgttcctgtagaggtcggcatcacatacaagacattctgccaacaaagcatgtctcatgttcatgatttctctagctttaagatccgtccaactgtttttgtcagtcatctcagtataatcaagctacttagggtcagtattggtgcttattaagacatattaaccttaagctatgtgaggacaagcgtgtgcttttgttgctgaagagcttgtggtgtttgctccttctaagcaaagcaaaccaaagcgttgtgctgcattgttactgtcgcttgcatttggatccttgaaagctgtgtttcttgttatgctctcaaaaaaatcttgatgaagtgaactagtatgatgctttctgatgaaaaaaaaaaaaaaa

SEQ ID NO: 100931 - DNA, 537 bp, Oryza sativa
  unsure (1)..(537): unsure at all n locations
  Clone ID: PAT_MRT4530_9859C.1
atgtgatgtggacaagtgatcttcaagattgatggaaggattaaaaaaaagcttcaatctgctaagctattgtccagctactgttatcataaaaggctaaactgattgaagaaaccaatggaatggaattctgaacttgctaggacatgaaccgtaaagatgcanaaccatctacataaaggttgatcccataggcagcttatcaaatacatcaattgtttggatacatttgggtactgtttttcacttatggggagtaatttaggtaaattcaagtggtttatgaaaccctgcttttacgtcaacttatatggagtagactgcataaaaaaggttagatcacagtggcgcgagcattgcagctgctcattgtttttttccagttgtaatcggcacaccgatgacacagggatatgtgcttagggaagggttgttgctggcacaacccctgttgcttcattttgagcatgatggtgacggtgtaactataatattttatcaaatcatatgttcacttactgtcaaaaaaaaaaaaaa

SEQ ID NO: 100932 - DNA, 187 bp, Oryza sativa
  Clone ID: PAT_MRT4530_985C.1
caagcagctcaactcgttcggcgccacggccgtgcttgccttctccaccaccgtgccgctccttgcgctctacatcctcgacagcctccgcttaggcgacacggtgggtgtcaccacggcgtccccgcacgcgttcctcctcgccgcgcagatcttcaccgagggcctccacgctgccgctgggtag

SEQ ID NO: 100933 - DNA, 650 bp, Oryza sativa
  Clone ID: PAT_MRT4530_98600C.1
cccgggctgcaggaattcggcacgaggagcataaaagaagtgaaatatagtgtgtgaaagtgtgatcaaagaactgaacgagcaatggcagctcagactcagaccatccaggttcctaacgatgccgagctgatgcaagcacaggccgacctgtggcgccacagcctctactacctcacgtccatgggcctccgctgcgccgtcgagctcggcatcccgaccacgatccatggcctcggcggcgccgccaccgtccctgacctgatggccgcgctgtccctccctgagaacaagctccctttcttccggcgcctgatgcgtgtgctcgccacggcgcgcgtcttcgcctctgccgacggcggcgagaccgagcggttccgcctcaccccgctgtcccgcatcctggttgacggcgtcgtcgccgacgagcaccatagccagaggtgcttcgtcctgggcaccacgtcgcgccactacgtggacgcggcgttcgcgctgtccgagtggttcaagaaggacctggcgtcgccggtgccgtcgccgttcgaggacctgcacggcgcgaggctgttcgacgagagcaccccgctgctcgacccggagctcgacgccacagtcaacgagggcctcgcggcgcacgacaacctcgg

SEQ ID NO: 100934 - DNA, 644 bp, Oryza sativa
  Clone ID: PAT_MRT4530_98601C.1
ctagatggaggtggccggtgagcaagcgatgggggtggccggtggaggaggagtggtagagctggtggaggtggagttgtagggctggcagtggaggagttgtaaggacgggggaggtggagttatagttgaccggcgagttggggcacggtagaggtggaaataaagggggattgatgaggtggagaggtgctgctcgaggtagagttggccaacgagtgcagggctaacggaggtggaaatagagccttggcaggcaatgtgtaggtggccagaagaagtggagaagcagacacaggcccgccggtttaggaggtgcaagaggcaaggcacacaatttggcactggcaggaggaggctggcgaggtggtcggcggggtgtagtaggtgccggttggtggtgttgccacatggagcgcctggtcgacggcaaggcaccccctttggttgatgagttcggatggagtcggatctacttgaccaggtggtctcctgacgtcattgtgtgttggtgtgttgggatggagtcggagctgtttgcaagggatggcaaactcggcaacgacaaccctcttccactttcatcttggcagtgctgtaacggccttggttttgtggttggcagggagcgagagtctgggtga

SEQ ID NO: 100935 - DNA, 723 bp, Oryza sativa
  Clone ID: PAT_MRT4530_98602C.1
atggactcggtgggcgcgatcgtgaaagtggtgcaggcgatctcgaaggcggtgagcacggctcgccggaacgcggcgagctgcaaggagctcgccgagcgcgcccagcaggtcgccaagatcctaccggactccaactccaaggcggtggcgaggggcgacgcgacggcggcgaacatcctgcgccggctcaggggcgccctcgacgacgcgctccagcttgtcgagtcctgccagagcggcggcggctgcctgtcctggccgctcatgctcgtcaccggcgacgggctcgccgccaagttcgccgacgtcaacgccaggatcagcaactgcctcgtcgacctccaggccgccaatggcgtccgcatcgaggagaagatcgaccgccaggccgcgaacggcagccgcatcgagaagaagctcgacaagctcgccgtcgccgctggctctcgcgatcaacctaatcaacgccgcgcaaacaactcatcgcagcgggagatcttcaacaccggcaagaacggcaacaacaatggtggatggaacaagggcggcgggcagcagcagaacggagggaagggaggcaaacggaggagaggcaagaaggcggccgggccgccgccgccgccgcagcagccgcagtttcgcccccgcgccggcgccggcggcggcgtcccattctacccctcgatggaggaggatcccacctcctgctccgtgatgtga

SEQ ID NO: 100936 - DNA, 362 bp, Oryza sativa
  Clone ID: PAT_MRT4530_98603C.1
atgaataagcgttctattttttcgaactggtttatcacggcaagaccaaaaacgttacctttagcgttggcttcaattatggttggatctgcattagctaattgggtggggcaatttgattgggtaacgaacttattagccattatcactactatgctgttacaaattttatcaaactttgcgaatgattatggggactatgttaaaggctctgatacgcaagagcggattgggccattacgtgccattcaacaaggtaacattaccggcgaacagttaaggcaagcggtcatattcttaagttttctgtcgtttatctcaggattggtattaaccatttatgcctatcaatctttacaaga

SEQ ID NO: 100937 - DNA, 281 bp, Oryza sativa
  unsure (1)..(281): unsure at all n locations
  Clone ID: PAT_MRT4530_98604C.1
gttacggtggatcgggctatggttctggttctgggtatggtgagggaggtggtagtggaggtgctgacggtggcgggtatgggngtggtggaggaggcggnggcggtngtggtgagcnccntggctccggctntccctatcggtctgggaaaggctatggctatngtncaggtgttcgtggtgttggcgcgtatggtagtngtggcgcaggtcgtcgtccgccaagctacntcgtgctgccgnctangngcaagcncttncctatgctcccctatatcccc

SEQ ID NO: 100938 - DNA, 1655 bp, Oryza sativa
  Clone ID: PAT_MRT4530_98605C.1
atggcagcgggcgtggacgagcgctggcggatgcggaggtggtggcggcccaacactctcgtcatcaacatcggcgaccagctccagctcggggatcgcctcccggtgagccatgtcgccggacggtcgccgcacacgccacagtcgtcgttgcacacacgcgccgccgttgttgtcgtcctcttctcctccgacgtcgtcgtcgccgtcgccgtcgtgaacatggctgtgcccgtgcaacagcgtggagctcggccggggcatagcggaccagctcatctccacggcagacccacgacacgctgccgggcaactacgtgcgccccgagagcgcagcggcccgcgcctcgccgacgtggtctccgacgcccgcatccccgtcgtcgacctcgccaaccccgaccgcgccacgctcgtctccgacgtcggcgccgcctgccgctcccacggcttcttccaggtgctgaaccatggggtgccagtggagctgacactgtcggtgctggaggtggcgcacgacttcttccggctgccggcggaggagaaggccaagctctactccgacgatccggccaagaagatacgcctgtccaccagcttcaacgtccgcaaggagaccgtgcacaactggcgcgactacctccgcctccactgctacccgcttcttcgctccctgcttggagggtctcctagtatcttttctttgtggaacaactttcagtgtctgtaactctgtattccgttgtttacattccaaaaggaaatggcaacctttgtggttgtagaaatgaaattcaacaacagcaagaagaatattcacaagtggcgccagtacctggccctccacttctaccctatctaccagtacctccccgactggccctccaatccgccctccttcaaggagatcatcggcacgtactgcacagaggttcgggagctagggttcaggctatacgaggcgatatcggagagccttggactggaggggggatacatgagggagacgttgggggagcaggagcagcatatggcggtgaactactacccacagtgcccggagccggagctcacctatggcctccccgcgcacaccgaccccaacgccctcaccatcctcctcatggacgaccaggtcgccggcctgcaggtcctcaacgacggcaagtggattgccgtcaacccgcaacccggtgctctcgtcatcaacattggcgaccaacttcaggcgctgagcaacgggaagtacaggagcgtgtggcaccgggcggtggtgaactccgacagggagaggatgtcggtggcgtcgttcctgtgcccgtgcaacagcgtggagctcggcccggccaagaagctcatcaccgacgactcgccggcggtgtaccggaactacacctacgacgagtactacaagaagttctggagcaggaaccttgaccaggagcactgcctcgagctgttcaggacttagctcatcgcaagctcactctacgagtcgacattaaaaccgggggggcgaacactacacactgtgaccctgaccacctccgaattaagtttgagttctctcttggatgcctatttgctctctgttaattggacactaaattcctcagcggcctccattcctagcttcacttataaggaaaaagaga

SEQ ID NO: 100939 - DNA, 300 bp, Oryza sativa
  unsure (1)..(300): unsure at all n locations
  Clone ID: PAT_MRT4530_98606C.1
ccgggcgcgaacgatctcctcctcttcacngagcaagcgcgnagagganacncctccatctntccatggccgccaccgcgaccgccgttgcggggtctctgtccgtgggcggggggctcgggaagccgctggctcccgtctcgtcgccggcggcaccaataaaatcccctccccggcggnggaacagnaggccgtcntcatccaggcgtcntcctcgggggaaccggtganganggacaagccccggcttnctntcncanggtngggtanttcccnntcgggngtngtgncggatagctt

SEQ ID NO: 100940 - DNA, 795 bp, Oryza sativa
  Clone ID: PAT_MRT4530_98607C.1
ttttttttttttttttttaagcagaatgatccctctttagcacatagtaaaaaggtaatatgtcttagttgcatattacatccatcccataagttttttaacgtcagaaataagaggctgaaatatcaaggcagataaagtagtaaaccttaattgaagtcaatcagttgatgccagtcttaaagcattcatggcatgcaagccaaagagcagacggtcaagcacaggcatcagggtctagctcctgctacggcggtacctgccaccatcttacccatcagcataaggagaaccacctcggccacgtggtgacctgctgtagctgcgcccacgaactggtgaaacactgcggcgccttggagagcgatcacgaggactgtagcttcttctaccataggtcgggctcttgcggtattgagggctgcgactgcggctgcgactcctgctacgacgctttccactacccagacctccaggaccaatacgcaaacgacattcacgagcaaagtgcccagtttcaccacactcatagcacttcatctcagacccaccatgtcgatcacgacctccgcggctacttgagttccgtgagagctcaactctccatccattcttgccatctaaatcacggagtgcatcctcagcatccctcttgtcatcaaaatcgataaatgcaaaaccaggtggtttacgggcaacccagacacttcgcagaactccaaacacacgaaactcatcttcaagttccccggaagtcactcggggatccaagttgccaacatacaagcgggccat

SEQ ID NO: 100941 - DNA, 536 bp, Oryza sativa
  Clone ID: PAT_MRT4530_98608C.1
agtagcagataaaactcgatgcagaataacgtttgcattgttgacaaaatttggatattcttcagcccatgttgtcatcagacaaatgaactaccaacaagagcatagttacaagaccagaaatacagaaaaaaaaaagatggtggaatacaaggtttaagcttgcatgttcatcagatagtgtaagcagagataataacttggctagcatatacaaagggctcactcttgaaagaatttctgctccagaaaattctctatccctatcaccttttactcctggtcatcgtcgtcgtcatcatcgtctcccttcttaaggcgggtagttccaccctctttgcatataggtattttcatgtgtccaaaaggagtattgacatcaatgtgcccctttatggtgtaaccagttccctttccccttatcatatcccacatagcagagccaaaatccttgggcctgaagctgattggtaaattcatgggtgggacctgctgcttcttaatatttggagggttctttcattctaggagaagcg

SEQ ID NO: 100942 - DNA, 231 bp, Oryza sativa
  unsure (1)..(231): unsure at all n locations
  Clone ID: PAT_MRT4530_98609C.1
atgaggagggccgccgccactgccggagctttgtcggcggatctgttcgtcgccgtcgcgtcggcgagtggtgcacggatccgtcctcntccgggaggatggcccgtggatccgtcntcccccgggaagaaggcgcgtggatccgtcctccccggggaggacggcaaccggcggggtcgcggccctctgctaggagacagctccagccgaaaaagtggacgccgtgagtag

SEQ ID NO: 100943 - DNA, 3961 bp, Oryza sativa
  Clone ID: PAT_MRT4530_9860C.1
atggacatctctaggacaaatgaaggctacacgagctgcggcccggtaatcgagatgtcatggcacagggctggtgtcctgctgctaggggctcaatcctgcctacctgtcccggaggttccggccgtaggtggggttgggtcggtactcttgtctatggctaggatgggttggaaactatgtcatgtctcccgtccaaatgccgtggtgcctgccaagagggagcaaggcagcaagcccgtggtgtgcttcaactgtggagacccaggacattatgctgacaagtgtccgaagccccgacgcgtgaaggttgtccctgcccagagcaactctaccgcaccagcatcgaaggcccgtgtcaatcatgttgcagctgcagaagctcaagatgctccagatgtgattttgggtacgttccttgttaactcagttcctgcaacagtacttttcgattctggtgctacacattcattcttatctatgagttttgcgggaaatcatgggatggaagtagaagatcttagacgtcctttgatggttagtaccccaaataatcaagcactctctttgcaacgtagcccctctgtcagaatagaaattaaaggagtaccatttctggccaatcttatcttgttagaatccaaagaccttgatgtcatcctagggatggactggttagccagacataaaggtgtgatagactgtgccaacagaaaagtaactctcaccagcaatgatggtcgagttgtaactgttcatgcattgtcttctgagtctttaaggtcaagactgaaccagataactttggaagagattcctatagtccgggagtattccgatgtgttcccagatgatttacctggtatgccgcctaaaagggatatagagttcagaatagatttggtacctggaacaactccgatccataagagaccttatagaatggcagccaatgagttggcagaagtcaagaggcaagtagacgatttgcttcagaaaggatacatcagaccgagttcgtcaccatggggagctccggttatttttgtggaaaagaaagaccatacccagagaatgtgtgtggattatcgtgcactaaatgatgtgactatcaagaataagtatccgctacccagaattgatgatttgtttgatcagcttaaaggtgccactgttttctccaagatagatcttcgatcagggtatcaccagttgagaatcaaagaggaagatatacctaacacaacttttaccactaggtatggattgttcgaatgtactgttatgtcttttggacttaccaatgcccccgctttcttcatgaacttgatgaataaggtgtttatggaatacctagacaagtttgtggtggtctttattgatgacattcttatctactctcgaaccaaagaagagcatgaagaacatcttcgccttgcgttggagaagctacgagaacatcaactgtatgctaagtttagcaagtgtgaattttggctgtctgaagtgaagttccttggtcacgtcatctcagcaggaggagttgccgttgatcctagtaatgtggaatctgtaaccaactggaaacaaccaaagacggtttcagagattcacagattcctaggcctcgcaggatattatcggaggtttatagagaatttttccaagattgctaagcccatgacacgactgcttcagaaagatagttttcaagagttgaaaagtcgcttaatatcagctcctattttgattttgcctgatccaaagaagggtttccaagtgtattgcgatgcatcaaaacttgggttaggttgtgttctgatgcaagatggaaaggtggttgcctatgcatctcgtcagttacgtccgcatgagaagaactaccctactcatgatcttgaattggccgcagtggttcatgcgttgaaaatttggcgtcattatcttttcggtactcgtacagaggtgtataccgatcacaagagtttaaagtatatctttactcagccggatctgaacatgagacaaaggagatggttggaactaattaaggattatgacatgggaattcattatcacccaggaaaggctaatgttgtagcagacgctcttagcaggaaaggctattgcaatgctacggaaggacgacagttgccattggaattatgcaaggaatttgaaagattaaatttgggaattgtcagtagaggtttcgttgcagccttagaagcgaagcccactctaattgatcaagttagagaagcccaaattaatgatcctgatattcaagaaatcaagaagaatatgagaagaggaaaagctatcggtttcttggaggatgagcacggaactgtatggttgggtgagagaatctgtgtccccgacaacaaagatttaaaagatgcaattctgaaagaagctcatgatactttatactccattcaccctggtagtactaagatgtaccaggatctcaaggaaagattttggtgggcaagtatgaagcgtgaaatcgcagaatacgtagcagtatgtgacgtttgtcagcgagtcaaggcagaacatcagaaacccgccggtttgttgcagcctttgaagattcctgaatggaagtgggaagaaatcggtatggattttatcactggtttacccagaacgtcatcaggtcatgactctatttgggtgatagtcgacagacttaccaaagtagctcatttcattccggtaaagacaacctattccggaagtcgcttagcggaattgtatatggcaaggattgtgtgtttgcatggcgtccctaagaaaatagtgtctgatcgaggcagtcagtttacttcaaatttttggaagaaacttcaggaagagatgggttctaagctgaactttagtactgcttatcatccgcagacagacggacaaaaggaccgtataaggaccggtcttcgggcctctgttgcaaagcactaccgtacttccacatgtctagtgggtaaggcttagtttgtggctcagtcttgcctccttggacaaggaataatacacgcacgtaaggaacgcccgttgggttatttccggtcgtgacaataattgtaccagctgagagattaactccgtgcagcattgtgatgaaatctttttcctctttcggtattgctctatgtgaccttaggaatttcttgagtgaaaactttctaaccagaggatgtgtgtgttcttcaacaaactgaattacttcccacctagctcctttcctcttcactgtcatccttgctttgcaggcagcctgtcttgttctacttcttttcattttctttggggggcacgcttcacccgttttttcttctggaccacatttgttgcaaacaaacattactttgtcacgttctccatctttggctgacttccttgaagtgttgattttgattgaaaatccaacgcgctttgcgtacctgttgtagtgagcccttgcttcctcctctgagttgaaagtcaaggtgaggtacggcacttgtgtgctgcacggaatatcctgtgatggcgctgactgtgcttctgaatcatctgttccagtgtcttcacttgaaattgtgttggcagtagcagttgttgcgccagttgcaacactagtatgcattgtgtctgcacgatctgacatttcttcaaatacttgcatctcatcatcgccttcaaatatttgcatctcatcattggcttcaaatacttgcatctcatcattggctacattgtgtgcttgtaaacttccagcatcaccagtagtatacatagtttcaaagtcaaaagtgtcgtccaaatttatagcaggaatctccatgctagtgtcagtcagatttatagggaagtatgtttcatttctgtcttcatcatcaactagtaaatggtgtactggaggttcattttcaccagaaactaattccgggatactgttgaggtcaaagtccat

SEQ ID NO: 100944 - DNA, 2085 bp, Oryza sativa
  Clone ID: PAT_MRT4530_98610C.1
agactctaaacaaatacattggatagtagcagataaaactcgatgcagaataacgtttgcattgttgacaaaatttggatattcttcagcccatgttgtcatcagacaaatgaactaccaacaagagcatagttacaagaccagaaatacagaaaaaaaaaagatggtggaatacaaggtttaagcttgcatgttcatcagatagtgtaagcagagataataacttggctagcatatacaaagggctcactcttgaaagaatttctgctccagaaaattctctatccctatcaccttttactaaaagggcgacggtggcgcggttgagatggggaggaggggggaaaattggggaaatgatgtggggaggtttggagatgaagggggggcttttataggactttgggggcaaatggccggcctaatgatgatgtgacggcggcgcacggggctcgaaacgacggcggcacggcgcggcagcggcgatggtgacggcgcgcgtcgacgcgacggcgcgacacgacggcgatggccacggcgcggcagcggcgcggcagcggcgacaagacgcgacggcgacggctcgcggcgcggcagcggcgacgcgacggaggtggcgcggcgtgggacgcgaggcgacgacgcgacggcggcgcggcgggtgcgggacgcgaggcaacgcgacagcgacggcgacggcgacgcgaccgcgacggtgacggcacgcggcgcggcacggcagacggcagcggcgcgggacgaccgacggcgacgcgacggcgcggggcgcgaggcagcgacggcgacggcgtggcagcggtggcacggggctcggggcggccacgcgcgggacagggggaggggttttagggctagaccgcaatcgaacacccggcgtgcgctaaggggcgaggcggcaagcattgtgcgcgcgtcatcaatgccgagggcctctacctccaccacggagccacgggcgatggagttggaggtggtggcgtgcggctgctcccctccatagacctggtcatcgtcgtcgtcatcatcgtctcccttcttaaggcgggtagttccaccctctttgcatataggtattttcatgtgtccaaaaggagtattgacatcaatgtgcccctttatggtgtaaccagttccctttccccttatcatatcccacatagcagagccaaaatccttgggcctgaagctgattggtaaattcatggttgttacctcctgcttcttaatatttgtagtttctttcatctcagcagaagcaatgctcacattagagagccacacttcataatccatagaattcagtcccaggtcaaagtcatttttgttgtcaagattcaaatggagtgttgcggttgcttcctcaaaggagaactgctcaaacttgatcttactcacattaacgtctggtctgtaaggcactgggatctcaccatttttctccagaggtatagaaatccttccgatgaccgggatatctatatgaagcacaactctgatcttgtatggaatgatactcccaggcttgatgtccccatatgtactcttgatgtcatcataaataagtagcagagggattttcactgtctctgaaccatgagcatgtatggttccagaatcagggattgtcccagacatgagctttctctcttcgctttcgatcaagtattcgatgtcgacgagagggatcggcacggggtttgggttggtgatgagaacatcagcaatcagctctaccttctcaaggctgatgtgaggtatgtggatcccggtaacatcagcagtaggctttccaaagcttactgcatcttcaatcttttcaccaatgtcttgaatgaaatcctttaccttgtcgaagaaacctcccccctctccatcattattgtcgtcatggtccttgtcagctttcctttcggtcacttttgggctatccgaagatgacatggcctgctgttgcgccacgaagggagggaggtggcggtggctcaggcgcacgaaggtgaggcagttgcggcggtgacagtggcgacaacgctgacatgtggagggaggggacggcggcgccat

SEQ ID NO: 100945 - DNA, 981 bp, Oryza sativa
  Clone ID: PAT_MRT4530_98611C.1
atggcagccgttagagttgaaagagtttcgtcctataagtctgtgcaatgtgttgtaaaagattgttcaaaatgcctagtaaacagactcagaccaattctggatgttcttatttcaccaaatcagagtgcttttgttccggggaggttgattacagataatgccctcctcgctttcgagtactttcactttattcaaaagaacaagaatccgggcaaggctgcttgtgcttacaagcttgacctctcgaaagcatatgatcgggtggattggaggttcttggagcaggagcccctgggatttcgcaccttatttcgcacctccatgctgttcagtactgccaccccggtagaggttcagaactctatcagcaatactctgcagttagttaatgcatcgcttgaagacaagtatcttggtttccctactcccgatgggaggatgtgcaagggtaaatttctaagtttacaagaaagaatctggaaacgaataatgctttggggcgagaattttctttcgtctggagggaaggagatgatgtttaaatctgtgattcaggccattccggtatatgtaatgggtgtgttcaagttgccagactcggtgtgtgatgatctcaattggctgtcaaggaatttttggtggggtgcagagaaaggcaaaaggaaaacgaactggaaggcatgggattgcctgacgaagccgaaacaaagaggtgggttaggtttcagagatttcaaagtgttcaatcaagcgctgcttgctaggcaagcgtggcgcttgatagataaccctgggagtctgtgtgcaagagttctcaaggcaaaaaattatcctaacggctccctggttgacacatgcttcagtggctgtgcatctccgggttggcgttcaatagaatatggactagaactcctgaagaaaggtatcatttggcgagtcggcaatggacgttcaatccgtatatggcgtaatccctga

SEQ ID NO: 100946 - DNA, 609 bp, Oryza sativa
  Clone ID: PAT_MRT4530_98612C.1
atggcgctcctcctcctcgctttcttcgccgccgcggcgacggcgaacggcggcgcagcgccggcggccagcaacttcatccgcaagttgtgccgcgcgacgcagtacccggcggtgtgcgtgcagagccaggcgtcgtacggtggggcgccgctgccgcggagcccgcccgagctggtgcacgccgtgctgtcggtgagcgtggacaaggcgcagtcggtgtcgatgtacgtggggcgtatctgcggccctggcggcagccgcggcgtcgccggccccgtgcgcgactgcctggagaacatggcggacagcgtggggcacctttgcgacgcggcgcaggagctcggcggcaacatggggcgtgccggctcgccggggttcaagtggcacctgagcaacgtccagacctggtgcagcgccgccctcaccgacaagaacacctgcctcgacggcctctcccgcggcgtcgacgccgccacccgctccgccacccgcggcaagatagttgtcggcgtccatcgtcgtcgtccaccatcctcgtccacagcgtggcgtgggtgcggagggaggcgactgctagtagcggggcgagcgcggacgcgagcatga

SEQ ID NO: 100947 - DNA, 429 bp, Oryza sativa
  Clone ID: PAT_MRT4530_98613C.1
atgggatcgatcgtcgtcgtcgtcgcttgctcgaagccgctctgcgctattcatccccgttcatcagttcaggtcacagacgacgacgacgacgacggcgaggaggagaacatttatgggcgggtgatgtgtgcaccgaaactgggttatgccttgcaatttattgcaagcgctagcagtacgctcgcctacgtcctcctcctcctactgccgccgctagctgctgtcttggatcgatcgcccgtagatagagtagccataggtaaagttaggtacctgcagattgtttcagactcagatctgcactgtctgaaagacgaaatccggcagaaatatttgacttcgggcatgtttagttcacgaaaagaaaatttttgggtgtcacatcggatgtttgaccgaatgtcggaaggatttttcggacacaaa

SEQ ID NO: 100948 - DNA, 410 bp, Oryza sativa
  Clone ID: PAT_MRT4530_98614C.1
tcgaaggccaagacgaccaagaagatcgtgctcaagctcacttgctcgtcgtgcaagaagactgtccagaacatcctcaagcgctgcaagcacttcgagctgacggacaagaagaagaccggctccaaggaaccgacgtggtaaacacgcagttgttgttaaaaaaaaaaaaagatcaatagaaaagaagaaaaaaaactgacgagatcaaaaaaaaaacgagatgcaagagaaaaaccagaaacaaaaagtaacgcactctccctgtccagcactttttggtatcttccggctcttctctcgttgctcgatctccttcttttctggtgactcttttgcttttttctcttcttcttttttttcgtttttcatactccttccttttccctatgtgacacgccacgcaacac

SEQ ID NO: 100949 - DNA, 484 bp, Oryza sativa
  Clone ID: PAT_MRT4530_98615C.1
atgtgggagagagaaggggagacgggagcacgaagacaagggagggcattggtcgagacgctgacggaggtggcaaccggagctccagacggcggatccggcggctgcactcctccctcggcggatggcagccgcagcgggggacggcagaaccggggtgaggcgaggtggagcagcagtttggagggccgctgcacgtccaacgttggagaagggaaggcgacagcgagggagacggtcggccggcaggagcggcgcaacgacgcgggcggtgcaggtcgatggcaacgacagcgcgatggaaggatggtgccggtggcgcgctcgatcgaggagatggcggatggagagagagggcagcgcgctcgtttctcccagaaacggagaaaggggaaaatggataggccctgtatggggcccacgattggcaaggcaattttggctggccaactttggccagcgaggggaggagcttggccatccg

SEQ ID NO: 100950 - DNA, 141 bp, Oryza sativa
  Clone ID: PAT_MRT4530_98616C.1
atggcgattgcgctattttgtggccacatagccgagccatgtggcctaaagaagtttgttcttgctgcaatgatgcgtaatttgctgcgattgaagttgaagttggaacccactgcaagcatgacatcactcgcctgttag

SEQ ID NO: 100951 - DNA, 451 bp, Oryza sativa
  Clone ID: PAT_MRT4530_98617C.1
tgcttattttgtgatgaataattggcatatgagattattggttttgatatttggagattattggcaaagtggttttggagatgattggatttgcaggtgatgaacaaagactactgattgagcgggtccggtcagaccgggtagtggttgccggtcagaccggcatgtatcgtgtgagagaagtaataaagtttcaatctactttgtgagatctttgatttgtgtttgctcgggttcgacggtccaaccggcgggacaccggtggtcagaccgatggcatcgcaccggtcaaaccggtaggtatacggtggtcagaccgacggcggcgacaggaggtagaggcaattgtagggcggttagaccgggcgatcaacaccggttagaccagcagcataggcacggcggattaaccccggtcagaccgatctacattggattcgagggtatcttt

SEQ ID NO: 100952 - DNA, 249 bp, Oryza sativa
  Clone ID: PAT_MRT4530_98618C.1
atggagagagagaagaagaagtggcacctcgtctcgagctgcggaggtcgtcgcagccactcggggagggaagtgagcctcccgggagataagatttgggcaaaggcacgcgtcggggagaccggcggcgagaaagggcacaaccgcgcgcacaaggaagggtggcgctacgagctacgactcctcgactcctgggcggcgctgtcggccactcggctcgagataagcggcgcttctgggaatcgttga

SEQ ID NO: 100953 - DNA, 453 bp, Oryza sativa
  Clone ID: PAT_MRT4530_98619C.1
atgagaggcgcgtgcgcaggtgaacaacccgcacaagacatggtcgtcttcgccttcctggacgttgttgacgtgctcctctgcttcgtgtatggcttcctctactccgtcttcgaggacaacccagccagctgctactgccacgggagccacaacgcgcggcactggaggacgacaagccgctccactccgcctgctcggcctgattccgctccctctccgccgtcgcccttcctgccgtggaagccttcattggtggagtcccgcgattggacgcagcgcttcttccagggccttggtgtcggcgcacccctcccggctcccgtggagctccatggcacctactctgccctcgtccgcggcgtcctctcctcctccaccgtctccgcctctgcctccccgtgcatctcctgcacgctcagacgctctccatctccctcgccgccgtcgtga

SEQ ID NO: 100954 - DNA, 2472 bp, Oryza sativa
  Clone ID: PAT_MRT4530_9861C.1
taaaaagaaaaatccctaaaagaagtccttttccccccctcccttcttgggccggctcggcccagtccctccctctctctctcttcccccgcggcccatcggcctcccgcgcgcgcgcgccgctgacaggcgggcccgcccgccgccctcgctgacgggtgggtcccacctgtcgtcttcctcctcgcgccgcgccgccgctcgcccgtgccctagcgccgccgccgccgcggatttcgccgcatcccgccgtccccgcgcgcattaaagagggggaaaatcacccccgtgattccctctcccgtttccccctcttttccctctctctccctcggattcgttcgaatcgcgcccgcaatcctcgccggcgcaatcaatggcggccgagatctccgcgcccgtttactcccttttcggccgcgctctccccctttcggcgctatataatcgttccccgagctccgttcttccgtttccgccgcttgccgctcgctctcgccttcggattcgtgctcgcgacgttctcctctctctccgccgtcgccgccgaccttcggttagccgccgtcgtcgctccggtcttcctcccgactcggcgccacctccatcggcttcgccgcgttgtcgccgaccccgtccgccccttcgcttcgcccgccgaccgccggagctccgtcgccttcgtcgtcccgaaccgcgccgccgcgttcctccgctccggccgtcgtttccgccgtcctcgttgtcccggggtgagccgtggaccgtccctctcgcttccctctcctctccgctctctcgggcgccgctccgccgcgccggtggtcgccggcggtgaccatcggggcgcgggcgcgcgtctcccgtcggtcgagccggcgaggccgccttcggccgcctcccgcggctgccaggtggggcccggccgtcagccgcccgcgcccgcgggatgtttaacagagaaaaaggaaagaatgtcagcgggtatgcctcaagtaactcaagttttcaactcaatccaccactggcctcaagagagttaaccagggcacacccttggtccattccaagcatgccgcttagttcacagctaccattggttggaagtcaagaccaaaatcagtatgtgtttgatcgagcatttgccacccaggtcaatgagcttccaatgccagaagaggatgtccccttttgtcacgattgtagagaacaaggacactatgccctgaattgtccatgggtatatgccaaagaagccccttcctttggtttagcagggcagacatcgctaaaccagcctcctcacaccaagacaagcttgcagcctagtgtgcaaagcagagagcccaatgaagagaatccattgaatcctgggaattgctctcctcctagcctttcgtaccacgtggggtcacgtactaagcacgccaaaggcaagaagagtaagaatcagaagagaaaagcgccgatgcgaactgaagaagaagtacgtaagatgactattaccagcaccgaatggtctacagcagggataactattcctagacgtcaatgaggaaataccttccgaggtgcacgacagttgacccagcacctcctaagccatggtggcagagtatctgatagtgaagggtcagatcaagtctcctcggattatgaagatgagtcccccccacatctcggcgaggaagagatggaatcaaaagcatgcccccgttgtggagaaattggacacattgctagcatgtgtctcacactctgccctcattgtgaagaagaccatccaccaggggagtgtcccacccgcaaggtcacatgttttctatgcgaaggtacaaaccatgtgcccaaggattgccaactcagtgtgttgttgaccaagaccgcagaaatccaacgaacgaccctacgattgtctcgtcagctagtcagctccaacagcaatatcgacgatatcatccacagcaccaatgctcctcctgctgcacctgactctgagaaaagaaaatgccgagtccgggaagatatctgttgcttcaattgtcaaggaatgggtcatttcgccgacaagtgccccagaccgagaaacatagctgccagcacgtcagtccacgcaactccttgcaatcagaagcttgctcctcagcgaattgtcatccatgcatcccgaagcagtcctatagaccgcgttgcaacagctccaactccagcgagtgcattaccacaagttgtcaatgctcaatttcagccccagccatcagttgacaagacagaggccagtatcggcattgtacctttggatgttccagcacagcagccaaagaaatcaagtacaagatgaagaacccgagcgtaagaaagctattgtctgttacaaactgtagtacctgttaaggaagcagacatgccaatcgccaagtggtcactggagcaaatgcagtacctgataagcctagcgctagtcaggagcaa

SEQ ID NO: 100955 - DNA, 549 bp, Oryza sativa
  Clone ID: PAT_MRT4530_98620C.1
tcagtccaggtggtggccaacctcgtttcttggcgagccacccccgcggagccccatcgaccggtcaccgaatgcctgcgggagctgtcgggacgacgaaagatcctccaaccccctgccctctcctgatgatgcagtgggtcgaggccacctagtgaccgtggctcggtaggcagcgacaacggcaaccacggcagccacggtgaagcctgtagcgagctccctcctgtccgttccttttctcaacgattcccagaagcgccgcttatcctcaagccgagtggccgacagcgccgcccaggagtcgaggagtcgtagctcgtagcgccacccttccttgcgcgcgcggttgtgccctttctcgccgccggtctccccgccggcgggcgacacccctactcccgtgtggccgcgcgtcctcgtcgtcttgcttgccacgcgtgcctttgcccaaatcttatctcccgggaggctcacttccctccccgagtggctgcgacgacctccgcagctcgagacgaggtgccacttcttcttctctctctccat

SEQ ID NO: 100956 - DNA, 264 bp, Oryza sativa
  Clone ID: PAT_MRT4530_98622C.1
gtttgttttttttttttttttttttttttttttttttttttttttttttggtttcaaaacatttcattattcattttttgttttgatcactatctcgttgcatgcaacacaacaacggttggatccctttaaccatgaggcaagccaacttagggatggggtggccggccgaaaaaatactgccctattggggttaaaccgggaaaatgaactgcctttatcccacttactgcctttccctggccagtctcccgcgggtaatcc

SEQ ID NO: 100957 - DNA, 339 bp, Oryza sativa
  Clone ID: PAT_MRT4530_98623C.1
cctcctccccaagtcaccgccgtcccctccctcctgtcagtgccgctgtcctccctcccgttgcgcgcttgcctctggcacggctgctcggcgaaaccgcggcagtggcggcgctcatggcgtgcggtggttcagcatcgccaccgctgtcctccccccatcaacgccgccccgcgctctcgccgccctccttccaccgtgccggttggccggcgcctcgccaagcaccaccgcgacggcccctcccctcgtgccgcctcttaccaccgagaaaaaagaaggaagaaagagaaaaaagaaggaagaagggagaaaaaaaatttcatgtcatcgtccacg

SEQ ID NO: 100958 - DNA, 344 bp, Oryza sativa
  unsure (1)..(344): unsure at all n locations
  Clone ID: PAT_MRT4530_98624C.1
ccgatctctgggaacgccgacctcgccacggtagctctggagcgcggccacaccgtcgtcaacgcgcagctgtgggttcgcgccgctgttcccgtcgcctcgaggcgaatccggttgagctactgcgccaccagcttcgcctcaccattctctccaaaacgccccaagaatctctcagaaccgtgcagcgaggagggagatcaaccaccgtcttctccaactccgatctagcaccatgctctccaaaacggcccaagaatccctcagaaccgtgcagcgaggagggagatcgaccaccgtcttcttcaacttcgatcttagcgncttcgtcgtcgatttccatt

SEQ ID NO: 100959 - DNA, 404 bp, Oryza sativa
  unsure (1)..(404): unsure at all n locations
  Clone ID: PAT_MRT4530_98625C.1
gggatcgcgacaaatccaaaactgggtaaatggtttgtctttcttacacattcaggaatccagacgagggaagaaggtacattatgtacagcaagcatatggtgaaaagaacctatatttacaactgcttacaaagcgaatcgaaacaaaactaaacatacggatggatgatacgatgaaaagaatgataattggacaatggtggctgcacatatgacaagctatggatgcttctatctcacgatcacatcacgagctcggtctcagctttattgcgatacagttcgatgagtggccactgaccaagaggagnctaaaggggatcgaaaaaaatatgtctgcaaccatgtcaggcctgcacccaatctttctagaataaaccagggaggggttctgtcatgaat

SEQ ID NO: 100960 - DNA, 2167 bp, Oryza sativa
  Clone ID: PAT_MRT4530_98626C.1
gtataattattaatgttgttgtgttggttaggcacgaggtatagatttagttcctctgatccctgccatgatcgagttaatccgttcttggatgacgaattaactgacgaccgcggctcaatcgatcgatctgcagggagggagcagggatggccctgacgaggcgcctcctcatcgatctctcgtcaagacgccgccttttcaacgccggcaaattctccaccacgcacaagaagaaaccagtgctccatgaagcggtgagtttggctggattcttgcgctgctcgcgcgcgctggtgtcgtggatggtggcggagaggaagatgcagccatcgccggcggcgccgccggcggcggagcaccggaggcgggcgctgctgcgctacgtggtgttcctcgcggtctccctcctcgccttctcctgctgggctctcgtcagctcgcggatcgacggcgccgtcctcgcggcgaccgccggcggcgagcatgacgaccacgatggcattattgttagaagcagcacccaagcggagatgccagcgagaggcgggaacgcgacgtcgcgcggcgccgtcgaggtgggtgtgggtactccggcggcgatgatcacccggcagccgtcgtcgggagagacgacgacgacggcggcgttggcggcgacgtgcgacgcggagagcgcgctgctgagggtgtacctctacgacctcccgccggagttccacttcggcatgctggggtgggacggcaaggcggccggcgcggcgtggccggacgtggccggcgacccgcgcgccgtgccgcgctacccgggcggcctgaacctgcagcacagcgtcgagtactggctcaccctggacatcctctcctccaccacctccggcgaccaccgccgccgccgtccgtgcaccgccgtgagggtgacgaacgcgagccttgccgacgtgttcctggtgccgttcttcgcgtcgctgagctacaaccggcagtcgaagtcgccgcacggcggccatgggagtggcggccggagcgacaggcagctgcagggcgagctggtgaggtacctggcgaggcgggaggagtggcggcggtggggcggcgcggaccacctcgtcgtgccgcaccacccgaacagcatgatggacgcccggcggcggctcagcgccgccatgttcgtcctctccgacttcggcaggtacccgccggacgtcgccaacctgaggaaggacgtgatcgcgccgtacaagcacgtcgtcccctccctcggcgacggcgactcgccggggttcgagcagcgccccgtcctcgcttacttccagggcgccattcataggaaaaattttcaactccaaaagatttctggagttgggttttttctagctccaaaaggtggaagggttcgtcagaggctgtaccagctgatcaaggacgagaaggacgtccacttcacctacggcagcgtccgtcagaacggcatcaggcgcgccaccaaggggatggcctcctccaagttctgcctcaacatcgccggcgacaccccctcctccaaccgcctcttcgacgccatcgtcagccactgcgtccccgtgatcatcagcgacgacatcgagctccccttcgaggacgtcctcgactactccgccttctgcgtgttcgtccgcgcctccgacgccgtcaagaggggcttcctgctgcatctcctcagggggatctcccaggaagaatggacggcaatgtggaggaggctgaaggaggttgcacaccacttcgagtaccagtacccttcgcagcctggtgacgctgttcagatgatctggggagctgtagctcggaagatgcatttggtgaagctgcaacttcacaagcgtggtagatatcagaggacattttctgaatcataaaaggttagggtagccaagcactggaggagattcagagctataggttgcagtttttgatcaataattttcatgtggctggtaaagttctatggtcattttgcatctaagttgcaaggactatgtcgcagccagtctttgtccaagaggtaattattagacagttagttataaattactccctccgtactcgttctggtagccccttaggacatgtttaagtcaaccatgggaatataaatcatgaataactctcaaaaaaaaaaaaaaaa

SEQ ID NO: 100961 - DNA, 965 bp, Oryza sativa
  Clone ID: PAT_MRT4530_98627C.1
atggccaacgacgactctgactctgacaaccgcttgcatacgcactctgaaaccgtctggtgtcgctgggccgggcgccgttccaccacggcgtcgaggcggtgggacacacgcacggggccgccgcgcgacgagttcgccccttccgtgacggatcagctcgccgaggcgcgggcgtccagttcgatcgacctcaccgcgacggccaggccagcctccaggccgaggcacgccggcgccgggaacgatcgaggtcgcggcgtccgaatccgagacacgaacacgatgaacgccaccgttgcatcaccgtcggagccagccgccaccgtcaccgtcgcatcgctggacgagctccgcgaggtggccgagcatgatccccgcgcgtcggaggaggacgggggcctgcgcgtggcggtcaccggcgtccccgtcagccaggcggaggagctgcacgcgctcgtccgcgaccatgtcgaggcgaagctctggagcgtcgtcggcgaggtcgacgccatggcggcgctcaggtccgctgccgacggcgccgcccgcctcgtggaagctgagccgcgcgctggacgccgtcgcggccggacacggaggacggcgtcccggtgccggccacggggccccgcatcacgctgctgacggagctggcccgcgacgtgtccacccaacggccgccgccgttcctcccgcgcaagtacgtcgttgctgtcgtcgaggcggtggacatagggaggcaggcggaggcgctgagctactatcggtactccggcgacagatggacgtcgccggagtcgctggagtactcgatggcctacttccggcggacggcggagaagacgagggcacggatcgctgccctgttggggatgactatcccgttcgaggatcctcccattgttatccacatcctcgaggtctcaagttgggaagccagatattactccaattcatcgtaa

SEQ ID NO: 100962 - DNA, 1506 bp, Oryza sativa
  Clone ID: PAT_MRT4530_98628C.1
atggcgagagaacaaggaggtactgaaccctctcctggtctaggccgcatggtagtggtagaggatttcgtccgttgtggttttttacctcccccttcggaatttcttttgttgatattgaacttctatggtctttctctcttgcatctcaaccccaactccatcgccttcctaagcatcttcgctcacctttgtgaggcctacattggggtagtgcctttcatctacctttttcgcttcttttacgaactccgttggatggagggcacccgagtgtctggatgttgtgggttccgccttcgtgacggcatgaaggcgagatatattcctttccagaaccactcatctcggggccaatggcggtccaagtggttttacatcaagccgctctccgacgacgccgtggtgcagcgagtggggaatgtggtgattacctccgcctccaaggccgaggagatcccgactcctatctgcgaccggccggaagtggagaaggtcgccgccatcaatgtgagtcctgccattgatggacgtcatcggtccccttgtcgatcactaggcctccgcttccctcaaggagaaggttgtggaggaggtcgccgctgctccctctgtccctgtcaccgcatgggggagtgggaccaagaggaagccgtgggctcggtcaagcgcctccgccggatctcgacagaagtccgcggatctaaggatactggtggcctcccccctcctctgaagaggaggttagtgaagagggccgccgataagaaagcttcaacgacctccgcgcagagcggcgatgaggtggtgactagcgggactcccgttgtcacctctcctcgtgcgaagtctgcacctgctgctgccgagtccgccgagcctgctgtcgtgactacgactgtgcttcggaagagcttcaccagcctacaccagctagccctggagtgcagcgtgaagtcttctatccctgcgcaccccaacgagacctccctgacatcggcgctaggagagctggcgacgaagatggaggtcatcccgtctaagcatgccgccaaggtctcggaggagatctccaacgggatccacacgggggcctgtcatgtcctcgcttgcgtgaagctcgctctccctaacgccgatcttaaggggatcttgtctaagggggctgacgatgccacgccatgttttccttctcatagaaatgttgatcctgaggacgtccagcaaggcggacatcctgatgtcgatgcgacgaaccaattttcattgagtggaatgccttcgtcggacattggtggggtcatcggcgcgtctgtggatgtaaatgccgcatctggcttgtcagatctcgacgtggcctcgctcctccgagagatctcagatctcaggaacacgcttggcgagcgagatcgacaagttctctactggaggacgaagtttaaggtggcagagctcgaacgatccgtcgtggtcgtgaagaaggatcaggctattgaaacgctctga

SEQ ID NO: 100963 - DNA, 621 bp, Oryza sativa
  Clone ID: PAT_MRT4530_98629C.1
atgccgtcacctttggtgctgctgcttcagtgcttcggagacgttgcactgacggacctcctcgtcggacttgcgccgctgctcagttgccttcaaagccgccgccgctggttggacgcccgctcgaagcagcagccggcgccgctggagagtgagcgcttcgaagttggaatggatagtgtgctgctgggagcttacgagctagggtttgcagcactttacccacctctcgactctgtctccaatcgcgcggtggccgccgtcctcccgtcgcgcggtggggcgccgccggctcccacccccccccccccggtcgtgcgcgccgccggccgctgtcatcccgtcgcgaggtggggcgtcgccagccgccaccctcccgtcgcgcggtggggcgctgccggccaacgccctcctgccaccctcccgttgcacggtggggcgccgccggccgccgccctcccatcgcgcggtggggcgccgccggctcacgccctcccgtcgcgcgcgccgtcggccgctgccctcctgtcgcgaggtagggcgtcgctggtccccgccctcccgtcgcgcggtggcgcgccgccggccaccgccttccagtcgcgcagctgccgcccatag

SEQ ID NO: 100964 - DNA, 1023 bp, Oryza sativa
  Clone ID: PAT_MRT4530_9862C.1
atggtgctggccaacaccgccgccagcggggaggagctcgtggcggacagccacctcctccccgccgtcgcggtggggaagctcgccggcgacaagatacgcgagtacgcctcgcgccgcgccgccggcggcgccggcgcgccgatggcaattctgagcttcggcggcacggttcttggcgtccggccatctcccgtcgtggcggcgttcagctcgcgcggcccgaacaccgtcgtgccggagatcttgaagccggacatgattggccccggggtgaacatcctcgccggctggtccggcgtcgccgggccgacggggctcgtcaaagacggccgccggacacacttcaacatcatctccggtacatcgatgtcgtgccctcacatcagtggagttgcggcactcctgaaggccgcacaccccgaatggagccctgccgcgatcaagtctgctctgatgaccactgcttacaccgtcgacaacacaaactcttctctccgagatgctgctggaggcttgcttgcaaccccattcgccttcggcgcaggccatgtcgacccgcagaaggcgctatctccaggccttctatacgacatctcgactaaggactatgtttccttcctctgctccctgaactacaccacaccacatatccaagtgatcactaagatgtccaacatcacctgcccaagaaaattccggcccggcgacctcaactatccctcgttttcggttgtgttcaagaagaaatcaaagcatgttatgaggttcagaagggaggtaaccaatgtcggcccagcaatgtctgtttacaatgtgaaggtcagtggccctgcatcagtcagtgtgaaggtgacaccagcaaagcttgtgttcaacaaggtagggcagaagcagagatactatgtcatattcgcgtctacggttgacgcaagcaatgcgaaaccagatttcggttggatatcctggatgagcagccagcatgttgttcggagtccgatcgcgtatacatggaagatctga

SEQ ID NO: 100965 - DNA, 349 bp, Oryza sativa
  Clone ID: PAT_MRT4530_98630C.1
aataaaaaagggggggtttttttgcttacaatttttattgatgattcttcaatggcctactttataacttatctgaagtgggatgtacattcaagctaaaaacattgatctggaaaacttaaagactttcatattttttttcgattctaaataaccaaaaaatctcggggtggaaaataatcctttttttgcgttttatgtcacagtaagactataattaattgaattgtgtgggcctcccttttctgatatatggactaaaattcgcacgttgagttaattataatgaatcccaacatggaatgaggtaatcttttttaaataaaattccctagtttttttttttttt

SEQ ID NO: 100966 - DNA, 192 bp, Oryza sativa
  Clone ID: PAT_MRT4530_98631C.1
atgggtggtggcttgggtgcaacagcgacagggaccttctcctccccctcccccttttataatcccgccctaaaactagtcttcctcccacgaacgaaccgccctgcgccgctgcgctgcggcggcggcggcggctcgctccggccctccaggggctgcagggaggccggtttaccgttttgccctcggtag

SEQ ID NO: 100967 - DNA, 1391 bp, Oryza sativa
  Clone ID: PAT_MRT4530_98632C.1
gtttttttttttttttttttttttttttttttttttttgatacttagcagggatgctaaaaatttattgattaggcgggctgcagaagcgcaaatacacgaaatatagatacaattcaagttcacactttttttttccctttgaataacaattcaagttcacacgatcccaacaacttcatccttcagcacaagaagtttcagttcagagaaaaatgattgcacaagaagctcccagggacagtagaaaagcccccattattgttcgtgctaaagactcataattcatcaagcaaacaggtcgattccccagaacttggcaggctggttggtgcggtacttccggtcgatggatctcatcttctccatgtcctcgtcggagatggcgaaatcgaagaccgcaaagttctcctgcaatctctcctccttggatgtcttggggatcaccactgtgttcctctgaagcccccaccggagcaccagctgcgccggtgtcttgccatatttctcagccagagacttgatgacagggtcgtcgaggcatgagacggacccaaaccactcagtattggcagtggagccacccagaggggtatgggcagtgactaagatcccatgcttctggcagaacttgacaagacagtcgcgctggaagtagggatgtgtctcgatttgattcactgcgggctttatcttagcataagccaaacaatcttggttagggaaaatatgtcatagttgctaatcccaatgctgcgaaccagtcccatggaaacaagatcctccatagcgtgccatgttgtctccaatgagatagtggtatcaatgtctagcacaccatcatcaccaagagcactagcagtcgtaccaactccagtatgacgggtagctactgggaagtggataaggtagagatctagataatctagccgcaactttttcaagctatccttacatgcttcaaccacatgcccatgatctgagttccacaacttggttgtgatgaaaagatcctccctcttgacaagtccagtttggaatgcctctgcaagtgcatccccaacttcagcctcgttttggtaatcagcggcgcagtcgaagtggcggtagccgatgcggagtgcggagtggatgaggtcgcggatggcgggggagtccatccgccacacgcccaaccccaccgacggcatcgtgtggccgctgctcagcgccagcgccgccggcactccgctcccctgcgccgccgccatcccgcgcctctgctctgctccgccgcctcgttggaatcggagacgagaagaagaagaagagtgcgtccttcttctgatgtgatgcactaccagtgagattctcgatgtgcctctcgtctccaagtagattggcatcttcaca

SEQ ID NO: 100968 - DNA, 1523 bp, Oryza sativa
  Clone ID: PAT_MRT4530_98633C.1
gaggatctggtctgcccgcggacgcggctgcagaatgcggtgtggagttggctgtataagtgggtggagccggtgatgagcagctgggcgatgagcaagctgagggggagagctttggataggctcatggcacatccactacgaagacgagaacacgcagtacctctgcatttgctctgtcaacaagggactagggctctaaacatggtctgctgctgggcggaagatcccaattcagacgcattcaagcagcatcttgcgagagtacctgatttcttgtggctttcagaagatggcatgaaggcacaggtatatgatggttgccagagctgggagacagcatttataattcaagcgttttgtgctactgatcttgtaaatgagtatgcttctactgttcagagagcccatgagttcttgaaaaattcacaggttgttaggaatcatcctggtgaccaaagttactggcatcgccatagatcaaagggttcttggactctttcatctgcagacaatggatgggctgtgtctgacactacagcagaagcactgaagaacaaagatggtaccgtttctacatatgaatgtaaaagaacttctacttggatagagattctcaagccttgcgagagttttccaaatatggtggttgattatccatatccagaatgtacctcctcagtgcttcaagctttggtgctgttcaaagaactatgccctggttaccgtactgaagagatagaagaatgtgttagaaacgcatcaatgtttattgagaacacgcaacgcaaagatggctcatggctaggcacttggggtgtatgcttcacctatggggccttcttttcagtacaaggattaattgctgctggaagaacatatgagaatagttcttccatcaggaaagcatgtgattttataatgtcaaagcagctcaatactggtggatggggagaaagtcatgtctctaatgaaactaaggtttatgtaaacatcaaaggtgatcatgctcatgcagtgaatactgcttgggcaatgctgactttaatttatgctggacagatggagcgagatccaaccccactgcattgtgctgcaaaagaattaatcaatatgcagttagaaacaggggagtttccccaacaagaacacgttggatgcttcaattgctccctcttcttcaattaccccaactaccgcaacttattccccatctgggctcttggagagtactgtaatcatctccgctaaaagaggcatgcatgagcatggcattgtgataaaggaaggggtcgatgccatgccatgaatctcttatatatgctacagatgttactgagcacctcatcaccctatacaaatatgtacttacttatatactacctgatgttgtatatattgtcaagacctggtaaacataattcgctgggaaacagtataggaagagagtgaaacttaaacatgatttgttgttgttgtatttgtatccatgaagataaactgtcttaataaatttctctggg

SEQ ID NO: 100969 - DNA, 324 bp, Oryza sativa
  Clone ID: PAT_MRT4530_98634C.1
ggccggtatgacggttgtaccaatgcgaattgtgcattttaccctcacaaccgtcattaagagtgcatccggatcgtacacgtggagggccaggctgattgggcaccgccagttcggccgaaacctgggctagcccaacaggcctccagcttcgataaaatctgcaagtgcacggaagataccgatgcagcacttcaactggcagtattccaaggcactggccagctcgctactcccaaatgtcactctactacatacccgtacatggaggactttagtgtacttgagggctatcaccacctctacaccgatctcaaacctact

SEQ ID NO: 100970 - DNA, 216 bp, Oryza sativa
  Clone ID: PAT_MRT4530_98635C.1
atgtcggcggcgcgggggggggggagggcgtcctcatcggcggtggaggaggagctgagggcgctgatggagaagcggcgggcgaagatgatgctgtcaaatagggagtcggcgcggatgcggaagcagcgccacctcgacgacctcaccgcgcaggtggcacacctccaccgcgagaatgtgcacgtcgccactgcgctcggcctcaccacctag

SEQ ID NO: 100971 - DNA, 1991 bp, Oryza sativa
  Clone ID: PAT_MRT4530_98636C.1
aaggggaggctgaagctggccgagagcggcagcgtgttgctgcggtcggcgaaaggttgcgacgggtctggggtgtgggaggtcgacccagaaggcggcgagggggagggcctcgcagaagtggcgagggtgggacatgagtttacggatgacagcctctggcgccgcgagtcggctgatcacgtcatgcgcacgtagtttgcgaaaccgagaaagcgtgaacatcgtcgaggtagtattccaccaacggtctaaccaaaattgaaggaagagcagactaaagaagtttatatggcttcgtccaggccagctttagattagtctggatctgtgcctgcagcagaagcaaactaggtctgatacgtctgctgtattaatttatttatctctggagttatgcgatgcggctgtgagtgggaaagaatgtaagacaccttccattgggtttgaaaagccctagactttatgcagtttaatacaggagaatttcgctgacagatacgcaggatatacctccccagggcctacttgtacggttagaatgacggaggccccaccttaccgaccaacctggcagtttgagaagtgagttagccactccacaatattactagcgaatgggctaagggacgcagcttctgcgctagggaggttctgttctgcccgagcacgcgggtgcttcatgtcagttaaaggtttcattgctggtggaaggacacattaaaatagttcttccctaagaaaaacatgtgatgtagtaatttcaaagcagctcaatactagtggatgtacagaaagtcatgtctctaatgaaactaaggtttatgtaaacatcaaaggtgatcatgctcatgcagtgaatactgcttgggcaatgctgactttaatttatgctggacagatggagcgaggtcctgccccgctgcattgtggtgcaaaagaattaataaatatgcagttagaaacaggagagtttccccaacaagaacacgttggatgcttcaattgctccctcttcttcaattaccccaactaccgcaacttatttcccatctgggctcttggagagtattgtaatcgtcttcgctcagagaggcgtgcatgagaacatggcaggaaactcttatacatgctgcagatatattgatcgccctgtacaaatattactcggctatacctaaaaaaacaagcaaaatcttctagctccgttgcatatctcggatgtaattgcttgcgatccaatttgatgttgtatatatattgtcaagactggttatcgtaaattcataaccctttggcttttgaggcttaaaaaaaattcaatatatatgatggcttcttcttggatagagattctcaagccttgcgagagttttccaaatatggtggttgattatccatatccagaatgtacctcctcagtgcttcaagctttggtgctgttcaaagaactatgccctggttaccgtactgaagagatagaagaatgtgttagaaacgcatcaatgtttattgagaacacgcaacgcaaagatggctcatggctaggcacttggggtgtatgcttcacctatggggccttcttttcagtacaaggattaattgctgctggaagaacatatgagaatagttcttccatcaggaaagcatgcgactttatattgtcaaaacagctcaatactggcggatggggagaaagccacgtttctaatgaaactaaggtctatgtaaacatcaaaggtgatcgtgctcatgtagtgaatactgcttgggcaatgctgactttaatttatgctggacagatggagcgagatccaaccccactgcattgtgctgcaaaagaattaatcaatatgcagttagaaacaggggagtttccccaacaagaacacgttggatgcttcaattgctccctcttcttcaattaccccaactaccgcaacatattccccatctgggctcttggagagtactgctggcatctccgctaa

SEQ ID NO: 100972 - DNA, 377 bp, Oryza sativa
  Clone ID: PAT_MRT4530_98637C.1
gtaaatgggtatatcagtgcatgcaacaaggatgggtaaggcaagcacatggatgaatatttcttgtataaaaagtgtgatgcttgatgattctaatgtatcatcggttagatcatataaatttcattgcttggacgtgttgtgcctcttcttgtacaagaactaggacgggctcaacatcttccacatggaccaggacctctccttgcagctgtcattcaagtgtggcctcatcatgccggctaactgttaataagactgctactgtttgtctggcgacatttgcaggcactgcgactattgacatgacgtgcgcaatttgggattcttctactgctatcttgagtctagatatagaagagtgctagcataaaatg

SEQ ID NO: 100973 - DNA, 881 bp, Oryza sativa
  Clone ID: PAT_MRT4530_98638C.1
tttgtcggcattcatcgccgaaatccccaaatggacacggcgagcttgtgcaccgtggagaagcgcggcgccgtccacgtcatcaccctcaccggcgccggcgagcaccgcctcggcccgcccctcctgtccgcgctccgctccgccgtcgccgccgtccgcgccgccgccgccgcgggcgccggcggcgcgctggtgattgccggcgagggcaagtacttctccaacgggttcgacctggactgggcgcgcaccgtgcccgccgagctgcacgcctccatgggcggcgccttccggggcctcgtcgccgacctcctcgctctcccggtgcccaccgtcgccgccgtcaccggccacgccgcggccgccgggtgcgcgctggcgctcgcgcacgacgccgtggtcatgcgcgcctcccgcggcttcctgtacatgagcgaggtggacgccggcctcaagatcgtcgacttcttcgccgagctgatccggcagaaggtccccgacgccgtgaacaggagggatctagtcctccggggcgacaagatgacggcggccgacgccctgcggcggggcatcgtggacgcggccgtcgacggcggcgtcgacgacgtggtggccgccgccgtccgggaggcggaggcgctcgcggcgaggggatgggacggggagatcgtggccgagaccaggaaggcgatttggccggagctctgggccaaggtgaaggaccacgccaccgacgagcctccgccgccgccgccacggccgctgctgtagtctaccttaccgtatgttgtatcgtgtatgcttccgctgcatcaagattggtgcgctgcaaatgtatcctcgcaggattgcatgatttgtatcacatgattctgctc

SEQ ID NO: 100974 - DNA, 207 bp, Oryza sativa
  Clone ID: PAT_MRT4530_98639C.1
atggtacacccaaaagggaaaccatggaacgccgccgccgtttcacgctgtgcctcgccggagcgccgccgcaccatggacgtaagggtgacagccgccacccccgccagcgccgccggcgagcggtggtcggcggccggcggccggtcggaacatgagtatcaacggcggacacagcctcatgaaaaattacataatttctcatga

SEQ ID NO: 100975 - DNA, 6252 bp, Oryza sativa
  Clone ID: PAT_MRT4530_9863C.1
ggagtttgtagatggaaagagtcctactcgaacaagactgggtcgtcaatgtatcgtgtaaggtccgatgtctccaagtcctacttggaaactacctgacctgcgatataaaagggaccccctaggaggacctaagacatcgaatctcagaaccaacacaactcccacagcctacgaaatccttgtaccaacgtaccccaataccttctatatccggtctacgggtatcactcgtcgacagtggcgcgccaggtagggggacttggtgctcaaggttctactactatgtcatccagcttcgtcgacaacaacatcaacaccaaccacaaccagggattttctgcttcaacaatgctggtgtggactcaagtcagcgaaatcgtcttcccggtttacaccacgatgccgatctcagccagtccatcaatgaccggaaacgagaacgcagtggctacaacccaggacgactccatgtcgaaggatcctcccgctgaagcggagaacggaacatcgacgacatccgagctcgagaaggattctaatgcggccaaaccttgtcgttccgacaagaaccacgagccgacgaggatgacttccaaagcgacaaggtcctggtgtcctatccacaaaaccaggaaacacactttgcaagcctgctgggtttttctcaacgtccgcgccgagattcgcgcctgcaaagagcgtggaattcagcgtatttctccaactcatgatgtctattgtcctattcacaagacaaagaatcacgacctctcaagctgcaaggtctttctcagcgccatgaaggctccatctcctaaggtccagcagtcacacatccccatcagggataaagacaaggaacaaggagcgacaccaatttcagatcgatttgttggggtaatcgacatcgatccccatgaaccatcagtcttgcacctcctcgaagactatggatcattgacaacgagcgcgccgcaggaagtattggctatcgacgatgtcggcacgtcagcatgcaccaatacggaagcggagaatcaagtgatcactccggcccagcacatcagagccgtcaacgcaatactgagggaaaccccctatgatcccgttctgaacgacgatctcgcacgttggacagaacgactacgggaatcagtggccaacctcggtaacgcattcgaagaggccgctgctgcagcgcgtccgaaacagccaccaactggcgatgctaatggtgaaaacccaaaatagcgggaatcacctcatcgagccacccctccacctcgcggcaccgacgatctccgcgatcacctaaatagccgccgagaggcgtgacgcacacgaaataatgagaactgttccgacatcgcgtctcttcacggcgtcacaataacggtgatagccgccacaaccgccacgatcacgacgagcatgaacagcgggcgatactggtcgaggacaacgccataatgacaacgatggtggagatcggcgccgagacaacagcgggagacggcgacaggattctcgagaacccggccgacgtcctcgtactcatgcgccggaaccaagcgacccatcgtcatcgtcatcatcctcgtcatcttcatcagatagacatcctcgaaggacgtttgattgccgacaacccactgctcccagcgctgggtgtagagctttcggtcgttcacttcgggatgtccgatggcctaaaagattccaacctggagcaatacagaaatacgatgggagcaccgacccggaagagttccttcaggtttactccacggtgctctatgccactggagcggacgacaatgcgttggcgaattacttgccaaccgcattgaaaggctctacacgttcatggctgatgcatctccctccctactcgatctcttcgtgggcagacctgtggcagcaattcgttgccaatttccaaggaacttacaagcgccacgcgatcaaagacgacctacatgcgttgacatagaacccgggcgaatccttgagagattatgttcggcgcttcaatgagtgcagaaacacaatccccgagattaccgatgcttctgtaattcgcgctttaaaatccggtgtcagagattgctacactacttaggagttggcaacgagacgcatcacaactacttggaggttatttgaaattgtcgatcgatgcgctcatgcggatgacgcactgagacgcaagaatgacaaaccgaagaccggaggagagaagaaaccagccaaggacgcacctgagtcaagcaagaagaaaaattgcaaaagtgggaaaaggaaagctcaagcggaagttcttgcagcagaatacgcgaaccctcccaagcgcccagacccacaaggtagcgacgcgaagaaagcatggtaccccatacacaagacggatagacattctttggaaaactgccttgttttcaaaaagttgctcgagaagcacatagcatttgaaaaaggcaagcgagtacgcgtggtcgagaaggatgcagaggcggctgctcaggaatcggactcagcatatccagactctgacctccatgtttcacacattttcggaggctccacagcgacgctatccgatcgtgttcgaacccactattcagaacatcaaggtcgcacgggttctcatcgacggtggcagctcaattaaccttctcttcgccagcgctttggacgcaatgggaattccacgaagcgagttgacacccaccgaccaacccttccatggaattactccccagtcctcgtccaaaccatttggcaaaattacgttgcctgtgactttcggccaagcaaacaacttccgaacggagcagatcacctttgatgtcgctgaattcgatacagcgtataatgccatcatcgggagaactgcacttgcgaagttcaaggccgcatctcactacgcgtatcaagtgctcaagatgccgagaccgaagggaacaatcactgttcaagggaacgcaaaactggcggtacaatgcgacaagcggagcctcgacatggtcgagcaaacacccagcccacccgccacaactaagccacccaagaaagtgagcaagacaaacaagacgccgaaactggacggtgcgatcaagatcgttccactttctagtgccaaccccgacaagaccgaactcgcgctcatcaccttcctccgcgacaatgctgatgtgttcgtttggcagccgtctgacatgccgggggtccccagggaggtgattgagcataaactcatggtgcgacccaatgccaagccagtaaagcaaaaactgcggagatttgcaccagacctaaaacaagccatacgagaagaactcaacaaacttctcaaagctggctttatccgagaggtacttcatccagagtggctagccaatccagtcatgatgcggaaggccaacgggaaatggagaatgtgcgtcgacttcaccgacctcaacaaggcgtgtcccaaggatcacttccctcttcctcgaatagatcaactggtggactcaacagccggctgtgagctgttaagctttctcgatgcttactctggctaccagcaaatcagcatggcaaaagaggacgaagagaagacagcattcatcacgccgttcggggtattttgctatgttaagatgccgttcggactgataaccgcagggaatactttccagcgcacggtctagggcgcacttagcgaccagctcggcaacaatgtcgaggcatacgtcgacgacatcgttgtcaagaccaagacaagcgactcattgattgacgatctccgggaaatgttcgacaacctccgacaatatcgcctcatgctcaatccagagaagtgcacgttcggagtaccgtcgggcaagctgctcggtttccttgtctctgtcagaggaatagaagcaaatctcgagaagatcaaggcaatcgagaacatgaagtcacccacaagactcaaggaagtacaaaagctaaccggatgcatggcagcactgagcagattcgtcgctaagatgggagaacgagggcaacccttcttcgctctactgaagaagcaagacaaatttgtatggacacaggaagccaaagaggcattcgttgcactcaagcgctacctatcaaacccccctgtacttgttgctccccaacctaatgaagaaatattcctctatattgctgccacgccatattccgttagcactgtcattgttgtcgagagagagaaaatacaacgaccagtctattacgtcagcaaagctctccacgacgcaaagacaagatattcacagatccaaaagctgctttacgcggtaatcatgacatcaaggaagctacgccactactttcaagcccacagagtcacagttgtctcctccttccctctcggtgaagttgtgagaaacaaagacgttgtcagccgcattgcgaaatgggtagtcgagctgagccagtttgatgtccactttgtgccacaaaaagccatcaagtcccaggtacttgccaacttcgtagccgattggactatgcctgataacaaatcagacaaccaagtcgacaacgaaacgtggacaatggcgttcgatggtgcactcaacagccaaggagcatgggcaggattcatcttgacgtctccttccggagatcaattcaagcacgcaatccacctcaacttcagggcgaccaataacacagccgaatacgagggactactcgccgggataagagctgcagccgcacttggggtcaagcgactgatcgtgaaaggggactccgagctagtcgcgaactaggtgcacaaagattataaatgctctaaccccgagttatccaagtatctcgcagaagtcaggaagctggagaaaaggttcgatgggatcgaggtccgacacgtataccgtaaggacaacatcgagccagatgacctagcacgacgtgcgtccagacgagaaccgctcgagcccggcacttttctggacatcctgacaaagccatcagtaaaagaggttagcggcgaagttagcccggccgcccccgacattagctcggaggccacagaggcagaacgcgccgttgccgatatcgagaccacatacgactggcgcatcccactaatcaaattcatcgacagtgaagagttgcccgaggacgatacagaggccgagaaaataacccgtaaagcaaaaatctactgcatggtcggcaatgatctatacaagaaagcgccaaactaggtacttctcaaatgcgtctcgtccgacaacggcagacacctcctccttgatatacatgaaggcatctgtgggtcacacgccaccggtcggacattggtcgggaaagcttttcgacaagggtttttctggccaaccgccctcaaagacgcatgcgacatgtaaacacacaaagctacccgtgcaagcgctccagactatccctcctacttggccgttctcgtgctgggggctagatatactcggaccattcccacgaggacagggcggctacaggttcctattcgtggcgatcgacaaattcattaagtggatcgaggcagtacccacgggggaaatcaaggccgataacgccattaaattcatgaaggggatattttgcagatacggactaccgcaccgcatcataaccgacaacggcccccagttcatcagcgccgacttccaggattactgcatcgggctgggagtcaagatatgcttcgcctcggtctctcatcctcaaagcaacggacaagtcgagagggcaaacggcatagtactacaagggatcaagaccctactatgggccgtacgcaccacaccgacaacatccaagaaggaaatacccttcttcctcgtgtacggctccgaggccatgctccccagcgagctacgacatcagagcacacgagtacaaaagtattccgaagaggatcaggaggagcaacaaaacatcgatgtgaatctactcgaagaacatcgcgaatgagctgccattagagcagccagttacaaacaagttctccgccgttaccacgagaagcgcattcgagcacgcatactttcgatcagcgactacgtcctccgacgggttcaaagccaagcagggcgaaacaagctctcacccaaatgggaaggaccttacacgatcacacaagtcttgtggccaggcgcattcaaaattgcagacggtgatggtcgcgagttggcaaattcttggaacattgaccaactacgtaaattctatgaa

SEQ ID NO: 100976 - DNA, 476 bp, Oryza sativa
  Clone ID: PAT_MRT4530_98640C.1
tttggttacaaaataagtaagcattattattccacaagaggatgcaagctcatatacatattgttgtttataaaaatacaaaaaaaagtacatagcaaaggacacttgaacatttaaataccgtgtcttaatatgacaaacactttaccaaaacacgctgaaccgttgtatacttgcagttgtaccattatctaaaaaaaatgcacctgtaccgtttctttactcatcttgccgatggaccaaattttgacaacacatccatggcatcactaactgagcttgtcgtgatgtccctgctgtcacgggcttcctccagtgccaagctctccttcagctgtagaaccacggtggacattgttggcctttgagtagcaacctctgatatgcagagcattgcagtatcaaccaccttccacatggagctaatgtcgtacaaatctttgagtcgtgcatcggcaaccaagctgatattacca

SEQ ID NO: 100977 - DNA, 838 bp, Oryza sativa
  unsure (1)..(838): unsure at all n locations
  Clone ID: PAT_MRT4530_98641C.1
ccggccgggatacagaagtatgaaagcagctacgtttacaagcagagatggaggcatccaagctagcaatctgcagcttgttcgtgctcgccgtggtagccgctacaatgtttcactgctccgatgcccagaactcgccgcaggactacctgtcgccgcagaacgcggcccggtccgccgtcggcgtgggtccgatgagctggagcacgaagctgcaggggttcgcggaggactacgcgaggcagcggaagggcgactgccggctgcagcactcgggcgggccgtacggtgagaacatcttctggggctccgccggcgccgactggacggccgcggacgcggtgcggtcgtgggtggacgagaagaagtactacaactacgccagcaacagctgcgccgccgggaaggtgtgcggccactacacgcaggtggtgtggcgcgactccaccaacgtcggctgcgcccgcgtgcggtgcgacgccaaccgcggcatcttcatcatctgcaactacgagccccgtggcaacatcgttggccgcaggccctactgatcatacgacgttgttgcaacaagctatatatatgtgtctagcacgcatgcatcgtccctcgctcgttacatgcacgcgctgtgtgtttgtgttatgtcttaattagagggagtaataataacattagtcaaatcaaataagtgagtaaatgatgtacttcagcttggattgaaataaagacaaaaccacgatcgatgcgtctgaaaaaaaaaaaaaaaaaagcggccaaaaactcgagggggggcccggtacccaattcgccctatagtgagtcgtattacaattnc

SEQ ID NO: 100978 - DNA, 1626 bp, Oryza sativa
  Clone ID: PAT_MRT4530_98642C.1
ctaaccaacatcccaataatccaggttcccatatccgtatatgtcgttactcatttgcagggaaccattttttcttcccaatcgcggtcgtcgctgcctcgcgcgcgtagggggaaaattgttcccgcgctccttttctcgccctcctcgccagtcgccagcaacaaaattcctcttcctcccaggcgtcggcagcggctttccaggcggcgaagcaacggccaaccccttcctcgcaggcgtcgtcgactgagttccacgcggagatgcagcggtcgtccccttcctctcggtcgcaggggtcggcgtcggtgttgctccaggcagcgatgcagcggccatgcccttcctctcaggcgcaggcgccggcgttgctccaagcggcgatgcagccgccgtcctcttcctcgcaggcgtcggcggcggcgttgttccagggggcgcccgcacgtcgaccaccgcctcctcgatttggggccgacggccctctgcgccccgcaccgccgcctcgccgtcgtctcggtctgcctcatcctcaacctccctactccggtgtgcaggcgacagagtccatggagggacatgctccatgggagacactgaatcccctctcacacgaagctcctggcgtcgatttctccacagcttattctgtgagtgatgaagaattcctccataggagcaatttcggtaaggctgtccctgattcgttcgatgtttaggatccgcggcaactagcaagtgctgcattgctgcagccttgccatctctgcagctatctggcagcctatctgtgtaaatgaagtgaagaagagcctcaaaaacctcaggctccatgtcgtcgatcttgatacattgcgtgccattttctttcatcggaccgaaaagctcggccttgaacaccggggaccggaaggcaagaacacatttatgagcacggaactcttggccacccacggtgaatgtcacatctgaaccttcaccatcctggagcatgttctcaaaatcggtatgcaggttggacggtgggacaacaacagaattgacctcaacatccttggtgtgggattccctgacgacggtcagcaagcacctgatggtcaggcagtcgttgtggaggaacggcgagctctgcagcttcgatttctcggcgaatttgatgaatccccaattgtcactcgccggggagaaggtgtgcttcatgtaggaattggtcacctgcgacaatttgccgtccttgccgagcagattcagggtgaacctggtcctgacctccttctccctgccgcagtagtagaggaacgccgacgcgttcccgaggcaggtgacggtggagccgtcggggtagaacctgacggcccagtcgacgccgccgacggtgaaggtggatgagctgacgtacctgccgatgcccagcccctcgatcagcgagtaacccgtcaccttgaaatcgtgcaccgcggtgacggactccgtgacgctcaccgacgacgtcttgggcagccggcagccgcccgccgccgcggggaaagccgggtcgcggtgatcacccatggcggcagcggaggcggcgtgatagagggacggcggcgcgatcagctggatgctatgcggcccgatatccat

SEQ ID NO: 100979 - DNA, 329 bp, Oryza sativa
  Clone ID: PAT_MRT4530_98643C.1
tcaattatattccagctccgccactgttcttatgcataaaaaaagaacactcattctggtccgagagaagaggacgaggagaagaggtccgagaggcgacgatggcgctggtcgctggtcatcctggcgttgtggatcccagccgacgtccggggtcatggcggggacgtccggagggtggggacggcggtggagagggagagcagcatagacgaggtcgaggtggtggtgaagacgacgtcgaggtggcggcaaatacgatgtcgaggttcagcgtcgtggagggcggggcggcgccgaggacgaacggcggagagggcgagcagtga

SEQ ID NO: 100980 - DNA, 1203 bp, Oryza sativa
  Clone ID: PAT_MRT4530_98644C.1
atggccggcccgcctccgccgccacagggcgcggcggggcagccgccgcagtggggcgcgatcccgccgccgatgccgccgcaccagtacggcgcgccgccgccccagcagccgccggcgatgtggggccagcccccgccgcaggcgcactacgggcaggtgcccccgccccagccgtactacgccgcgccaccgccgcaggcgatgcccgcccccgcggccgcggacgaggtgaagacgctctggatcggcgacctgcagcactggatggacgagagctacatctacaactgcttcgcggccaccggggaggttcaatctgtgaagcttatccgggacaaacaaagtggacagcttcagggttatggctttgttgagtttacaagtcgtgcagctgctgatcgaattcttcagacttataatggacagatgatgccgaatgttgagatggtcttccgattgaattgggccagtgctggcgagaagcgtgatgataccctgactacaccatttttgtcggggatttggctgcagatgttacagactacctactacaagagacattcagggtccattacccttcggttaaggggttatgggtttgtgaaatttggtgatcctacagagcaagctcgtgcaatgactgaaatgaatggaatgctttgctcttccagaccgatgcgtattggtccagcggcaaataagaaaacaacaggggttcaggagagagtaccaaatgctcaaggagctcagtctgagaatgatcctaacaataccaccatattcgttggtggtcttgaccccaacgtcactgaagatgtcttgaaacaagttttcgctccttatggagaagttgtccatgttaagattcctgttgggaaaagatgtggttttgttcaatatgttaacaggccttctgctgagcaagcactggcagtgctacaagggaccttgattggtgggcagaatgttagactttcgtggggtcgaagcctttcaaacaaacagcctcagcacgactcgaatcagtggggtgctggtgctggtgctggtggttactatggtggctatggacaaggttatgaggcttatggtgggtatgcacaacctcaggatcctaacatgtatggttatggagcctatgctggttatcccaattaccaacagcaacaagtagcacagcagcagccgccgcagcagtga

SEQ ID NO: 100981 - DNA, 4572 bp, Oryza sativa
  Clone ID: PAT_MRT4530_98645C.1
atagagtaaatccaacatttcaaaaaagatgaaaaggggaagaatgccctttttttttttttggtgctaaggagtcatccatatacataagatttctactgttcatacatattaggcggttggaaggatcacacaacttaaaaagatcaaagtcgcatatagagatgtagataactgatcatgactttcataactactaagatgtactactacaaaagtgatagcttaataaacttctcagcaagacttgtcaatccaaatatgtgaaaccttactaaagctgttgccgcggtttttgctttgctatttgttaatctttctatttatagtaataatcatagtctacgtaaacatacagattggaacacaggagttgttcataaacaacataactctatttaggaaccccgatatggcagtagcaattatcaataatcataatacaatccaaatattaaaacctgaattgaaatcttgagtctgaagaacctgtctcccaagagagactaacattaagctaaccaatcaaggacctttgtagcactgctagtccttgcacagcagagagcctgttaacaaaatgaccatcaccacatctgtgcccaatactaatctaaacatggatgacttctccataaggagcgaacacaggtttcatgacaactccagtgacgttggggtcgagacccccaacgaatatggtggtattgttagtgtcattctcagactgagctccttgagcatttggtactctctcctgaacccctgttgttttcttatttgccgctggaccaatacgcatcggtctggaagagcaaagcattccattcatttcagtcattgcacgagcttgctctgtaggatcaccaaatttcacaaacccataaccctttgaacgcattgtcattttgtcagttacaacttttgcacccttaaccgaagggtaatggaccctgaatgtctcttgtagtaggtagtctgtaacatctgcagccaaatccccgacaaaaatggtgtagtcaggggtatcatcacgcttctcgccagcactggcccaattcaatcggaagaccatctcaacattcggcatcatctgtccattataagtctgaagaattcgatcagcagctgcacgacttgtaaactcaacaaagccataaccctgaagctgtccactttgtttgtcccggataagcttcacagattgaacctccccggtggccgcgaagcagttgtagatgtagctctcgtccatccagggctgcaggtcgccgatccagagcgtcttcacctcgtccgcggccgcgggggcgggcatcgcctgcggcggtggcgcggcgtagtacggctggggcgggggcacctgcccttcgtgcggcagacgatgtggacagccggcatcatccggcggctgttggtgtggaggcttcgatcagcagctgcacgacttgtaaactcaacaaagccataaccctgaagctgtccactttgtttgtcccggcataagcttcacagattgaacctccccggtggccgcgaagcagttgtagatgtagctctcgtccatccagggctgcaggtcgccgatccagagcgtcttcacctcgtccgcggccgcgagggcgggcctcgcctgcggcggcggggcggcgtagtaggcgtggggctgggggacctgcgcgtagtgcggctgcggcgggtgggtggcgacatctcggccgtggtcgctgtcgaggccctccgccatcctggtgtggcggcatcggcggcgggaccgcgccccactccggcggctgccccggcgcgggctgcggcggcggaggcgggccgcgcatgccgggctgcggctgcgacggcggctgctgcatcatggcgacgagatggcgtaggtagcacggacgaggaggaggatgacccgagtgcttctcgcgaatggcggagccggacgcccacgagcctccccacggaaggccgccgcgattgggggacgggccacaaagagaaccgtgacgctcccgcggaacgccacgtcccagccccgcccgtcgcgcagtatccgcgccaggtgctcgtggaggctcggcggcggcaccgtgacgcgggggcccctctccttggccggcgcgacgctcaccacgcgcgggccggtgaccacggtgaccacgcaccgtatggtcagggtgtcgtcgtcgaggcacgagtacgacgacgacgacggcgacgacgacaggttggatttctcgacgaacttgaggacgtcggcgctgcggctcgtcggcgtgaagtagtgcgaccgcagcgtgtcgccggcgagcggcgacgccctgccgtccctggccaccaagctcaggctgtacttggctctcacgagcctctccttgccgcggtaggcgaggcaggccgacgcgtagccggcggaatcctggtcgaggccatcggggtagaacgcgacataccagtcatggccggcgacgctgaagtcgccggagcagacgtgccttccggcgccgaagccgtccatcaacgagtagccgaccacctcgaagtcgtgcgtcccggtgatgccctcccacacgctccgtgaggacgtacgggcagccgatgaagtcaacatgtctgccacaacatcccaataatccaggttcccatatccgtatatgtcgttactcatttgcagggaaccattttttcttcccaatcgcggtcgtcgctgcctcgcgcgcgtagggggaaaattgttcccgcgctccttttctcgccctcctcgccagtcgccagcaacaaaattcctcttcctcccaggcgtcggcagcggctttccaggcggcgaagcaacggccaaccccttcctcgcaggcgtcgtcgactgagttccacgcggagatgcagcggtcgtccccttcctctcggtcgcaggggtcggcgtcggtgttgctccaggcagcgatgcagcggccatgcccttcctctcaggcgcaggcgccggcgttgctccaagcggcgatgcagccgccgtcctcttcctcgcaggcgtcggcggcggcgctgttccagggggcgcccgcacgtcgaccaccgcctcctcgatttggggccgacggccctctgcgccccgcaccgccgcctcgccgtcgtctcggtctgcctcatcctcaacctccacgaagctcctggcgtcgatttctccacagcttattctgtgagtgatgaagaattcctccataggagcaatttcggtaaggctgtccccaatgcaagcctgtctcagctgcgagcagtgatgttgttctgctaaaacaagagtggttgccactgtttccacatcaatggtttcgctgagccgcctctcacaaatcagcctcagcctgtccactccgtaccgatccgcggcaactagcaagtgctgcattgctgcagccttgccatctctgcagctatctggcagcctatcgggggtgtgtaaatgaagtgaagaagagcctcaaaaacctcaggctccatgtcgtcgatcttgatacattgcgtgccattttctttcatcggaccgaaaagctcggccttgaacaccggggaccggaaggcaagaacacatttatgagcacggaactcttggccacccacggtgaatgtcacatctgaaccttcaccatcctggagcatgttctcaaaatcggtatgcaggttggacggtgggacaacaacagaattgacctcaacatccttggtgtgggattccctgacgacggtcagcaagcacctgatggtcaggcagtcgttgtggaggaacggcgagctctgcagcttcgatttctcggcgaatttgatgaatccccaattgtcactcgccggggagaaggtgtgcttcatgtaggaattggtcacctgcgacaatttgccgtccttgccgagcagattcagggtgaacctggtcctgacctccttctccctgccgcagtagtagaggaacgccgacgcgttcccgaggcaggtgacggtggagccgtcggggtagaacctgacggcccagtcgacgccgccgacggtgaaggtggatgagctgacgtacctgccgatgcccagcccctcgatcagcgagtaacccgtcaccttgaaatcgtgcaccgcggtgacggactccgtgacgctcaccgacgacgtcttgggcagccggcagccgcccgccgccgcggggaaagccgggtcgcggtgatcacccatggcggcagcggaggcggcgtgatagagggacggcggcgcgatcagctggatgctatgcggcccgatatccatgacctcatcacaatccaaggcctcagaaatcgatcgattccgacaagcgggatagcccacccgccgcggcggcggaggggggatcagcgaagccgagcggaatcgggggagatcatccagattcggggaggatcggaggggagcgcggctctggtagggagagggatcacctgaattcctctcgcgaatggcggaggcggacgccgacgaggctccccactgacggccgccgcggttggaggaggcgcaagaaacggaaacgaaaccctccctgagacaaac

SEQ ID NO: 100982 - DNA, 433 bp, Oryza sativa
  unsure (1)..(433): unsure at all n locations
  Clone ID: PAT_MRT4530_98646C.1
agggccacctttgcttagtttgtttcgacgagttctgctttcgggtgagctgatcagtttcgatcttcaacaagaggatcaaatcaactggcacgctcatacattcgaaggcgagctntggacctacattggagttaagcagatctcccaggccacgtgttttctgtcaacagctgggcaaaatgaaaatggtagcgtgtgttgaggttctggataaaaatgtttgcgactttaacctcttcttttattgtgttggtaaggaccaaagataattcaaaaaaaatcttttctacaaactccttaatcagaaatatctgattattaattaggtgaatcgtgttatcttatccatagatttatttttcaaacatgtctttaaagttggggggctaataaatcccaacaaaatagcagtttaatatgtatatatatt

SEQ ID NO: 100983 - DNA, 2202 bp, Oryza sativa
  Clone ID: PAT_MRT4530_98647C.1
atgatgacttcgggcttaccaaattttggcgttaacagcatcgtggagggttcaaatttctatttctacactaaggacacagtagatgatctcgatgacaagcaaggacagggtttcatgtcggccgatgatttggaagaagttgacattggtccagggatagaccaaggccgacatttatcaatttttatggcaaaagaagacattcataagactgcttttagatgtcctggtgcaatcagcttatttgagtgggttgtgatgactttcggcttgaagagtgctggagctacatatcagaaggccatgaactacatattccatgatctgatcggcttgttggttgaggtctatattgatgatgtggttgttaaatcaaaacaggtagaggaccacatagccgatttgaggaaggtttttgagagaaccagaaaatatggcctaatgatgaatcccacgacgtgtgcttttggtgtatcagctggacagttcttgggttttcttattcatgagagagggattgaagtatctcaaaggagcataaatgaaatcaagaaaattcaacctccagaagataagacacaactacaatcattgatcggcaagattaattttgttcgaaggtttatatctaacctatctgggagattggaaccttttagacctttgttaaggttgaaagccgatcaagaattcacttggggggcagagcagcagaaggctttggacaatattaaggcatatttgagttcccctccagttttaattcctccacaaaagggagtgccttttaggttgtatctatcggccgatgagaagtcaatcaactcggttttgattcaggagctagaaggcaaggagagagctattttttatttaagtcgaaggctcttggatgcagaaacaaggtattctccgatggaaaaattatgcttgtgtttgtacttctcctgcacaaagttgaggcattatttgttatccaatgaatgcactgtggtatgcaaagctgatgtgatcaaatatatgctgtcggctctggtcctcaaagggagagttgggaagtggatatatgctttaacagaatttgacctcagatatgaatcacccaaggcaatcaaggggcaagctatagccgattttattgtggaacatcctgatgattcaatcggctcggttgagattgtgccctggactttattttttgatgggtcactttgcactcctggttgtggtatcgacttggttataatttctcctcggggggcaagttttgaatttgcttatactatcaaaccttatgcgaccaacaaccaggctgagtatgaagcagatctcaaggggttgcaattgctcaaggaggttgaagccgatgctgtggagatcatgggagattctttgttagtgatcaatcaattggcaagagaatatgaatgcaaaaatgatgttttgatgatctacaacgagaagtgccgagaactaatgaattattttcgtctggtgactttgaagcatgtctctcgggagcagaacgttgaagctaatgacttggctcatggagcgttaggatacaagccgatgatgaaggatattgaggtggaggtagctgcaatcacagccgatgattggaggtatgatgtttatcagtatttgcagaattcatctcagtcggcttcacgaaaattgcgctataaggctttgaaatataccttattggatgatgagctgtattatcagacgattgatgaggtattgcttaaatgtttgagtgccgatcaagctaaggttgtgatgggcgaagtacatgaaggtatttgcggtactcaccaatcagctcacaagatgaagtggttgcttcggcgtacaaggtatttttggccgacaatgttagaggattgcttccgatattacaaagaatgtcaagattgtcagaagtttggagcaattcagagagcactagcatcggctatgaatcctataatcaagccatggccgttcagaggttggggaattgatatgatcggtcagatcaatccaccttcaagcaaggggcataagtttatattggtggcaaccgactattttaccaagtgggtgaaagcaattcctttgaagaaagtcgattctggggatgcaatacagtttgtcaaggagtatattatctaccgatctgggattcctcagactataacaaccgatcaatga

SEQ ID NO: 100984 - DNA, 1618 bp, Oryza sativa
  Clone ID: PAT_MRT4530_98648C.1
ggctgcaggaattcggcacgagggtcacgtgcatgctctagtgaggcggcgagtgttcgacgacatggcgctcctctcggctcccgtgcgccgccgccgctcgcgcgtgcgtgtcctgctagtgtgctgctgcttgctactggcgctcgcggcgccgtcggcggcggcggcggcggcggggcatgactacggcgacgcgctggccaagtcgatcctgttcttcgaggggcagcggtcggggcggctgccggcggcggggcagcgcgcggcgtggcgaggggactcggcggtgtcggacggcggcgcggcgggcgtcgacctggagggcgggtactacgacgccggcgacaacgtcaagttcggcttcccgatggcgttcaccgccacgatgctggcgtggggcgtcgtcgagttcggcgacgccatgccgcccgcggagcgcgcccacgccgccgacgccgtccgctgggccaccgactacctcctcaagaccatctcccaccccggcgtcatcttcattcaggtgggcgacccaacgaaggaccacgggtgctgggagcggccggaggacatggacacagcgaggacggtgtacaacatcagcgcggcgaggccggggtcggacgtggccggggagacggcggcggcgctggccgcggcgtcgatggtgttccgcgacgacgacccggcgtacgccgcgcggctgctcgccggcgccaggagcgcgttcgagttcgcggacgaacacaagggcgcgtacagcgacgacccggagctcagggccggcggctgcccgttctactgcgacttcgatggatatcaggtcagggatgagctgctgtggggagcagcatggctacggagagcctccaaggaaggcacctacctcgactacattcagaacaacggcaagacccttggagcagaggatagcaccaacgaattcggctgggacaacaagcatgccggcatcaatgtccttgtctccaaggagttcatagatggcgaggtgctatctctgcaatcctacaaggagtttgcagatggattcatctgcacactgattccggagtcgtcgtctccgcacatcacgtacacgcccgggggcatgatctacaagcctggaggcagcaacatgcagcatgttacatccatttcgttcctgctcctgacttatgccaagtacctctccaattcctcgcgcactgtcaactgtggaaatgtttcggttggtcctgccactcttcagcagctagccagaaagcaggctgattatatattaggagataacccgatgaaaatgtcatacatggtcgggtacggcgatcggtatcctcaacggatacaccatcgaggatcatcgttgccttcgatcaagagccatccccagcgcattgcgtgcaacgacggcacgccttactacaattcatctagcccgaacccaaacccgttaattggcgcagttgttggggggcctggggaggatgatgtttatgaggatgaccgtgccgatttcaggaaatctgaaccaactacctacatcaatgctccattggtaggagttcttgcttaccttgttggcaatcctgatccaggccaaggccatgtcaggcattga

SEQ ID NO: 100985 - DNA, 2626 bp, Oryza sativa
  Clone ID: PAT_MRT4530_98649C.1
taattgatccgactctatcaagaacacaactgcgcttaccaaattttggcgttaacagcatcgtggagggttcaaatttctatttctacactaaggacacagtagatgatctcgatgacaagcaaggacagggtttcatgtcggccgatgatttggaagaagttgacattggtccagggatagaccaaggccgacatttatcagtaagaatttatatgcagaattcagagccaagttaatagagctattgaaagaatatagaaattgctttgcttgagaatattatgagatgccaggattcagccgatcgattgtcgaacatcggcttcctattaagctaggatataaaccacatcagcagcctctaaggagatgtaaggcccaaatgtatgatgctatcaaggctaagattactcgattatatgatgctggttttattcaaccgtgccgatatgtcgagtgagtttccaacttaaataaggctacccctaaggatgagtacccaatgccgattgccgatcaattgattgatgctacttcaggtcacaaaattataagttttatggatggcaatgctggttacaatcagatttttatggcaaaagaagacattcataagactgcttttagatgtcctggtgcaatcagcttatttgagtgggttgtgatgactttcggcttgaagagtgctggagctacatatcagaaggccatgaactacatattccatgatctgatcggcttgttggttgaggtctatattgatgatgtggttgttaaatcaaaacaggtagaggaccacatagccgatttgaggaaggtttttgagagaaccagaaaatatggcctaatgatgaatcccacgacgtgtgcttttggtgtatcagctggacagttcttgggttttcttattcatgagagagggattgaagtatctcaaaggagcataaatgaaatcaagaaaattcaacctccagaagataagacacaactacaatcattgatcggcaagattaattttgttcgaaggtttatatctaacctatctgggagattggaaccttttagacctttgttaaggttgaaagccgatcaagaattcacttggggggcagagcagcagaaggctttggacaatattaaggcatatttgagttcccctccagttttaattcctccacaaaagggagtgccttttaggttgtatctatcggccgatgagaagtcaatcaactcggttttgattcaggagctagaaggcaaggagagagctattttttatttaagtcgaaggctcttggatgcagaaacaaggtattctccgatggaaaaattatgcttgtgtttgtacttctcctgcacaaagttgaggcattatttgttatccaatgaatgcactgtggtatgcaaagctgatgtgatcaaatatatgctgtcggctctggtcctcaaagggagagttgggaagtggatatatgctttaacagaatttgacctcagatatgaatcacccaaggcaatcaaggggcaagctatagccgattttattgtggaacatcctgatgattcaatcggctcggttgagattgtgccctggactttattttttgatgggtcactttgcactcctggttgtggtatcgacttggttataatttctcctcggggggcaagttttgaatttgcttatactatcaaaccttatgcgaccaacaaccaggctgagtatgaagcagatctcaaggggttgcaattgctcaaggaggttgaagccgatgctgtggagatcatgggagattctttgttagtgatcaatcaattggcaagagaatatgaatgcaaaaatgatgttttgatgatctacaacgagaagtgccgagaactaatgaattattttcgtctggtgactttgaagcatgtctctcgggagcagaacgttgaagctaatgacttggctcatggagcgttaggatacaagccgatgatgaaggatattgaggtggaggtagctgcaatcacagccgatgattggaggtatgatgtttatcagtatttgcagaattcatctcagtcggcttcacgaaaattgcgctataaggctttgaaatataccttattggatgatgagctgtattatcagacgattgatgaggtattgcttaaatgtttgagtgccgatcaagctaaggttgtgatgggcgaagtacatgaaggtatttgcggtactcaccaatcagctcacaagatgaagtggttgcttcggcgtacaaggtatttttggcgtacaatgttagaggattgcttccgatattacaaagaatgtcaagattgtcaaaagtttggagcaattcagagagcactagcatcggctatgaatcctataatcaagccatggccgttcagaggttggggaattgatatgatcggtcagatcaatccaccttcaagcaaggggcataagtttatattggtggcaaccgactattttaccaagtgggtgaaagcaattcctttgaagaaagtcgattctggggatgcaatacagtttgtcaaggagtatattatctaccgatctgggattcctcagactataacaaccgatcaatgatcaatctttgtttctgat

SEQ ID NO: 100986 - DNA, 831 bp, Oryza sativa
  Clone ID: PAT_MRT4530_9864C.1
atggtcatgggagttggcagcctggcggtgggcggcgggacaggtggacagtgccaaagctatggggatggaggagggcgcacggtggcgaccgctcgagggcgggatcaggcggcgctgccggcggcggatggcggcgggcggctgagacggaggcagagctcgcccgcgcaggttgaggcggcggaggagcgcgagcgagccgagcacggacggcagtgcttccgcggcgccctggtccggtcgctgcccgggcggctgctcgacgccgacgaggaggacaagcagcgccctgtctctctgatgacaagtactggcggacaggttattcccggcgatggcgacgccgacgacgcgtggccccgacgacgacgacgacgtgtggacgcacgtcacgccggcccaccggcacgggtcgtcggcagcgcccccgacgggtcgtcggtcaccgccgtcttgaacgccagcgccaccaccgcctccacccgcgcgcctcgcgtcgtcgagagtggcggcctggtccgggcatggacgtccgaggagaggaagttggcgtcgccgtcctacccgctgcggccgcgtcaccggtcgatgaggaggaggtcggagagcgccttccgcctccgcctccaccaccggctgcccgggcgagctccgttctcccgactgccggccgcccgctccgtctccgtctcagcggccggccgccttccgccttccgccgctggcagcgacgcctgctcctgctctcgcgcggtcgccaccgtgctggccggccggtcgtcgtcgtcgtcgtcgatcccctcccgccaccgcacccgccggctgtga

SEQ ID NO: 100987 - DNA, 447 bp, Oryza sativa
  Clone ID: PAT_MRT4530_98650C.1
gcaggattatgcagccaagctacgtgattcttctacaaccggggcaatattttttgcagtttgtcggggcaaagtttgttcctgtccatctaatattctcatatctccttttactttctattttaacttctggtgaagttcaatgttaactttcttctttttgttaaagcttcgatactcttgagtttatattcttctatgactctggttggttgttggatctatataattcatttgctctgatgtttagtcctttcttttgtgttaaaacatgttcgacaacattcaatgagtctataaagagagtattgtaatgctaataatgatgttaataggtacagctacaatcttatgaatgatggaacacactactaaaagcaggactgaacatagaattctaataaacatagtagccattcaactatagtgctataattctgctaaaaa

SEQ ID NO: 100988 - DNA, 1079 bp, Oryza sativa
  Clone ID: PAT_MRT4530_98651C.1
gcacgagcggtagctgacagtgacggagttcagcagcttcagcaatggcagcagcagcagctggtggtggtggtggtggtggtgttagcggcaggttgctgagaggagcaaccgcgaaggcttttcatggagacggcagcagccatcatcgtatgatgccatcgtcgtcgtcttcggtggcggcaggcggcggcggcggcgtggctggtccgtgccgcatcccgtccctgaagttcccgtcgctgtgggagtcgaagaggcagggcggcggtgtcggcagccgcgcggcggagcggaaggcggcgttgatcgcgctgggagccgccggcgtgacggcgctggagagggagcgcggcggcggggtggtgttgttgccggaggaggcgaggaggggcgccgacctgctgctgccgctggcgtacgaggtcgcgaggaggctggtgctgaggcagctcgggggcgcgacgcggccgacgcagcagtgctggtccaagatcgccgaggccaccatccaccagggtgttgtcagatgccagtcgttcacgctcatcggtgtggccggatcactcgtcggatcagtgccatgctttctcgagggatgtggtgcagttgtgagatcattcttcgtacagtttcgtgccctgacacagacaattgatcaagcagagatcataaagctgctgatcgaggcaatagacatgttcctgatcggcacagctcttctcacgtttggcatgggaatgtacatcatgttctacggctcccggagcattcagaacccaggaatgcaaggcgataattctcacctgggatccttcaacctaaagaagctgaaagaaggggccaggatccagtcgatcacgcaggcgaagacgaggatcgggcacgccatactcctgctgctccaggcgggcgtcctcgagaagttcaagagcgtgccgctggtcaccgggattgacatggcttgcttcgccggcgccgtgctcgcctcctccgccggcgtcttcctcctgtcgaagctgtcgacgacggctgcacaggcacagcgacaaccacgcaagcgtacagctttcgcatga

SEQ ID NO: 100989 - DNA, 457 bp, Oryza sativa
  Clone ID: PAT_MRT4530_98652C.1
attcgccattcaggctgcgcaactgttgggaagggcgatcgaactaatcgttaacaaccgtcaggcaaggtgatccactatctcctttgctttttgtgcttggtgcagaattgcttcaggttattattaacaaggcctatactcttggcttgttgtcaaaacctatccctaatgagaatgatctagattttccaattgtgcaatatgctgataatactcttttgtatgtcaaagccagtggaaaggaattattcactttgaaagctttactgtaattttttgcacagaggacagttctcaaagtgaattatcataaatcatgcctcataccaattaatatagatgaggaaaaagcacaaatattggcaggagtttttgttgtcaagttggctcacttcctttcacatatcttggtttgcctctgcctgaaaggcatccgatgagttcagatttttgc

SEQ ID NO: 100990 - DNA, 714 bp, Oryza sativa
  unsure (1)..(714): unsure at all n locations
  Clone ID: PAT_MRT4530_98653C.1
aagcttgctgaacaactagttancctatctcagttctcatggatgatattaatgttggttatgaaaggctcgctgaactacaggtaaaaaaggtgaacggtgtggaagtagaaaatctgaagcatctgtgcagccttgtggaaagctgcactgaagaaaacctgagatttgatctggacgatgagcgggtgatcgtcctgaaatatcagaacgcaaagctcgccacgtcccggatcttaaaacggcacaggataccgtcggccatatctgctgacctcgtcgacgaacaggcgactgacgacggtgaggaggcgactaatggtgagatcgaggcatcatgcactagctaacattgttttgcatacttagctaggcaattactgcggaagaatagatagatattagcacggttcaatttccagagacagacgcagtgaggcgaggactgcccggagcactgcgctggttgcagcggctcctgttcggccgtctcagttttgacgtgaggggtgggtgctccggtttccctcagcaaataagaagtgaagaacccaagttcttcagcctcatgatatgttgtaacacaaattatcttccccatttcttcccaatatttctcattctttcaccaaaagtgccgtggcanagtcacctcatattgaantcagattatatatatcatcacgaaacagagcaaaaaaaaaaaaaaaaaaa

SEQ ID NO: 100991 - DNA, 939 bp, Oryza sativa
  Clone ID: PAT_MRT4530_98654C.1
atggcggttctggtatgccatctcgggttctcgaaggtgaagaaggcactcagcctggggtccgagcggcggccgtgcgaatccatcgccatcgtccacgacttcgccgaccgcatcgtccacatcgtcgtcgtccttgaaccccatcccccgcaatgccgcacgccacccatggcacgacgagctaggcttggtgctctcctcgccgccatctccctctcatccatggctgggtcggggcactcgagccacaatgggatgccgataatggtgtcgattctggtggtggtcatcatctgcaccctcttctactgcgtgtactgctggagatggaggaagcgcaacgccgtcaggagggcgcagatagagagcctgaggccactgtccaactcggacctgcctctcatggacctctcctccatgtacgacgccaccaaccaattctccaaggagaacaagctcggcgaaggcggcttcggccctgtctacaggggtgttctgggcggtggcgcggagatcgcggtgaagcggctgtcggcgaggtcgcggcagggcgcggcggagttcaggaacgaggtggagctgatcgccaagctgcagcacaggaacctggtcaggctgcttggctgctgcgtggagaaggaggagaagatgctcatctacgagtacctccctaacagaagcctcgatgccttcctcttcgattccagaaagagggctcaattggactggaagactcggcagagcatcatccttgggatcgcccgtggtttgctctacctccacgaggattcatgtctcaaggtcatccacagagacctcaaggcgagcaatgtgctcctcgacaacaagatgaaccctaagatctccgacttcggcatggccaagatcttcgaggaggagagcaacgagcacaaatcttacctcaacttgtattga

SEQ ID NO: 100992 - DNA, 460 bp, Oryza sativa
  unsure (1)..(460): unsure at all n locations
  Clone ID: PAT_MRT4530_98655C.1
ggccaattctgaaactcaaaacacacgggcatcaccttctgctccagcatctacgcggagcggcatcatcaacaacagatattgcagatgacctatctacaacattaggaggagctcccacaccatatcaagaaccatcaagaaattgaatgagagagcgaaaacagaacacttgctcagaccgaacggcatacaaggacccgtgaacaagcgacaaaagccctgactgaaaagaatgcacgggatatgcacgtccaaaggcagcacgctgaaagacatagaatatcacaaacaatggactctgagattaacccgataaaannntggaaaagaaagcaattggcgtgcatcgctatcaacttnnnaatatgtcctgtggccagaatgtggatggcaacctgtatcacctgactgactgattactgctgctgcggctacaacggtatatagaaaggcaaca

SEQ ID NO: 100993 - DNA, 150 bp, Oryza sativa
  Clone ID: PAT_MRT4530_98656C.1
ttggaatggtcggaattaccctccaaccgtcataggggcttcatctcagccgtccagccaaaacctggatccaacagccaaaccaggggcaggcccatccagccaacaacttcgctggtggcctactctactgctcctctccgcagactt

SEQ ID NO: 100994 - DNA, 565 bp, Oryza sativa
  Clone ID: PAT_MRT4530_98657C.1
gcacgaggctctcgtctcccttttgtttcttctcttcgcgagctcgccattaatacgagcttagctttgctctcgcgaggcctacctacctagtcgtagctagccaccacctactcctgctcttccaacgccgcccatggcgtcgtcctcgtcgtcgtcgtcgtcgggtggtggtgggtctctcgcgctcgccgccgccaccgccgtcgcggtgtccggctccatcgtcatcttctccctctgccgcgccgcgaggcccgcggcggcggcggaggcggaggcggaggcggaggcttccctccgcccctgcctctcctcctcctcctcctcctcctcagagaggcggaggcggaggagcgggaggcgggtgcggttcgcggcggacgtcgtcgacaatgagggcgccgcccgcccggcgcggcggctcgcggcggcggaggagcacacgtgcaggggcgacgcggcggcggccgcggcggcggagcggatgccggcgaaccgggaggcgttgtaccgcggcatgctccgcgaccgctcctcccacagggtcacctactcctgctga

SEQ ID NO: 100995 - DNA, 476 bp, Oryza sativa
  Clone ID: PAT_MRT4530_98658C.1
aaaacacaaagcaggaacatgcaattaaatggggaaatgcaacgatgccaatgttctcacatttctgataagttagcatcaatttgctgacatcagatataaacaaataacaacaaagcgaaccaaaatgtgctcagattgacagtattattttgcaaccaaagacaatgtagcctggatggtaccacttccatgccaagttgagatactgaaccgcctactcttttttcccaataccgtgggacatgttgtaaactccacggccaatcatgaacaagctgattgtgcaacggagataatgtgtttgttgggtgcaccatagctaaattcggaccattgccccatatgtgatgtggaacgggttgagttgctgagttactgccattgttggctactggttgtgacatcgcaagattgctttgattgaggtgagttgtttcccatccttgcacaaatctcattatgcagttctaata

SEQ ID NO: 100996 - DNA, 627 bp, Oryza sativa
  Clone ID: PAT_MRT4530_98659C.1
atggcgagcacattaccggtcagaggagcgatggcgggaggagcccaaggccatggcgacgacgacgacctggggacagtgttgtcgggggcaagtgggcaacaacctggggcgagggagagatcagatattcagattggccatggcgacgaactcctgggtgctccaggatgctccatcggcgagaaatcgacctggactgcagcgtgcagcaaatggcggctacggcggcgcggttttggccggatccagggaagacgacgtctccgacgagctcttaacttcctttttcacacagacctcagcactgaaacgaacaagactaggagagagatctccgcgggcggatccggcagcggcggcgatgcttttgagaggaggaggtcacccgcggcggtagctcgcggaaggaggttgcgccggcagcagcggcggcgccccacgcggaggtgcacggatccgacggcagcgctcgcgggaggaggtcgcgggcgatggcggcggcgcttgcgggcggactccgacggtaggtggggcgacgcttgccggcgaaactccggcatccggcaacgtcagctcagagcatccccagcagatacggtaaccaatcctccatcccggttttag

SEQ ID NO: 100997 - DNA, 4933 bp, Oryza sativa
  Clone ID: PAT_MRT4530_9865C.1
atgtcatccagcttcgtcgacaacagcgtcaacaccaacctcaaccaaggagttcctgcttcaacaatgctggtattgactcaagtcggcgaaatcgtcttaccggtttacaccatggtgctgatctcgactggtccatcaatgatcggaagcgagaacgcagtggctacaacccaggacgactccatgtcgaaggatcctcccgccgaagcggagaacggaacgtcgacgacatccgagcccgagaaggatcctagtgcggccaaatcttgtctttccgacaagaatcacgagccgacgaggatgacttccgagacaaagaatcacgacctctcaagctgcaaggtatttctcagtgccatgaagacgtcacctcctaaggtccaacagtcacgtatccccctcagggatgaggacaaggaacaaggagcaacgctgatctcagatcgattcgttgaggtaatcgacatcgatccccacgaaccgtcagtcctgcacctgctcgaagactatggctcatcgtcaacgagtacgccacgcgaggtattggctattgacgggaccagcacgtcagtgcgcgttaatgcggaagcggaaaatcaagtgactacaccggcccagcacatcagggccgtcaacgcaatactgagggaaaccccctacgatcccgttctgaacgacgatctcgcacggtggacagaacggctacgggaatcagtgaccaacctcagcaacgcgttcaaagaggccgctgctgtagcgcacccggaacagccaccaactggcggtgctaatggcgaaaaccctgaacagcgggaatcgcctcatcgagccaccccttcacctcgcggcaccggcgatctccgcgatcacttgaatggccgccgagaggcattccgacctagagcaatagagaagtacgatgggagtaccgacccagaagaattccttcaggtttactccacggtactctacgctgcccaagcggacaacaacgcgttggcaaattatttgccaactgcattgaaaggctctgcacgttcatggctgatgcatctcccaccctacttggtttcttcgtgggcaaacctgtggcagcagttcgtcgccaacttccagggaacttacaagcgccacacgatcgaagacgacctacatgcgttgacacagaactcgggtgaatccttgagggattatgttcgacgctttgatgagtgcagaaatacaatccccgaaatcaccgacgcttctgtaatccgcacgttcaagtccggtttcagagatcgctatactacccaggagttggcaacgagacgcaagaacgacaaaccgaagaccggaggagagaagaaaccagccaaggacgcacctgagtcaagcaagaagaaaaatcgcaagagtaggaaaaggaaagctcaagcggaagttctcgcaacagaatacgcggaccctcccaagcgcctagacccacaaggcagcgacacgaagaaaacatggtgccctatacacaagtcggacagacactctctagaagattgcctcgtcttcaaaaagtcgctcgcaaaacacatggcattggaaaaaggcaagcgaaagatagaattctcagaagaggaccgccccaagaccgctgtcatcccagagcgatatccgatcgtggtcgaaccaactattcggaatatcaagttcgcgcgagttctgatcgatggcgacagctcaatcaaccttctcttcgccagcaccttggacgcgatggggatcccacgaagcgagttgacacccaccggtcaacccttccatggaatcactcctcagtcatcgtccaaaccattgggcaaaattacgttgcgtgtgacattcagccaagcaaataacttccgaacggagcagatcacctttgatgtcgctgaattcgatacaacatacaatgccatcattgggagaactgcactcgcgaggttcatggccgcatctcactacgcgtatcaagtgctcaagatgccaggaccgaagggaataatcactattcaagggaatgttaagctggcaatacaatgcgacaagcggagcctcgacatggtcgagcacacgcccagcccacccgccacagctgagccacccaagaaaccgtccgacatgccgggggtacccagggaggtgattgagcacaaactcatggtgcgacccgacgccaagccagtaaagcaaaaactgcagagatttgcaccagatcgaaaacaagccatacgagaagagctcgacaagcttctcaaagttggtttcatcggagaggtactccatccagaatggctagccaacccagtcatggtgtggaaggccaacgggaaatggagaatgtgtgtcggtttcaccgacctcaacaaggcgtgtcccaaggatcacttccctcttcctcgaatagaccaactggtggactcaacagccggttgtaagttgttgagctttctcgacgcttactccggctaccaccaaatcagcatggcgaaagaggatgaggagaagacagcattcatcacgccgtttggggtattctgctacgttaagatgccgttcggactaataaccgcaggaaacactttccagcgcacggtccagggcgcacttagcgaccaactcggaaacaatgtcgaggcctacgtcgatgacattgttgtcaagaccaatacaagcgactcattgattgacgatctgcgggaaacaggaatagaagcaaatcccgagaagatcaaggcaatcgagaacatgaagtcacctacaagactcaaggaagtacataagctaaccggatgcatggcggcactaagcaggttcgtcgctaggatgggagagcgaggacaacctttcttcgctctactgaagaagcaagacaaatttgtatggacacaggaagccgaagaggcattcattgcactcaagcgctacctatcaaatccccctgtacttgttgctccccaacctaatgaagaattatttctctatattgccgccacgccatattccgttagcaccgtcattgttgtcgagagagagaaggtgcaacgaccagtctactacgtcagtgaagctctccacgatgcaaagacaagatatccacagatccaaaaactgctctacgcagtaatcatgacatcaagaaagctacgccactacttccaagcccacagggtcacagttgtatcctccttccctctcggtgaagtcgtgaaaaacaaagacgttgtcggctgcattgcaaaatgggtactcgagctaagccaatttgatgtgcactttgtgccacgaacagccatcaagtcccaggtactcgccgactttgtagccgattggactatgactgataacaggtcagacaacaaaatcgacagcgaaacgtggacaatggcattcgacggcgcgctcaacagccaaggagcaggggcaggattcatcttgacatcaccttcgggagaacaattcaagcatgcaattcacctcaacttcagggcgaccaataacatagccgagtacgaaagactactcgccgggataagagctgcagctgcactcggagtcaagcgactggtcgtgaaaggggattccgaattagtcgcgaaccaggtgcataaagattacaagtgctctagccccgagttatccaagtatctcgcagaagttaggaagctggaaaaaaggttcgatgggatcgaggtccgacatgtataccgcaaggacaacatcaaaccggatgatctagcacggcgtgcgtccagacgagagccactcaaacctggaacctttctggacatcctgacaaggccatcagtgaaagaggcaagcggcgaagatagcccggtcgccctcaacaacagctcgggggctacagaggcagagcgcgccgttgccgatatcgagactacagacgactggtgcaccccactcattaaattcatagaagccgagaaaataacccgtaaagcgccaaacggactactcctaaaatgtgtctcgtccgacgacggcatacatctcctcctcgacatacatgaagggatctgcgggtcacatgccgccggtcggacattagtcggaaaagcttttcaacaagggtttttctggccaactgccctcaaagacgcctgcgacatgctagacatacttgggccattcccacgaggacagggcggctacaggttcctattcgtggcgatcgacaaattcactaagtggattgaagcgacacccacaagggaaatcaaggccgacaatgccatcaaattcatcaaagggatattttgcagattcggattgcctcaccgtatcataacggacaacggctcccagtttatcagtgccgatttccaggattactgcatcaggctgggagtcaagatctgcttcgcctcggtttctcaccctcagagcaatggacaggtcgagagggcaaacgacatagtactacaaggaatcaaaacccacgtctacgataggctcatgtcacatgacaagaagtgggtcgaagaactcccatcagtactatgggccatgcgtaccacaccgacaacgtctaacaaggagacacccttcttcctcgtgtacggctcagaggccatgctccccaccgagctacgacatcaaagtaaacgagtacagaagtactccgatgaggatcaggaggagcagcgaaatgatgatgtgaatctactcgaggaacatcgcgaacgagttgctgttggagcagccagctaccaacaggcccttcgccgttatcacgagaagcgcatccgagcacgcacgctttcgatcggcgattacgtcctccgactggttcaaatccaagcagggcgaaacaagctctcacccaaatgggaaggaccgtacacgatcacacaagttttgcggccaggcgcattcaagattgcagacggcgatggtc

SEQ ID NO: 100998 - DNA, 270 bp, Oryza sativa
  Clone ID: PAT_MRT4530_98660C.1
atggggacaatgtggagtttgtcggtgatgacgagcaaggccatcggaggggagcaggaacagtggatgcaccatgcgtgggctctggcgccgccactcgtcctccctccagcaccttcgtctcctcttctcctcttccactttctagcggaggcaactgctttggatggcgtggctagagacgataacaatacctcagacctcaatggggcggctcacaaggacgagcttgaaggcaacatccttttctccaccgctatcctcctctag

SEQ ID NO: 100999 - DNA, 1572 bp, Oryza sativa
  Clone ID: PAT_MRT4530_98661C.1
atggcgacgggattcgtcgtcgtcgtcgccatgtgtcagctcgctggcgtccggatcacccaagtgtgcgggaaccagaatctgggcatggtggctgacacggagagctcggggtcactgggtggcagctcaaatgctgcttctgacaaggctgttgatgggtctcttgacaaaagatctcaggaaaaggctccaaagaaaactcataaagctgaacgagagaaacttaagcgtgaccagttgaatgacctttttgttgagctcagcaatcctgaacgacaaaatagtggaaaggctactgtgttaggtgatgctgcacgagttctgcgggatcttgtttctcaagtagaatctctcagaaaggaacagtccgctcttctaactgagcgtcaatacgttggttcagagaataatgagctgcaagaagagaatatcatgctcagagcccaaatattagaactgcataatgagatttgtgcaaggatgggaaacaaccacctcaatcaaagcaatcttgcgatgtcacaaccagtagccaacaatggcagtaactcagcaactcaacccgttccacatcacatatggggcaatggtccgaatttagctatggtgcacccaacaaacacattatctccgttgcacaatcaggggggagggctcgctcgtgctgcccggcgggtccgtcttccgcccggaggggtcaacccgcagatccacctgctccccccgccgccgccgccggcctcctccgacccgcgcgtctcagccgtcgaggatgacagaggcaccatttgtgccacgtgagaagctgtttaagcaacagcaatattttcagaatttaaccaagcacacctacctgaaggggcgttacgatgtgatcacatctgttgccattccccttgcgctggctggcaccagcttgttcatgattggccggtggagtttacaaccatgtcccacggtattggggaaaaaagagtaggcggttcagtatctcaacttggcatggaagtggtaccatccaggctacattgtctttggttgcaaaataatactgtcagtctgagcacagttttcgtttcgctcttgtccctattcgctggctggcaccaacttgttcatgattggccgtggagtttacaacatgtcccacggtattgggaaaaaagagtacgcggttcagtatctcaacttggcatggaagtggtaccatccaggctacattgtctttggttgcaaaataatactgtcaatctgagcacattttggttcgctttgttgttatttgtttatatctgatgtcagcaaattgatgctaacttatcagaaatgtgagaacattggcatcgttgcatttccccatttaattgcatgttcctgctttgtgttttcttgtaaaaaaagaggcgcccgtccagtcgctgcccccctctggggacccggagcctccggcctccacccccttcttcaggcctgacggattctttgccagggcagcttcgcctcagcctcccgcaatcttctcaagaagaaaacagcagcggcagcaagaaaggtcgaaaaaagggctag

SEQ ID NO: 101000 - DNA, 531 bp, Oryza sativa
  Clone ID: PAT_MRT4530_98662C.1
ccacccgcccggcaggtcaaccatctcttcgcagatccacctgctccgccgccgccgccgccgccggcctcctccgacccgcgcgtctcagccgtcgaggatgacagaggcaccatttgtgccacgtgagaagctgtttaagcaacagcaatattttcagaatttaaccaagcacacctacctgaaggggcgttacgatgtgatcacatctgttgccattccccttgcgctggctggcaccagcttgttcatgattggccgtggagtttacaacatgtcccacggtattgggaaaaaagagtaggcggttcagtatctcaacttggcatggaagtggtaccatccaggctacattgtctttggttgcaaaataatactgtcaatctgagcacattttggttcgctttgttgttatttgtttatatctgatgtcagcaaattgatgctaacttatcagaaatgtgagaacattggcatcgttgcatttccccatttaaaaaaaaaaaaaagcagcgaaatttctttgcggcc

SEQ ID NO: 101001 - DNA, 117 bp, Oryza sativa
  Clone ID: PAT_MRT4530_98663C.1
atgaagaaaagctcgcagataaggcaaggatggatgaagcctccagaggggaaagtgatggtcaatgttgatgcagcttttgatgaggacaggggtctttatgcattcaagacttaa

SEQ ID NO: 101002 - DNA, 142 bp, Oryza sativa
  Clone ID: PAT_MRT4530_98664C.1
cgccaaatgtaacggcgctgaatgtcgtgacaccgtggatggtgccagtgtgtcaaagctcagcaccatcggactcggctctgttgtggctaaggtcagctccaaggtatttggcgctgaacgggttaacttagtcgaccag

SEQ ID NO: 101003 - DNA, 444 bp, Oryza sativa
  Clone ID: PAT_MRT4530_98665C.1
attcggcacgaggcgacagcaacaatggcaaccgcagctggcgcggctgcgcttctgtactacacgctgaacctgccggcttcagtgtggagaagctgaatcaggaaggctggcaatgaaagagatgccgcgacgaggggggccctcagtaccaccagcaggagcagggtgtcaaggagggatgttcgtgcccctgccacatggctggagacaatttccactctgtcggagacactgcggttcacatactcggagacccttgggaagtggcccatcggtgacctcgcttttgggattagcttcctcctcaagaggcaggggaatgtacctgtagcaagcatatatgctggagatgatagtgtggagctcaatggagctccagtaattgctgacttaaagcatcttttaaatttgttgacactatgttggcatttctccaagaag

SEQ ID NO: 101004 - DNA, 375 bp, Oryza sativa
  Clone ID: PAT_MRT4530_98666C.1
atggcgaccaagtacatcaccctctccgaggtcgccctacatgccatcatcatcgcctgccctctcctagagaccttgctgctggaacacatatatggcttccattgtgtccgaatcagctccccaaggcttagagcatcgcgaaatagtggatattcggtggctaacgaaagtgcaaaccctggatgccccttgtcgcaaatgattgctatatcttgtccgtgcctaagccatttcagtggtgttgcatcaaagctggagatcatgggctggcttggcatctccatgctaaaacttggcatcatagagattcagctatattctgaagtatatgcaataatgaagatacgtatcgaggaccggagaagcgtataa

SEQ ID NO: 101005 - DNA, 162 bp, Oryza sativa
  Clone ID: PAT_MRT4530_98667C.1
atgtccgcggattcgcttcgtgccaggcatgcacccatccaccacaataactacgctgcaccgagcaatgagcgcatccctccatctgaccatctccgggcagcaggcagagacatgcagaagcatgaaaaggagcttaatctgggcctgtaccacactagc

SEQ ID NO: 101006 - DNA, 507 bp, Oryza sativa
  unsure (1)..(507): unsure at all n locations
  Clone ID: PAT_MRT4530_98668C.1
ccacgcgtccggcggtcatctgcccctctcctctattgttttctcgattcttcgcagggaaggggatacgcgcaagaaaccgcgagccattccgcgcaggtcgtcgccgcggtcaaatccggcggcggcggcggcggcggaggccggagggctaaacgggccgcccccgtccggtgagatccttgagggggtcctccgccccccttgtgcgccttggggggggggggggggcatttttttgcgcgggggggggngcccaattttcttttcccgccggggttgggggggccttcgaatttttggaaataaaaaagggaccccccccccccggggggaattgggcgccccccccccccttcccaaagggggttttgggggggcccggggggaaaaagggggtggggggggaaaaccccttttggggggggctctcacaccccgggggggcccccctttttttttccccccgggagggaaaattatttttccccccgggggggggggggg

SEQ ID NO: 101007 - DNA, 1796 bp, Oryza sativa
  unsure (1)..(1796): unsure at all n locations
  Clone ID: PAT_MRT4530_98669C.1
gcaaaacccatttcattgacacagcgcccacaaaacctgcaggtcctccgccgcctcctccggccggtagcgcacgccgccgaccacccgccgccgcggacgcgacgcctcctctccccgactcggccccggatcacatgcggccactaccccgatgtcatccttccagcttctcctccactccttgctcttgcttctcgtcgttggcggcgtcgcgggcggcggcggcggaggtggtcgcctgagggcgccttcgctggaattccaccaccggttctcttctccggtgcagcggtgggcggaggcgcgcgggcacgtgctccccggaggctggccggagcacggcagcgccgattacgttgcggccctgaacgggcacgaccgccgccgcgcgctctcagcagccggcggcgacggtggaggaggaggagacaagcccccgccgctcacgttttctgagggaaacgccaccctcaaggtcagcaacctcggattcttgcactatgcgcttgtgacggtcggcacgccgggccagacgttcatggtggcgctggacaccgggagtgacctcttctggctgccgtgccagtgtgatgggtgtacgccgccggcttcggccgcttctggatcgcaagtgggtacagaatacttaatcacaaggcctctctttaatcctgcaagggcttccttttacatccctagtatgtcgtcaacaagccaagcagttccttgcaacagccaattttgtgagctgagaaaggaatgctctacaacatcacagtgtccatacaagatggtttatgtttctgcagacacatcttcttctggttttctagtagaggatgtgctctacttgtcaacagaggatgccattcctcaaattctcaaggcgcaaatactatttggatgtggacaggttcagacaggatcatttctggatgctgctgctccaaacggtctatttggacttgggatagatatgatatcaattcctagcattctagcacaaaaaggtctgacatctaattccttcgcaatgtgctttagccgtgatggtattgggagaattagctttggagatcaaggcagctcagatcaagaggagacaccactagatgttaacccacaacactccagtgaagataggattcaaactcctagtataagtttgagaacagtgggtggaagtgtatttcccgttattgatgaagggcaggttatctccattcagcaacatgagtatgtttattgcttggcgattgtcaagagtgcaaaactcaatataattgggcaaaatttcatgactggtcttcgtgttgtgttcgatcgagaaaggaaaattcttggttggaagaaattcaattgttatgacactgatagttcaaatcctctttctatcaattcacggaattcttcaggtttctccccttcagcacctgagaattactcccccgaggaaacaaagggtgggaacccagcaagcgttacacagttgagaccccttagtaattccaacccagtaatgtggtatgatagtttagtcttcaggtttcttttggtcaatttggccgctctgatcctcttctaatttgtttcgggatgacctgaatgtaaattagttatcacgattactgtagatgcactagaagctgactagagaatacaacatagagaacagtactgtatacacgtcctgtaaataccgtcctttgtgtcgacaatattgtgtcaaaagcaattaatttgtgatgccgatttttgatggctcacnctgtacgaaaaaaaaaaaaaaaaaa

SEQ ID NO: 101008 - DNA, 756 bp, Oryza sativa
  Clone ID: PAT_MRT4530_9866C.1
atggcggcgaggggcggcgcggccgccacgacggcggctgccgaggtggcggccgcggcgccgccggcagcggcgccaccggcggcggcggcctcgccgccggcgcccggggcaggcgcggtgggctccgccgcggcggccgccgcgcccccggcttcggactccgaggcgagcacggcggtggcggacgcggcgaaggcgatggcgaggacggcgaaggcgacggcgatcttcttcatctccatagtatcacagccggcgggtgcggtggcgggaggggatcgacgacgacgacgacgaccggccggcctgctctggattattggggagcgaatcgagaggcgggtggccaatctcttctgcgcgtcgttgttggaggagaagagggagcaggcgtcgctgccagcggcggagggcggagggcggcgggcggctgagacggaggcggagcgggcggccggcagcgggaggcggagctcgcccgggcagccggtggtggaggcggaggcggaaggcgctctccgacctcctcctcatcgaccggtgacgcggccgcagcgggtaggacggcgacgccaacttcctctcctcggacgctttggaggcggtgcggcgtgggtcgacggcgacgcgccgccgcccacgacgacgcgaggcgcgcgggtggaggcggtggtggcgctggcgttcaagacggcggtgaccgacgacccgtcgggggcgctgccgacgacccgtgccggtgggccggcgtga

SEQ ID NO: 101009 - DNA, 867 bp, Oryza sativa
  Clone ID: PAT_MRT4530_98670C.1
atggacaatccgagggctgaacacaaagtggagcgatttctgagcatgttttataccagaaccaggtttcaggtgggagatggggggcaatcactgagctctggagatccaactgactcgaacagggttcattcgaacatgggatgcttccagatgaacatcaccaatcccatgggatgcttgatgcttccagctgatgaacatccggagatatccctgaacccagatgaagaagacactgcgcccgaggacaaccaacggtggaattgctctcccgacgacgacccgaggcaggccggcagcggatccgcgtgcccgaggtcagccggcggtggatctgcgcgcctgggtgagccggcggcggatcaaggcgtcgtcgtcgtcatcacagccggtggcaggacccaggcgtcgacgccgtcgtcgtcgttgcggcagtcatcatcatcgtggccgaggccagcttgcagtggatccgcgcgcctaggcgagccgacgacggcagatccaagtggcattgtcgtcgtcatcgcagccggcggcgggtggaggagcggcgcgagcatgcgagcaggcaaatgggcggcggaggagctagacggcgggtgggcggcggaggagctggatgatggcttggcgggcggaggagtggtgcgagcaggcgagcgggcggcggaggagcgcaacggcagcctggcgggcagaggagcggtgcgagcaggcgggcgggcaaaggaggagagcgaagaaggagtagcgcggcaagtcggccagcggatgaaggagcggcgcggtaggcaagcacgctgcgatgtatgccccgagaagacgggtggttcattttcacttgcatgcgagccaaggtag

SEQ ID NO: 101010 - DNA, 1023 bp, Oryza sativa
  Clone ID: PAT_MRT4530_98671C.1
gcacgagggtcattgcgatcgatccaatctcactaatttgatgcagccaccaacccaacccaggagccagtacccacccggcgtcgtagctgccggccaggactattgaccaggccagcagctgagtagtggagtattagactactcgtagtagttgttgcaaatctggtcagaggaggaggagagcatccaagcctagctaggatcgatcgacgatgtctgatgtggtggctatggcggggcaggcgtacatgcggcagctccaagcccacccgctgcgcaccaaggccatcacctccggcgttctcgccggctgcagcgacgccatcgcccagaagatctccggcgtccccaacctccagcgcaggaggctcctcctcatcatgctctatggatttgcttatgcgggaccgtttggccattttctccacaagctgatggacaggtttttcaagggaaagaaaggaaaagaaactacagccaagaaggtcttagtggagcaactaactgcgtcaccatggaacaatatgatgtttatgatgtactatggtctggtggttgaagggagaccttttagtcaagtgaagagcaagctcaagaaagactacgcatctgtccagttgacagcttggaagttctggccaattgttagttggataaactatgaatacatgccgctccagctccgagttcttttccacagctttgttgcatcgtgctgggcagtatttctgaacctgaaagcagcaaggtccattgccactagtaagaaggcgtaaaacaggtagcacggcatgctgttgctgccgacgttctactggtcaggactcactaagaagaagaaaccggactcaaacggctaagattagatgccgtcattttactctttcagtctgcttgttgaactaatttgtactacgtactaactttatccctgatataaaacgacgtatgttatttatttcttcgatcaacatatatagtgtactgaccctaaaaaaaaaaaaaaaaaaaaaaaaaaaa

SEQ ID NO: 101011 - DNA, 377 bp, Oryza sativa
  Clone ID: PAT_MRT4530_98672C.1
gccgttttatgtatttttatgccttcatattctgattgtctaatggctctaaaacaacagacgtaaactacgatgtctgaagttttccatgttttcttccttatgaaaatgatatggagctgtggcaagctgctttggcaatccctgttgctgtccagagtaaagattttcatgtggcttgcgctaaagggcagatgcctcatggctgacaatctacagaaaagaggtggcctcatcaggcgaattgttccctatgcaacctgacatttcaagatgacacccaacctttttggtcaatgggctttcacaaacaggatttggagattgctcaagagctaggtgaatgttggctttccgcttcccagtgacctcaatgt

SEQ ID NO: 101012 - DNA, 801 bp, Oryza sativa
  Clone ID: PAT_MRT4530_98673C.1
cccacgcgtccgctcgaccaggtgattaattactacgacgccgcatcaaaagctccagcaatggcggcatctcctccgggcgccatcgtgatcaacatggcatcgaacaccaacggcgagtccacggcggtgacgaccaataacttagctccgtcgacgcctaaggccgtcgatgagtccacgacgtcgtcgaaaacagatgtggccacgaagacggtgaccgacaaggtgatggcaagcacggcgaacctggcgcagctgctgccgacggggacggtgctggcttaccaggcgctgtcgccgtccttcaccaaccacggcgagtgcaacgccgccaacaagtggctcaccgccgtgctggtcggcgtcctggccggcctctccctcttcttctccttcacggacagcgtcgtcggccaagacggcaagctctactacggcgtggcgacacggcggggattgaacgtgttcaacatgtcccgggaagaggaggaagcgaagaaattgagtcacagtgagctaagactacggccgctggacttcgtgcactccttcttcacggcgatggtgttcctcaccgttgcattcagtgatgtcgggctgcccaagggcttcttccccgacgccggcaacgacaccaaggagctgctcaagaacctgcccctggggatggcgttcatgtcgacgttcgtcttcttgctcttcccaacgaaaaggaagggcatcggatacaccgacaccactccccgtccggcgccagaaacgaacaagcctacacaagtttcagatcacatgccatag

SEQ ID NO: 101013 - DNA, 1401 bp, Oryza sativa
  Clone ID: PAT_MRT4530_98674C.1
gcacgaggcctcgtgccgaattcggcacgagggaccgattccccaccccctcctctctcctccaccaccaaaccctagctcccaccgccgccgacgatgtcgtcctcctcctccccgccgcccaacccggacgcgctctcctccccggacctccccccgctggccgcccccgcggcggcggccgcggcagccgccgccgcggtgtcatctggtggcgcggggggctccgggcggaggctgcccccgccgtgctggacgcacgaggagacgctggcgctcatcgaggcctaccgcgataggtgggaggggctccgcaaggggaacctcagagcctccgactgggacgacgtcgccggcgccgtcaccgcccgctgcgggaggttccccacggcgacgcacaagtccggcgtccagtgccgccacaagatcgagaagctccggaagcggtaccgcgccgagagggcgcgcgccgccggccgctccaagggccccaagtggcccttcttcccgctcctccacgacctcgccggcggcggggcgcccgaccctagccccaaccccatcatcaagatcaaatccaagggccccgccgccgcggccgcctccccctcaccggcgtccccttctcccgtctcctccccttcctccgaggaggatgaggaggaggaggcggcggcggacgcggggcggagcaggagccttcacggcctcatctccaacggcgggagcgggagcggcctgcgcttcaccatccccaaggcctcccgctccaagcctgtggcgcagcgagaacaacccaccgccatcaaggtggagaagagcgaggaggacgccgaggcggaggccatggccgaggtggcctcggcgctgcgcgccgtcggcgacaagttcctccgcatggaggagcggaggctggagatctctctccagatagagaaggagcggatggagtctgagatgaagcgcacccagacgctgctcgacgcccagcagctgttcgtcgaggccttcctcggcaagcagcagcaccaccaccaccaccacaagaaggccaaggtgatctccgccgccgctgccgcagcaacagccgccatggatgaggattgatctactccatgttgttggtatggcctactatgtgtttagtaatgtttacttctcattgttaactgctggtgttgacttgtgataattctactagctgttgtttgtgtttgggagggtgattaaagtagtcaggtgtaggatatggagtgggggagtgaggaggaggattaggagtgagtgctcagttaagctgcctgtaatcagttcagtgatcttgtgcttgagttgctgctgctgaagctgccttgtccaaatacttctgtagtagcatattattgtcaggtttttactctc

SEQ ID NO: 101014 - DNA, 275 bp, Oryza sativa
  Clone ID: PAT_MRT4530_98675C.1
aatgtgatcgacctgcaggagaaggaccacgagtttgcctagaggggggactacaagccacagccgcgccagcaagaaagtgaccttggcgagttccagaagagtaggtacgtgacgttcgccgacccggacatgtcttattgtatcagtgtacgaccatgctctacttattgttttattttttcgaatcagtttttgctttttaaaatggtaaactttctattggaggtgtttatatgttcagaatttttttaggtgtggtttcatgaggcaga

SEQ ID NO: 101015 - DNA, 1416 bp, Oryza sativa
  Clone ID: PAT_MRT4530_98676C.1
aaggttctatggcttagcagaaatgatatggtttttgacaaatcaccgtctaaatcttatatgcagatattttttagcgcaacataaccaaaggtcggcggctactccgccaaaagccggccatgggtgtccaagctggtcgccggattcctcaagaagcagctgcgcaacaggggcaacaagcagcagcagcagcagctcggcggcgaggcggcgtccggcgccgcgccgccgctcgtcatcaacatcaccgtcgggacacccgtcgcgcagaccgtctccggcctcgtcgacatcacgagctatttcgtgtgggcgcagtgcgcgccggcgaccgcgttccggcccaacggctccgccacgttctcgccgctcccctgctccagcgacatgtgcctccccgtcctaagggagacgtgcggcgccggcgctcgctgcgacagctacagcttgacgtacggcgggtcggcggcgaacacgtcgggctacctcgccaccgacacgttcacgttcggcgcgacggccgtgcccggcgtggtgttcggctgcagcgacgccagctacggcgacttcgccggcgcgtcgggcgtcatcggcatcgggagaggcaacctgtccctgatctcgcagctccagttcggcaagttctcgtaccagctgctggcgccggaagccaccgacgacggcagcgccgacagcgtcatccggttcggcgacgacgccgtgccgaagacgaagcgcggccggtcgacgccgctgctgtcgagcaccctgtacccggacttctactacgtcaacctcaccggcgtacgcgtcgacggcaacaggctggacgccattccggcggggacgttcgacctgagggccaacggcaccggcggggtgatcctcagcagcacgacgccggtgacgtacctcgagcaggcggcgtacgacgtcgtgagggcggcggtggcgagcaggatcggcctgccggccgtcaacggctcggcggcgctggagctcgacctgtgctacaacgcgtcgtccatggcgaaggtgaaggtgccgaagctgacgctggtgttcgacggcggcgccgacatggatctgtcggcggcgaactacttctacatcgacaacgacaccgggctggagtgcctcaccatgctgccatcgcagggcggctcggtgctgggaacgctgctgcagacgggcaccaacatgatctacgacgtcgacgccgggcggctgacgttcgagactgcaccggcggcggcggccccgagtatctcagcttccagtcgacagaaaatcgatcatgcatggcgccgcgtggggccatgttcaccacggtctccgtgcgatattttgatttgcgcgcccatgttttctcgctgatgtcgcttctctctatttcttttatttctttttcta

SEQ ID NO: 101016 - DNA, 408 bp, Oryza sativa
  Clone ID: PAT_MRT4530_98677C.1
ttatcatacatccagcaagaattcattatcaaacttctacaccactgcctgactcacctgtgggggtttctaaaccttctccttcaatcactccttattctatcggatctttcccatggatataacaaagagctgccaccccatctggtgcttcaagactagatactgttgtagatgtggtggattatcgattaatctttaaggaaatcaaactctcttagttgaaactagattaggaaaagatgtttgcctcccatttgtgaagttcacacatataaaattataaatgctttaaagctgttgtactcatccacccgcacttttatatcctaatccaaatttttatttttttccttttcttctatttacttgacatttacattttaattttcttttttatccaacctt

SEQ ID NO: 101017 - DNA, 484 bp, Oryza sativa
  Clone ID: PAT_MRT4530_98678C.1
tctttccaacactagttggataaagccacagagagagctgttgtagtagcgagctcgccggagaacggtcgatctccggagaagtgggtgagagttcctcctcctttttttccgttagttgtcaccgttttatttctctttctttggtttcttcattcaccttttttttgttttccctgatggcctattccttattactgtttttttcctctgacccttatgttcttttcctctttttttttttttttgttttgtcctccttttttgttttccttttttcttctttcttttccttttctttcttttcttcttttttctttttcctatcttttctctcttttttttttttttctatttttttctttcctcttattttttttttcttctcttctttctcttttcttcttttttcttttctttttcttctatttcttttccttttttctttttctatttttttattattttttcttttttttctttt

SEQ ID NO: 101018 - DNA, 277 bp, Oryza sativa
  unsure (1)..(277): unsure at all n locations
  Clone ID: PAT_MRT4530_98679C.1
ggtgaacgggtgagtggagttgagggcatgagtggcttctggtgctgtgggagttttatgctggtagaaagacaagtgtgcacatgtgtggttgcatgcatttggtgtgagtggatggtttaggtggatgaaagtcctgtgtcgccggatggtgtgttgttggagatttggtacaaattgtccccctttctngtacagatttatgtcgtatttttactgtaaataatatgtcagattaaaatgtttatagtttgttctactaaaaaaaaaaaaaaaa

SEQ ID NO: 101019 - DNA, 625 bp, Oryza sativa
  Clone ID: PAT_MRT4530_9867C.1
ggggtctcaaaataatggattgaaatgcatagatatccatgttcagttaatcgatttgatgactgtagtacatggaacaagcgaagataccaatttaagaaacagctacaattgagatgaaattgaacattactaactatgcctacatgcttgggcaaccaaaaagtcgtgataacccctctgacgattagcaaataagccagctgactaggagaccctgagactgcataaaaaagtatatcagtgatgacagttgtacatgtataatagcactaacaaaaacatagtgaccctgagaccctgagcaactgggcttcacatcaaagcactttcatgtgttgtacaaaaacatagtgatgacagttgtacataatagcactagcaaaaacatagtatgaatgatctatgcgagttggaaacaaggtaatcagaatttaatcaaaaaattcttcaagatagaatttaatcaaaaaattcttcaagattgtatatgcttgttacaaattaatatataggtacaatgactggccggtgagaattttttttttttgacacatgaagaagcagtaagcacccaagtgcccaggcattacaaccaaatccaaataaatgattaagcatagca

SEQ ID NO: 101020 - DNA, 402 bp, Oryza sativa
  Clone ID: PAT_MRT4530_98680C.1
atgaccttggcggcggcggccaccgtcgcgttcgagcgggatggccagcgaggagggggccgcggctctcttattccacctgtagcaccgcttacaagagcaagcaagggcgccgctgtcggtgacgacgaccttagccgcatcaaggccgtggacgtcaccgtgccaggcggcgtcgcgctcaccgacggatcccttcctagcggctgcgaggaccgcggctacggaggcggcggaggaggtgaccgtgcgtgctacaagtgcggcaaggaggcccacatggccaaggactgctcccagggcagcgacaacggcgcgggaggatcgtccgtcatgcttcgcgggccggccgcttcgccccgcctcggtcgtcacctgctccggccgccctacggcgtctag

SEQ ID NO: 101021 - DNA, 507 bp, Oryza sativa
  Clone ID: PAT_MRT4530_98681C.1
ctttcataaggggtaaaataatgcctgatttttaggaaaaatcgggcacccgatttgtagtcatttcatcacaacagtttctttcttgtccaacaaggactagtatctacccatgggtataaatatgtacatatgtggtaattttaatttatctcatagatcaatacagctactcttggcgtatagccaccctctttcccgaggtttttatttatcatccggcgaaaccttagcacttgacgcggggttgcatcggctttcgatcttcggcgaagggggtaagtcctacgttccgccagtcctggcaattgtatcggctataatggtgttgttcaaggctgcatcgcttcgacctcttggatcgctctggttcggttgatatttttgcctacctatttatcatatatcttagttaatctagttttagtatatcgatttagtcatatcagctgattctcgcttaagggtttatgccggtatcggctaaatcgatttactagattggat

SEQ ID NO: 101022 - DNA, 2394 bp, Oryza sativa
  Clone ID: PAT_MRT4530_98683C.1
atggctgcgctgctgtatctaaccatcctctcatcactctccttccacctctgctcttgtgcttccccatggcgaaccatgacgaccggctcacacatcagagctgaggaccatgacaagatcttcctcctctcacctgataccaccttctcttgcggcttccatcagcttggcacaaatgctttcaccttctcgatctggtacacccacaccaccgagaaaactgccgtgtggacggcgaatccctactctccggcgaatgggggatactccccagtgaacctttacggctccagggtgtcgctgggccatgatggcaacctagtcctcacagataccaacggcacgacggtgtgggaaagcaagacatcttcaggcaagcatactacagttacccttcttgacaccggcaatcttgtaatcaaggattccagcaatagtactgtgtggcagagcttcgactcaccgaccgataccttgctgccatggcagaacctgaccaaaaacataaggttagtctctcgttatcatcacctctactttgataacgataatgtcctgcgcctattatatgacggcccagagattacaagcatctactggccaagtccagattataatgccgaaaaaaatgggcgtactagatttaacagcaccaggatagcatttcttgatgatgagggtaattttgtgtcaagtgatggattcaagatagaggctacagattcaggtcctaggatcaagagaaggattacaattgattatgatggcaattttagaatgtacagcttgaacgagtcaacgggcaactggactatcacagggcaggccgtgatacagatgtgttatgttcatgggctatgcggcaagaatgggatatgtgactactcgggaggtctaagatgtagatgtcctccagaatatgtgatggttgatccaacagattggaacaaaggatgtgaaccaacgtttacaatcgatagcaaaagaccacatgaggactttatgttcgtcaaacagcctcatgcagacttctatggcttcgatctgggatcaaataaatccatctcatttgaagcatgtcagaatatttgcttgaacagcagctcctgcttatcattcacatacaagggtggggatggtttatgttacactaaaggcttactctacaatggtcaggtgtacccatatttccccggagacaactacatgaaagtacctaagaattcaagcaaatcaacaccctcaatctccaaacaacaaagactcacttgcaacctcagtgctcctgagatcatgctaggctcagcaagtatgtatggaacaaagaaggacaatataaagtgggcatacttctatgtttttgctgcaatattgggaggtctagagtcgcttgtaatagtgacaggctggtacctttttttcaagaagcataacatacccaagtccatggaggatggatacaagatgataacaaaccagttcaggcgatttacataccgagaattgaaggaagcgactggaaaattcaaagaagagcttgggaggggtggggctggaattgtttatagaggagtacttgaagataagaaaatagtggcagtaaagaagcttacagacgttcggcaaggagaggaggaattctgggcagaagtgactctaattgggaggatcaatcacataaatttggtaaggatgtgggggttttgctcagaagggacaaacagactattggtatatgagtatgtggagaacgagtcattggacaagtacctctttggtgagagatgccacgaaagcctgctaagttggagccaaaggtacaggattgccctgggcacagccaggggtcttgcttatcttcatcacgaatgccttgagtgggtcgtgcattgtgatgtgaaaccagaaaacatacttctaagtagagatttcgatgccaagatagcagactttggactagccaaacttgcaaagcgagacagcactagtttcaatttcacccatatgaggggcacaatgggctacatggcaccagaatgggcgttgaatttgccgatcaatgcaaaggttgatgtctacagctatggagtagtgctccttgagattgtgacaggaatcagggtttcaagcggcatagtggtagatgaaaggcaagtggagtttccagagtttgtccaggaggccaaaaagattcaggctacagggaatgtcaccgatttagtggatgacagactgcatggacactttgatccagagcaagtaattacaatggtgaaggtagctctttcatgcctggaagaaagaagcaagaggccaacaatggatgaaattctgaaggctctcatgttatgtgatgacgaagacgactaccatcctgcctattcatattag

SEQ ID NO: 101023 - DNA, 1782 bp, Oryza sativa
  Clone ID: PAT_MRT4530_98684C.1
gcagctctaacaaaacattacgcttaacatacacaaatgctccggacaagcacatgcaaaaactccagaaccaaaaaggaaatgaaataggggcaaaatttacccgtgcaatttttatattaaaaaatctactcaatcataagttgatcctttcagttcaccccaggaaataaaaaggataaataaaatttcaactttgtttgttttaacagtttgcatcaatagaatatcgacaacaactcaaagtatcaggcaccaacccaacacaattaagcatagtgcagatataaattttttaaggttctatgaaaatctatcagtaacataaactgtacttcatccatgaatgcagagcacatacttatgcatgcgcaactaagtttacagggtatacatgtatatataattctctaaaactcagtagcaaatcataccaaagcaggagaaaattttctccaaaatatattgaacagtagaatgaacttagcacgtaaacctaaagcagcaaaacaacaaacgatgaaatagtgtgtggattactgcacgaggtcaaaagaagcagatgccatcaatcgttcataacatgccaggataaaaaaaataggtattgtatgaactaacctggggggaagagtgcgcgtgtcgcggggtgtcccccgcggagccccgtggggggcgcctcacacattctctggttggttcccccaggggtggccaattttctctctctcgtggccccgtgtggtgtgtgtttggtactcggcccttcccccgggagactgcaatatggtggaatccttgcaatcgatgttagtatccagctgcacatttccctcttcaaaataatgagcacctacctgtattttccctttaatttcgacaagctgtaatccctctttgtttcccagagtccaaattgagcgccaattgccgttgcaaaagttttgtgggctgcgtttagcagcagaaataactgctgcaaaacgaaaatcaactcctggtccctctatatcttttccgctggtacaataaacagcacacaccccttttggataagcttcaccaacatatttggataattcaacatccagggcactcctgaaatcttcaatgtatgctgaaggaagctcctcatcagcagctgccctcaattttgtacatttctgtttaatatggtccactgtagcaacttgagcagtcctaggatccagataattgttcttgtcaagctccccataagttgtgataattatatcaccgctgcggtcagggccctcgagggccacgaggtgcgccttgttgtgctccgggaaggcctccgccgcggcggcctcgtacaccgcctcgtcccccagcagcgctcgcacatctttggcgacgtagtggatctcgccggcgggggcgttggagaggaaccagacggcgatctccctcttctcctcaccgtccgacatttgggcggccgtggaggctgtggtgggtggggggcggcgatgtcgggtgcgcggagagggcaggaggggagaagcgagggggcagtgcgtgccgctcttcggccgcactggcgagctggcagtgctcctacgacctagaggcagtgcgggcgagccggccgccggcgaggcaccggccgcggtggggacgagcggtgggcggtgctccgacgtccgtatatgcacatgtaatctagttaccaacttcaattaccataaaacatattaaccatgttttagcgctagctaagtaaagcaaacctgtattttcccttttatttcgaaagct

SEQ ID NO: 101024 - DNA, 225 bp, Oryza sativa
  Clone ID: PAT_MRT4530_98685C.1
atggcgagaggttgggggaaggataaggaaggggagggagggttttatagacttcgcgtgtggccaccacactttggaggccagcctgtggcctcttctttcttcccttggatttttactatggttgtggtgcctgctattgtacctgctctgaaccgggagctgtggctggagcagtgcatccgggaggtggtggaacgttctggaatcaacgggacggggtag

SEQ ID NO: 101025 - DNA, 3066 bp, Oryza sativa
  Clone ID: PAT_MRT4530_98686C.1
atggcttccacggccgccattgctgcgctcgcgttggtgttcttcgtgttgctgtgtgtgagagatggtggcggcgtcgacgcggcggacacgctgtcgcaggggcagtcgctgggcgcgaacgacatgctggtgtcggcgaacggcacgttcaaggtggggttcttcacgccggcgggtggcgacccggggaaggtgtacctcggggtgatgtacgcgacgtcgaacgtgcagacggtgatgtgggtggcgaaccgcgatgcccccgtgagaacggcggcgggggccgcctccgccaccgtgacgggctccggcgagctgctggtgaaggagggcgaccgcgtcgcgtggcggacgaacgcgtcggccgcggggcgctccaaacacacgctgacgatccgcgacgacgggaacctcgtgatctccggcagcgacgccgccggcacggacgtagagtgggagagcttccaccacccgacggacaccttcgtcccgggcatggagatcgcgctccggcagaccaacggcgaccgcacgctgtacacgtcgtggaggagcgacgccgacccggccaccggcgacttcacgctggggctggacgcgtcggcgcagctctacatctggcggagccagggcggcaagaactcaacctactggaggtcggggcagtgggcgagcggcaacttcgtcggcatcccgtggcgggcgctctacgtctacggcttcaagttgaacggcgacccgccgccgatcgccggcgacatgtccatcgcgttcacccccttcaactcgtcgctctaccgcttcgtgctccggccgaacggcgtcgagacgtgctacatgctcctcggctccggcgactgggagctcgtctggtcgcagccgaccatcccctgccaccgctacaacttgtgcggcgacaacgccgagtgcaccgccgacgacaacgagcccatctgcacctgcttcacaggttttgagccaaaatctccgcaagagtacaacaacggcaactggacgcagggctgcgtgaggagcgttccactgacgtgcagcagcgagaggaacaacacgaccgccggtggcgccggcgccggtggcggcgacgggttcaccgtcatccggggcgtgaagctgccggacttcgccgtgtggggatcgctggtgggcgacgcgaactcgtgcgagaaggcgtgcctgggcaactgctcgtgcggggcgtacagctacagcaccggcagctgcctcacctgggggcaggagctggtggacatcttccagttccaaaccggcaccgagggagcgaaatacgacctctacgtcaaggtcccatcttctctattagataaaagctcggggcgatggaaaaccgttgtcgtcgtcgtagttgtggtcgtggtggttgtattgctggcatcaggccttctcatgtggaagtgcaggagacgaattaaagagaaacttggcattggtaggaaaaaggcacaactcccgttgctgcgtcctgcgagggatgcaaagcaggatttctcagggccagcgcaatctgaacacgagaaatcagaggagggcaagaactgcgagctgccgctgttcgcgttcgagaccttagcgacggccaccgacaacttcagcatctcgaacaagctcggagagggaggcttcggccatgtctacaagggaaggctccctggaggagaagagatcgcggtgaagaggctgtcccggagctccgggcaggggctggaggagttcaagaacgaggtgatcctgatcgcgaagctgcagcaccgcaatcttgtcaggttgctgggatgctgcatccagggcgaggagaagatcctggtgtacgaatacatgcccaacaagagcctcgacgccttcctcttcgatccggagagaagagggctcctggactggaggacgaggttccagatcatcgaaggcgtggcgcgagggctcctgtacctccaccggtgcgcgaggctccgcgtggtgcaccgcgacctcaaggccagcaacatcctcctcgaccgcgacatgaaccccaagatctccgacttcggcatggccaggatcttcggcggcgaccagaaccaggtcaacaccaaccgcgtcgtcggcacactgggctacatgtcaccggagtacgcgatggaggggctcttctcggtgaggtcggacgtgtacagcttcggcatcctcatcctggagatcatcacgggccagaagaacagcagcttccaccacatggagggctccctcaacatcgtcggctacgcgtggcagctgtggaacggggacagagggcaggagctgatcgacccggcgatccgggggacgtgccccgcgaaggaggcgctgcggtgcgtgcacatggcgctgctgtgcgtgcaggaccacgcgcacgaccgcccggacatcccctacgtggtgctcacgctcggcagcgactcctccgtgctgcccacgccgcgcccgccgacgttcacgctgcagtgcacgtcgtcgtcgtcggggcgggacatgtactacagggacaaggaggagtcctactccgccaacgacctcaccgtcaccatgctccaaggcaggtaggagtgcgtatacccctaagtacgtcttaaaatatagcaatttagaactagattggatatattctagtccaataaatctagataaccatttttttcagatttattaaattaagatatattttttaaattattatattttggaacggaaggagcagtaggaggttgggtgtacaaaactgtacatagacacgaagaaacacgcgctcttctctcgatcgggtggacgatcgagctagggagatgtactgtgtgttccacatgtgttgggtgatttgatagctctgggtgtagagattggtttgcttttgctttgtacatggccccaattttgttactgccggttccggtttttttttttttttacactcagttccagttcattgattggttgaagtttgtgtaatccatcatcactgtacaaacaaaactatttaaccaggacgcgccgattaattgggccgcgtgggcc

SEQ ID NO: 101026 - DNA, 361 bp, Oryza sativa
  Clone ID: PAT_MRT4530_98687C.1
gctggagcagtagcacaagcagctgagcttgaaggagcatagcgaggtagacatggccgccgccaccatggccctctcgtacccggcgctggccggcaaggccgccgcgaaggtgttcggcgaggggcgcatcaccatgcgcaagtcggcggcgaagcccaagcccgccgcgtcggggagcccgtgttacagacccgaccacgtactctacctctgtcggctctccagcgagccgtctagctacctgaccggtgagtgcctgcgatagttccgattgcacaccggggtaatttgactcattcaagtgccctttcagtactgcttgcttggggcatataagggggggaaattggagaggttg

SEQ ID NO: 101027 - DNA, 381 bp, Oryza sativa
  Clone ID: PAT_MRT4530_98688C.1
aggatgacccactgagccagatggcataacataccaaggctactaaactacataattatgccatgagaacgccatcacatctacagatggatggaagcgctacttaacagtcaacagagaacaagagggaatgcgtttgcccttaacagaaaataccaacatgcaagaaccattacttctacccacagttcccacaatgcccacgacatcacatgtcaggcccagacggacgggatgacttatttgtaggatggcaggaatggcgacgaaaaaatgggtgtcaaaaccaggccaatgggcttccgaatcagaagcgggaagagaggtccctcaggatcccagggagctaaggaatgtacaccgaaatgccaagaaatacaa

SEQ ID NO: 101028 - DNA, 177 bp, Oryza sativa
  Clone ID: PAT_MRT4530_98689C.1
ctaaccctagcagctacacgtcggaggtgcgcggcggcggaaacaacagacaggaccgccgcgagcagtagccgtcgtggtcacagctgctgcactaggccgcatcactggcctacgatgtgtgcatacaggaacaatgtcatgaaccagactttggtgagccacacgctgtatcat

SEQ ID NO: 101029 - DNA, 731 bp, Oryza sativa
  Clone ID: PAT_MRT4530_9868C.1
atggattggggaaggggagcggtggacggggtgcggcacgacgcagcgaagctattggtggcggcggcgcagcgcgaggtggaccggagaggcggcgcggcgtggctggaggtggcgatggcaaaggtggctcgggttggcggtggaatgggagtttcggtgaggaattggggaaacgaggtggaggccgcgactggtagggcagcggtggtggctggctggagagcgctggcgtgcggcggcaatggggaacggcatggggagagcgagggagtgcgcggcaagcacggggaaaatggggaaaaggacgagggaggtgcgggatgcatttttatagcgcggggaggcgatgaggaggccggggagtggcggatttggggtggcaatggccagcgacgtgggcgacatcgtgggcgaagtgggggctcgatttggcgccaaaaattgaggaaaagtgggggatttggtggaggaggtggaggggaaccgattttatgcggtttgggcacgagggcgtgagcgggaggacccggaattggtggcgacgtgggcggcaacggccgtccatggcggcttttgctccggggaccgaagcgcaatcgcccacgtggcctggcaccttcggggacgtcgggcccgagggtgaggtgtccgccctcctcctgatttcccccgagggggggtcgggttgcgtttgccccggccccgagggccgaagcaccccgacccct

SEQ ID NO: 101030 - DNA, 1341 bp, Oryza sativa
  Clone ID: PAT_MRT4530_98690C.1
atgaagttggccaagacaaacacctttggagtttggggttcgaattcaaactccaaaatcgcgcctccgatgatccgatccggcctccccacgcatagatcgcaactaacctcactagctagccgcggcgcggcgcctatacaagataaacaaacgcgtcaaattgcacggcgccggcgagcgagcgggtcggagaccgcaccgccgccacaccgatcgatcggcaagattggcatgcccggcggccacaacaagcagccggcgccgcccgtggcgaccaccggctgctccgccctcgcgtcctgcctctccttccaccgccgcgcgccgcggccgccgcctgcgcgcgccaacgtcgtcgatggcgcgacggcggcgaccactagagcatccgcggagcagtaccggcggagggtgcagttcctggaggaggagatcaggaggctcggcagtaggctcgccgagcacggcaggagcgccaatggcggcgccatggccaccagagatcgggtgagcagcgcctgcagcggcatcggcgccacggcggccaacaagcgcgtcaccgtcggtggccacggcggcgtgcgggaaatggtgaggctggaaggcggtggctacctgcacgagatcaaacgggtggtgggcatgccctgggagcggctggcgctgcaggtgtcgcagcccgtcgtcgccgagaacgccgccaccgcgtcggaggttcttgacaagatgacagagacgagcgcagagaacctgtgcaagttactgtcaaagatgatgccgatcaaggacatcgccggccggaagaatcccggcaaagtcatccgccgctcggcgaggctcagctccggcgacgacttcttggaggctctcctcttcatggaaatggacaagatggaaggactggtccaacaaggcctaaagattcgcatggcctcgacggctgactctgcctcgtccacggctgccggcgacgacgacggcgaccggaggcaccaggcgacgaaggattccatggtctctgtggtcctgattcaggtgagggatcccgagcaagggtacgccgccattggtgaccccatgatcggggtcatggaggcatccctggagaagaaggatggcagggtgaagctggagatgcaggggatgcacgtcgcagggatcctcttcggtgcaagcagcaagggaaggagtaatggcagagccatgatgtggagtgcttgcttgggacagtgcaaggggtctcacaatggccgccgcggcggcggtggcggcgccggcgccggtgatgtctgccggtgcggctttgttcggaacacaaatcgtgttttccgacggtag

SEQ ID NO: 101031 - DNA, 219 bp, Oryza sativa
  Clone ID: PAT_MRT4530_98691C.1
atggcggagctcgagggtggtggatccggtggcatcgctatcgggatgtgcggatctgccatccccgaccctcggtccttgttgacagctgctacggcaacgacgacccgccttggggagctaggagaaaaccacagagtgcagagaagacaacggatctccgagattaccgacgagatccttgtcaagaggggcttgatgagatctttcggcgaatag

SEQ ID NO: 101032 - DNA, 279 bp, Oryza sativa
  Clone ID: PAT_MRT4530_98692C.1
atcttgtcgaccatcgttatccaccaccaccaccaccacgccgctcgctgccttcgtccccagccaccgccgctgcctccctctatccccacccgaactgctcactgcttccatccacgccccatagctccggaagggcgcaaggaagacagtgaggtagatgaggtcggcgacgctgctgtccgattcctcctgctttctcagatctagcggcgccgagctcggggacgcctgatccggcagcccgcccgcgccgctgccgcctcggcaggtaagcat

SEQ ID NO: 101033 - DNA, 131 bp, Oryza sativa
  Clone ID: PAT_MRT4530_98693C.1
attcttatctcattctaaacaaataatgtcaccacactttttttatatactatcgtttaagggcatacaaacactatgtctcaacactagccagtctttcttctttcaagaacctaaaccgttcctctatt

SEQ ID NO: 101034 - DNA, 2227 bp, Oryza sativa
  Clone ID: PAT_MRT4530_98694C.1
ctcaccgcttcgaggagagaaaacatttcttgcttgacgagctgagctgagctgagcagaggagctcccaccttctctccctctgttgcaagggatctttcggagattttgttagttcatggcggagatttgctgcgaggttgtggctggatcgtcgtcggaggggaagggcccggagtgcgacaccgggagccgagcggcgaggcggcggcggatggagatccggcggctcagggtggtcgcggagcgtggggcggaggaggagacctccgggaagaggcggaggcttgatggcggcgggggagaggcctcgacggacgaggaggacagggaggtggagcgcgctaggtacggctttacgtcggtgtgcggacgccggagggacatggaggactccgtctccgcctgcccggggttcctccccggccaccacttcttcggggtgttcgacggccacggctgctctcatgtggcgacgtcgtgcgggcagcggatgcacgagatcgtggtcgacgaggccggcgccgccgctgggtcggcggggttggacgaggaggcgcggtggaggggcgtcatggagaggagcttcgcgcggatggacgcggaggccgtggcctcgtcacgggggagcgtcgccccggcccccacctgccggtgcgagatgcagctgcccaagtgcgaccacgtcggctcaacggccgtcgtcgccgttctgggccctcgccacgtcgtcgtcgccaactgcggcgactcgcgcgccgtcctctgccgcggtggcgccgccatacccctctcatgcgaccataagccggaccggcccgacgagctcgaacggatccacgcggcgggagggcgcgtcatcttctgggacggcgcccgcgtctttggcatgctcgccatgtcacgagccatcggggacagctatttgaagccgtacgtgatatgcgacccggaggtgagggtgatggagaggaaggacggcgaggacgagttcctcatcctggccagcgacggcctgtgggacgtggtgagcaacgaggttgcctgcaacgtcgtgcgcgcctgcctgcggagcagcgggcggcgcgagaggaaccggtcgagcccgacgtccaacctaagcccgaggcagagcagcagcagcggcgacgaggcgcccaacgacggtgctccttccgccgccgctggctcggagagcgacgaggagagcgccgccgaggaggacaaggcgtgcgccgaggcggccgtcctgctgaccaagctggctttggcgcggcaaacctcggacaatgtcagcgtcgtcgtcgcggcggcaagcgctcgagggtccaagcggccgcagtggcgagcaggaagggaggcggcgatccgactggagcgtcgtgagcacgcgggggaagttgctggactcaaggaatgcggcgaccgtggccaccatagtgggcctcgtcgtcgcgtcggggacggcggcggcagcgagcctttggaggacgaattggtcttgctcttctccttcctcgagtccttcgtggctccctctttcgtctacgtcgctgatgccgccgagccgccgccgggagattcaaacaccacctatatcttgcacacgctgctccgcagcgacatggcgagcactatcgagtgggcgatcgtgcacaagagggacggccaccgcgccatcggcaacccgttcctgaacgacgatccggcggcggcggccaccgcgtacaagaggctcgccacctgcgactccggaacctactcccggcccgccacaaccgtggatgcgccgtttctcggcggggcagtagtcacggtacactcgccgcgttggctgccggcagcagtggcagccggcaacggcacactgtcccctcgccatcaccgcccgtccgctcggtcgtgacatgtggattcatcagacatactactcctctcggtttcctggccatctctaactccaattcacctggacgaagccgtgatcaaacagaacgttccgaattatgtgatcaaacagaatgcggcatactcaaagcatataattgcagattattatagcattatttcgatcacttcctttctttgggcgtttgcgatctcgtcagacagatcagaccgctccttatttgagaaatacaagctcatgtgcttgccgatgctttgaagagaaacttcctcaagcgtcagatatatcgtagtatgattagactgtgccctttgctcg

SEQ ID NO: 101035 - DNA, 487 bp, Oryza sativa
  Clone ID: PAT_MRT4530_98695C.1
tttttgttttttttttttttttttttttttttttttaaaaaaaaccagccccaattggtttttcaccccaccttttcctggttcttttttggctggaaacacatcattgacaaacttaatatcacacaggtgcttggcctagagaggggggaagagagagagagaggggaggcaaaaagggtaaggggaaaaaaaaccgggttgcaaaagtccccacatttcctttaagtagatccccccaaaccttttgcaggcagaaccagttggtgtttgcagcataagcagcaatttcaccacaggatttttacacagggggaaaactggttaagccaatgggctctgcttttttggcgggatctcaccctaattaaatttccttgtttaaaccccttttttaacctttggccctgggggttttttgctcctggggaagcctctcccatgaaccttaggccaggaacattttgcctgtccttccacccggggg

SEQ ID NO: 101036 - DNA, 231 bp, Oryza sativa
  Clone ID: PAT_MRT4530_98696C.1
cttgtgtccaaagggatcatgcccgtacgcaacatatccaatgttgctccgaaaggaaattaataaacagggcatctatcgcaacgttgacaagagaaaaatctcaggcgacaacggtgggcaggcgatgtccgacagcgacggcgggagggcaagggcagagtggacgcgaccagtggcgcgcagaggagcgtcagcgctggccagcggcgtgccccgacagcaggagag

SEQ ID NO: 101037 - DNA, 138 bp, Oryza sativa
  Clone ID: PAT_MRT4530_98697C.1
atggaagtgaagacgatagcacccatcggcggtgacggaggcaagccgacgcccaacaacggtggtatgaccaaccaccgtgaaggcgaggacaccagtcggcggcaaacgaagacaagccagtcggtgaagacgtag

SEQ ID NO: 101038 - DNA, 213 bp, Oryza sativa
  Clone ID: PAT_MRT4530_98698C.1
atggcgagtttctgtgtgcccctacatagcatctcgcccccacacagagcaacaagtgctttcgccgtcacgagtccacgcgcagcctgcaaagcagtcgcgcttgcactgtggggtcgtgtctccgtctcgtcatcacctcaccccaatgcaaaaagggcccaccacctcatcaacctcgatgacgagcgtctccgcccaccatcactatag

SEQ ID NO: 101039 - DNA, 292 bp, Oryza sativa
  Clone ID: PAT_MRT4530_98699C.1
gtgttttgacacgaaacaaaattaagctagataagcactgattccacgcacaacttataccctgactcattaccctcgctccactcacaacagggcactcactgacatcgacttacaacactacggacgtacttgacttcggtgtgacctagtcttacactgacatttgacttacgccgactgactctggatccacggaccgaccgactgatgtcttgcacgggccgacggaccgaccgcccgaccgacccactgactgatggaccgacacgggcggccgacagggccacga

SEQ ID NO: 101040 - DNA, 1681 bp, Oryza sativa
  Clone ID: PAT_MRT4530_9869C.1
ccgttcggcctgccggggacggcggtgtcgaacggcctcgccgtggtgcgcgccgggaacagctcgagcacgctgttcaacgtcgcgccggggctcgacgggaagcccggctccgtctcgctcgagctcgggagcaagccggggtgcttcttggtcgccggcgccggcgcgaaggtgcatgtcggctgcaggacacgcggcggcgccgccgccgccgcagccgccgacaccgctccgtccgccctccgtcaacgctccaccaccccgtcggcctccactgcctccgcctcgacgacgccgctggtgagccctgctggcctccaccgctgtagagcgccgccgcaacccccaccgcggcccgaagacctggatccgccgcctcgatctgccagcgcgccgccacctgctggatggagtcgcctcgggcctcctcgccgccgctgccaaggtccgccgcagctgagctccaccccctcccggcgctggatccgccgcgtgcacccgaccaccgcttcgagccgctgctaccgccgccgccaccgccgcctggcgcgacacccaatcctccgccacagtccccaatccaccacgataccaccagtctgcttcgggaccgctgttgcctccgccttcgccaccggccccacctgtcagttcccctcccctctctacccctcactactctatcccaatctctcctctctctcctccgcccccgacgggtcgtcggtcaccgccgtcttgaacgccagcgccaccaccgcctccacccgcgcgcctcgcgtcgtcgtgggcggcggcgcgtcgccgtcgacccacgccgcaccgcctccaaagcctccgtcctacccgctgcggccgcgtcaccggtcgatgaggaggaggtcggagagcgccttccgcctccgcctccaccaccggctgcccgggcgagctccgcctcccgctgccggccgcccgctccgcctccgtctcagccgcccgccgccctccgccctccgccgctggcagcgacgcctgctcctgctctcgcgcggtcgccaccccctcctccccttataaactcccctcctcttcaccctcttctcctccaacaacgacgcgcagaagagattggccacccgcctctcgattcgctccccaataatccagagctaccactaataatccccctccgttccagcgcgcgcggcggcgggagctcgtcggagaagaagaagaagaccaaaccaggccggccggtcgtcgtcgtcgtcgtcgatcccctcccgccaccgcacccgccggctgtgatactatggagatgaagaagatcgccgtcgccttcgccgtcctcgccatcgccttcgccgcgtccgccaccgccgtgctcgcctcggagtccgaagccgggggcgcggcggccgccgcggcggagcccaccgcgcctgccccgggcgccggcggcgaggccgccgccgccggtggcgccgctgccggcggcgccgcggccgccacctcggcagccgccgtcgtggcggccgcgccgcccctcgccgccatcgtcgcctgctccttcctcgcctactcgcccggcccctactccatctcctttccacttgctgcaggactgccagagagcatcaagccaccgccgaggcgccgccccccttcttctgctctgctgtgcttttctctcccc

SEQ ID NO: 101041 - DNA, 414 bp, Oryza sativa
  Clone ID: PAT_MRT4530_986C.1
cccacgcgtccgcccacgcgtccggtggttaggtggtagaaaaggacaatgttgtcgatagaaaaagctagcacgccgggggccagggggtgtttggtagccatgcactactactagtctactactgctcgcgagtagtacgcattcgatcgatcgatcgatcgatcgagactgcatgtgaaaggggacctggcaacggcacaaatcttgttcacgtaccactacgccaagtagtcgcggataccaaactctaacaaggacggggtaccagccggccaacgagcgaacaggccttgtcaaaaaaaaaaaaaatgttgttcggtttcactctctggagatcgatcgatcgtgtgaggggtgaggctgctgcttctacgcgagcgagacagcgggcattcgggtcggtctcctttt

SEQ ID NO: 101042 - DNA, 156 bp, Oryza sativa
  unsure (1)..(156): unsure at all n locations
  Clone ID: PAT_MRT4530_98700C.1
accttgcgatgtgccccntgcgttggcgtgtggggatgcgcatgatgtgcaccactggtggtgctgncacaacaccttgganaagacctggatgctatggtggcctatatgcgancccgatgatggcccatgatgtgtgtgctggtgtgtgtggtg

SEQ ID NO: 101043 - DNA, 196 bp, Oryza sativa
  Clone ID: PAT_MRT4530_98701C.1
gtcccatcatcttttctaatctttataaaatgaaatcataaactcgtcttcgagattaaaaggaactggctttctgtcactaagtgtttacgcaggacatggtctaaatgtaattacgagtcaataataccatgaagttcaactggttaactgtgatactgcagctcatgggttgacagcgcgttactgattgaag

SEQ ID NO: 101044 - DNA, 807 bp, Oryza sativa
  unsure (1)..(807): unsure at all n locations
  Clone ID: PAT_MRT4530_98702C.1
gnnnnnnnngnaattgtaatacgactcactatagggcggtatgggtactggtcttccggccgcaaattttttttttttttttttttttatatcaataggtgagattcattatatcactgaataacgactacatcacagaatgtcacaggacggaaggctagaattacaatcagaagttcatttatccgaatgtgcatctgataaccctcacacatacatacacacacctcaaagttttaagagatgcccaatctagcaccgcagcagagtctgggcatctctacaaggtcttatggatagtatgtatatagcaaaattaaaggatagtaattttgcaacccatggaactcgttttcatcaagattgtgtaggactggatgtcacacagcaaaaccatttcttcgagtttgttttgggggcatatgattccaccctctcagtcctagtctctttgcagggtgaatcagtatcttgcccattcccaccctttttctcatctctggctttgttgaatatcactgtgaatccatcagcagaagctgggtcgttgacatcccattcaccaaacttgggcaagggtcgacctgcttcctccgacatggattgcggcgagcccgatccggcgagcacgaattccggggaaggtctcctcttcctcctcctcccagcgagtgggcggcgcgcgcggagggggaagagacggggatgagaggagcacgcagcagcagcggcagcggcggagaggagaggagagggaggaagaggagggggaaggggagaggaatcgaagtcccggccggcggccgg

SEQ ID NO: 101045 - DNA, 2629 bp, Oryza sativa
  Clone ID: PAT_MRT4530_98703C.1
atggactccgccgtgcgaccgcccgtcgacgccgaagaagcccgccgccgccggagcaccgactgcatctacttcctcgcctccccgttgacctgcaagaagggaagtgaatgtgagtaccgtcatagtgatgctgccaggatgaatcctagggattgctggtattggttcaatggcaactgcgctaatcctaaatgctcattcaggcacccgccgttggatggcctggtcggagcacccacaacaccacgaacatctcaacaatctgcaccacaggtttctgtgcctgctcaagctcctgtgcctaatcctgccagtggcacagccaagcaaggagttccatgttattactttcaaaagggcatgtgcgtaaaaggggataggtgcgccttcttgcatttgccacaggctactggaagtcctgcccctcagcacacaacaaaggtttttgctcctgcttctgtgcctcatcctcagttgaagaactcgtggacaaaaccaaactcttctgctcagcagaatgcacctcctgccatatttgacaagcctaaggacagtgctcataatggcaaaactgctcagaagcaaaatttgacaaacagggctggtcactcgtcaggaattattcatgataaaaaaggttcttatatgccatcgggtgtaacaaagaattaccgacctccaccctcaactggagacgatttagctgaaaatggtgtggagatgggtgaatttgtgagggaaccttctcctggttctgatgttcttactggtggtgctgatgacaatactgaacagtcactcagggaagaccgtggtgcttaccgtcgtactaacggggagcagcacattgggatgcttaggcaaactcatgatagttatggatttgaaaggtcacacagaggttcagctgagaaattgttgtcagagagtaggttttctcagagagaacctatgcctttgactgcagacagttcagatttgcggcaaaggctattgaagcaaagaaggctcaataatcccagatcagggcaggtctctgatagacataatgtctatcctgaggatgaacgccatgaccgtcatcgtcagcgtggtgaagagcaagcttccaatgacggcgtctcaagctctcgattgcgtggtagaataagacttccagcggaaacaacgtttgacagacttggcttacagcctgagaaagagagagacagagggcctcgagctagattgtcaccaccaagtcaaacagaccttagagggaagcttcatgataggctaaaggctaaaccaaatgaggatgtatctggtaatgtacaaagttctttgtcaaaagcaaatgaagatgctgaatcgttgaactttgctgggccaaagagccttgcagagctgaaagcaaaaaaggttgcaggcagtttaatgaagagtagtcgttctttaacagggccagttcgaatgacatccgaaatagttaccatcaaagactcttcggaccctgttctgtttgatggcccaaaaccattaaatgccatcctgaagagaaaaagagaggcagattctggaaatgctaccgattttggcagcaaacgggaagaacattctgggggagatgaagaaggatctcagaatgatttccgaaacatcgaggatgacatagttggaatgaacaccgaggggaatggagaagaagccttccaacctgaagacgatgtggtgtatggcgacagcctgtctcctgcggatgacattgctgctgaagctgcagacgatgcgagcagggagctggaggagcagcaagatgtagagacagcagaagagtacgactacgagatggatgacgttaatgcggcggaggaaaatgactaccaggagtatgaagacgaagacgatgatttggaggacgacgacgatttcgcgcgcaaagtgggtgtgatgatcacttgaagctgcgttgcagtaggcgtgccactatatatggtatgaccgaagaattgaaagatgtgttagtatccctcccaacaagatgttggtctgtttttcttgtggcgctagatacttttacttcactgcgccagagaattcagctaataaagttgggaggaagataaaattgactcatcggagagcttgtgtttcagccaagaggcggctgcttgtactctaatgtgtgggtgtgctctcctctgcctgcttgtgttgttgtatcattagttaaatcaaaatgacctaacaggttacacaatgtactacttctatttatattcatcagtgtataagatgataaaaggccttgaagccttttctttctggtagagaatacattgctcttacctccaaaaaaaacatttcatttttcttgcttttgcactttgtctcgcgccgagcacctgcggcccgggtcgctttgctggctcgaacacagcagacagttcattcgcgtatatttatgcacaagaaaactgtcaccctacaaatcgatgcctcagatagcaaacagacaagtcatggcgtctatttttccgtcttcaaaagtagagtaggagatgagctcaaaaaggcggacgagaagaaatttatcatctaaacatattatcttcgaatactcctacaaagtattcctcgtgccgaa

SEQ ID NO: 101046 - DNA, 453 bp, Oryza sativa
  Clone ID: PAT_MRT4530_98704C.1
ggaacttggaaaattttccctgaagcctaatttataatcttatctcctggaaattttccatttcccaccccactttttttttaaatggaaaaggggggtaaaaagccaatgggaaagggttttttggttccaaaacccaggggttgccattttcctcctttcctaatgggccttgcaccaatacccacgacttccaccttaattattacccaattaaccggtatccccttgccttggaacggggggccatggcccccatccaataaattttctgtttaaagcttaaaaccattttggcccccataactaatcatcaatttgccggctgttcagttgcacctaaaacctaagccaagattcatcccggatctctgtgaacattagatcattctttggggctggataatagccctcccccaactgcatgtcccggaagtttgaaataaaaaggaa

SEQ ID NO: 101047 - DNA, 557 bp, Oryza sativa
  Clone ID: PAT_MRT4530_98705C.1
gatggcctacaaaaaccggctctcacaccattaggtaatgttatgtttccattaattttactgggatattgcattacttgggataatcacatgcatttccatggcaatttaaggtctagcaagaaaatagtttactaaacggaccaagatagaatttcaagtcttacgagtaaaagttgggatgatctggtttaatgctataatttgtatgtaccaaataattccgtagacatcctgaatacctaagtactttaaacattttcgtatgaagagttgttaggtctgctagcagcagtacgctattacttcaagttattcactgcatgaattcctgtttatgggaatcttgagatttacaatacatttgaatgcttacattatatgtagctaaataaacccaactaatggagggtcagttcatttatttatcatgcaagattgttagtttaactatgtcagatttgcatagggttcagggtttagggacctcattaataacctctaccaccatctgaacctaaagattttgcatgctctggttgcagcttcaaccattc

SEQ ID NO: 101048 - DNA, 451 bp, Oryza sativa
  unsure (1)..(451): unsure at all n locations
  Clone ID: PAT_MRT4530_98706C.1
gcccgaggaaccaactgtccgtcctgccgccgcgcgtcttggtggctcagctaaggcttgcgccggccggcgagcgaacggagatggacatggtggcggcgacgcggacgggcacgtgctcgtgttcccgtgcccggtgcacggccacatcacctgcatgctccacttcgccacgggcctcctcgccgctggcctccacgtcaccttcctccacagcgaccacaacctccgccgcgccggccgcggagataacgcgcagctngccgccgctgcgtcgtcgccgcggctccggcacgtgtccatcccggacgggctccccgtcgaacacccgcgcgacgtgggccgaatcgtggagctcatggagtcgctgcagaccaaggccagcgtcgcgtaccgctcccgcccgcttcgctgctgctgggtgacgntaccggcgggtttccttcggtga

SEQ ID NO: 101049 - DNA, 452 bp, Oryza sativa
  Clone ID: PAT_MRT4530_98707C.1
actagggaaaataaacgaaactcaaccttcacctttgagtacatgtttgatgcagtaacaaattaatatagttttacaacaaaaccattagacccaataggtcaaattctgatgcaatagacttgctgaacagaactaagatttgttgtttgcataagtaaataaaatgtctgtagagaaccatgtttgtatttctacaagtgtcttggagcatagcaatatgatgaagtttattttgaaacattatcaatattttcaggatggtgtagcggccttgaaaaatatattgcggtgtaccttatggagcttcagggactaatctgcgcagctggtttttttgctttctgaatagtttcaccttccttgtatctcttgactcttcctgctgagtaattcacaacatacatacagatgatgaaatgcttcagttatactggcaatcccacttcttg

SEQ ID NO: 101050 - DNA, 662 bp, Oryza sativa
  Clone ID: PAT_MRT4530_98708C.1
atcgacatcagcgttgccgacgacccctccgcccgctcggccgccgcctatgccaccctcccttccacctgcccgcccgggcaccgcctcccttccaccgaggagtgtgcggttgaatttttttttcaatctttggtcctgcaggtcgacagtcaatgcgtatttgtactcttcgacgtttttgtttttcctcgccgctcgctctttctccttaaacgtaaattcttcatctggtttgcattttagcagcgttgctggacggctgatcttctccagaagcgtgatattgatagcactcagcctgccccttttgcacacagaatcttgagatggcgaaccacaccctcttcaactgtgtattcgctcgacagatctagcaccacatgttgtcgccctctggctaggttgccctccccccgtgacagctcgcttcaggtctagtggctgtcttctagggtctgcttatctaagcatcttcgcgccaacttcgactccccggtccttctcgtctcttggtagctatggaaggagtggaactctagggtattcgactctgcgctctcctcggtctcagtagttctggagtctatcctctcggagggtcgtatactcgtatgtggtcttctgctggtgttgctgcttttgggggcttattaggagtg

SEQ ID NO: 101051 - DNA, 391 bp, Oryza sativa
  Clone ID: PAT_MRT4530_98709C.1
ttttcctccttttcttttttttttttttctttttttggtgactttttaataaaatttacgggtttttcccaatatttttttcttggtgggaccaacccacacaaacacatattgagggttgcaaaaaacaaacatgccatctgcaagattggaagggaaaaggaacacaggggaagaccaaccacaatactctcccaagggctgtcctaacaaccaaaaaaaggcccaaagaaagctgctatcatgcgggaccaaccaactaaatggaaaacgcaaacgcaccatatcttaaaaccttgccacacccgcacgaacaaaaagctaggctgcgagtaaaactcacactgtgttctaaagcatacaccaaccaggtttaacctgaaaatggaac

SEQ ID NO: 101052 - DNA, 1015 bp, Oryza sativa
  Clone ID: PAT_MRT4530_9870C.1
ggaaaagagggattattgcgtcagcggctagggtttcggtggaccgggcgcatgggcggcggttcacgcgaacggacggccgagatcgatccaatccaaaacggacggccgagatcgaacggtccacgaccggctcacggcggacgaccccgatgacgtcggcaatgacgtcaccgacagcggcggcggctcggcggagcggacggctcgggcggcgcacgctcgccggcgaacggcggcgcgaggacgcaaacggagggcaccagcacgtagaggacgacgcggcgaacacaccggtgaccaaaacggcggcggaaaaacaacgaacgacgacggcgacgaggaggaaacggcggaaaccttcgggttgtcgacggcgacgaagctccgacgatctccggcgacggcgaaggggcggacgaggacggcgacgacttggcgaccacgacaacggtcttcccgagcgacggcgacgtctggaacggcggcggagcacggctggagcggcggcggcgacggcgaagctagggcacacggcgctagagcgattccgacgacgagaggcgaaggcgaaggtggcgacgggtagaggaaacaccgggggtccttttaaaggggctcggaggcggcggcgaaggcccacggcgaccggcgacgaggaaggaaagatcgggaagaacgaatccgagacgaactcgaatccaactctttccaaagcgatttagccaaagattccaaaggagaaaaggtagaggagatcccggagattgtttcccctctattgattcggccggagaaggaaaggaacggccggatttggaagggaaacagcggcggcgcgaaactagggtttcgggcggcggcggccgaaggtagacgacgactgacaggtgggccccacctgtcagcgacagcgagggcgcgcgcggctgcggcggactgggccggctgggccgaggagagagagaagagaggttttgggccgactttcggcccaaagccaaaagaagacttt

SEQ ID NO: 101053 - DNA, 598 bp, Oryza sativa
  Clone ID: PAT_MRT4530_98710C.1
ggggggggggtttttttttttttttttttttttttttttttttttttttttttttttttttttttttttttttttttttattcaaaaaaacattgaagttcatcatttattcaccacatatttttgtttccaagcaaaaggaaaccctaattttttggggcccccacaagacacacaggggggcttttttttaggggccagccggggggttcataggataactcagccgggggcaaacaccaccaatgccaaggggaatgtctacattgcaaaacgccgggggggtcgcccccacccgtttaatggcccctttccgggagccagggaacacctcgtccatggggggccctttagggggggcaccgagctccttgtacattccaaccaacatgggggtcaggggggggcacctacaaaagctgtcttcaatgggggggagctgccggcaaaaattttgccggacttgcttgtccaaggaaccgccggggcactggcgctttaccagggcccggtaggggggcagtgggtacattgggtagccccgtccggcagggaatagttggccggggggtttaaccacctggccacgggggtcccc

SEQ ID NO: 101054 - DNA, 216 bp, Oryza sativa
  Clone ID: PAT_MRT4530_98711C.1
atgcccacctccttcggttaccacgagcccatggcgccctcctctcctctcctcatgtcgcggcgctcggtggacagtgtgtccggtgagcttcagccagcaacgcggattgaagtggagaggacggtggggaagaagaagaagagaaaggggtcgacgtggacaagctcaaactctctcctcgccgacggtgtcaagctcgaagtgaggccatag

SEQ ID NO: 101055 - DNA, 939 bp, Oryza sativa
  Clone ID: PAT_MRT4530_98712C.1
gctagcttcatctccactagtctcatgcctccttctccctctcctcgttgaacaccgcactatgaaatcacccagctgaaagccaagaccgcgcgcgccggccggccgggcagggatcacctagctaggatacgcgccatgatgtcgtcggcgccggagacgttctcgctggaccacctctcgcagcatcagcagcagcagccgccgccgctcgccgagcaggagcagctctgctacgtgcactgcaacttctgcgacaccatcctcgcggtgggcgtgccgtgtagcagcctgttcaagacggtcaccgtgcggtgcggccactgcgccaacctgctctccgtcaacctccgcggcctcctgctcccggccgccgcctccaccgccaaccagctccccttcggccaggctctcctctcccccacctcaccgcacggcctccttgatgaggtgccgtcattccaagcgccggcgagcctaatgaccgaacaggcgagtcccaacgtgagcagcatcacgagcagcaacagcagctgtgctaacaacgcgccggcgacgtcgatggcgtcggcggccaacaaggctacccagcgagagccgcagcagccgaagaacgcgccgtcagccaacaggacttcagagaagcggcagagggttccctcggcatacaaccgattcatcaaagatgagatacaacgcatcaaggcaagcaatccggacatcacccacagggaggctttcagcgctgctgccaagaactgggcccatttcccacacatccattttggcctgatgccggaccagggcctgaagaagaccggcatacaaagccaggacggagctggggaatgcatgctcttcaaggacggtctctacgctgcagccgccgccgctgcagcagccacagcagcatctagcatgggtgtcactccattctaa

SEQ ID NO: 101056 - DNA, 470 bp, Oryza sativa
  unsure (1)..(470): unsure at all n locations
  Clone ID: PAT_MRT4530_98713C.1
cttgcacttataacactaagtggactnccngganctgtttcngaacccaccccccaanttcccttcaggaacccnatgcatcnccaacggacacaanggaatctctggtttcctancanaatcttctttaacaantcactgcagactctcaatctnaangaagccatgcnttnncaatgcanganaaatatctggtctaccnggcatnntgaatgttgctgataaaaacgcctcncctttggcagttgaaaggcatcanactggatctatggganattcactacgtgctgttcgtaatggcgcccnaactgctnccccgatataccaagttttttaggatgcgggngggccnganaaaanaanccntccnttttaagatnaaatggtgcnaaatcnnatgaacgttgccngtncnccnggtctgctaaannnttttttcntgcgagctngntcctctgcatctgntgcga

SEQ ID NO: 101057 - DNA, 1576 bp, Oryza sativa
  unsure (1)..(1576): unsure at all n locations
  Clone ID: PAT_MRT4530_98714C.1
tctctccctcctcccgcgcgcggggtctcgccttaacgtttgccgcatatgggggcgacgagcaaagcgtaggccggagggagggacagggagagagagagagagaggctttctggctcgctctctctgcacgatctctcgtcttgttggattatacagccatgacatggtgcaacagcttcaacgacgtgcgcgccgtggagaacaacctggccaccgccgccgccgtggccgcggccaagaagcagcagcagcagcagcaggtctcccagcacgtcaacctcatcaagacctgcccctcctgcggccaccgcgcgcagtatgagcagagtcagttgcaggcagcggcggcggcgacgatccaggacctgccggggctgccggccggggtgaagttcgacccgacggaccaggagctgctggagcacctggaagggaaggcgaggcctgacgcgcggaagctccaccccctcatcgacgagttcatccccaccatcgagggcgagaacggcatctgctacacccatcccgagaggcttccaggcacccgtcagccgtcaggacattggaactggtcaactggatactacgattacgaagccactcttgttgtgttgctgacctgctgttgcatgcatgcacgagtcggcaaggacggcctgatccggcacttcttccaccgcccgtcgaaggcgtacacgacggggacgcggaagcggcggaaggtgcacaccgacgagcagggcggcgagacgcggtggcacaagaccggcaagacgcggccggtgttcaccggcggcaagctgaaggggtacaagaagatcctggtgctctacaccaactacggcaagcagcgcaagccggagaagaccaactgggtgatgcaccagtaccacctgggctccgacgaggaggagaaggacggcgagctcgtcgtgtccaaggtgttctaccagacgcagccgaggcagtgcggcggcggctcggcagcgacggccaaggacctctccgtcgacctcgtcgccggtaacaacatcaaggctagcaatgctgctgctgaacaccaccataacgacggcgtcggcggcggcggccacggtggcaacaacagcagcatgctgaaggaagctgcaggcattgtagatttctacaacccagcggcggcgctaatcggctacagccaggcggctcctaacaacagggcggctgcttctgctcatttgacgatgcctaactttgaggtgcacacaggaggtgcaggctttggcccctgatggatggaagaaaacaaagcaaattaaacatatttgactgatgatatatataggttagatggagagggcagggcaggtatatgatggcaaatgtgcatcatgcatgctagcatggtgtaatttgcatcgagtgaaaaggagtttactaaaccgnctacgtacgtagtactggacaataaggagtgtgtcgagtgagttgctgcacagatgttgaagcgtaggggggtcgatattcntacagtgttcattattgttacatgtgtacacatatataacttgacattctcaaaaaaaaaaaaaaa

SEQ ID NO: 101058 - DNA, 2227 bp, Oryza sativa
  Clone ID: PAT_MRT4530_98715C.1
atggctgaagagtatgagctgaacgagatagatgacaccctgcatggctctgtggggagcaggctctcgctgtttgcgagggagctcaagtcaaggagaagcagcagctggcatggcggcaccgccctgaggctgccaaaggatctgtatgaaagccttgtcatacaccccaatggcagatggtacaggatctgggcgaacatgatgttcctgtggtccatctactccaccttcttcaccccgttcgagttcagcttcttccgcggactccccgatcagctgctcgacctcgagtgcgtccagctcgtcttcctcgccgacgtcgccgtccacttcttcctcgcctaccgcgacccccacacctacaggatggtccacgacaagcgccacatcgccctccgctacatcaaaggcagctttgctctcgacgtgctcggctgcttcccctgggacgccatctacaaggtgacgggcagggtggaggcggtgaggtggctggtgtgggtgaggctgtacagggggaggaaggtgatggcgttcttcaagcgggtggagaaggacatccgggtgagctacctcctgacgaggatcgtgaagctcatcaccgtggagctctactgcacccacaccgccgcctgcggcttctactacctggccaccacgctcccgcccgcgcgcgagggcgggacgtggatcggcagcctctccctcggcgacgcccggtacatcaacttcagggaggtcgacctgctcacccgctacgtcacctccctctacctcgccatcgtcaccatggcaactgtcgggggttcaggctatggcgacatccacgcggtgaacacgagggagatggcgttcacggtggtgtacatctcgttcagcatcgtcctgagcgcgtacctgatcggcaacatgacggcgctgatcgtgaaggggtccaggacggagcggttcagggacaggatgaccgacctcatcaggtacatgaacaggaacaggctgggcagcgccatcaggtcccaggtgaaggatcacctgatgctgcagtacgagagcagctacacccgggaccgcgtaatcgtcgacgacatcccggtcgccgttcgatccaagatgtcacagacactgtacctggatatggtttcgagagttgggctgttcagaggttgctcggatgacttcctaagccagattgtgctgaaattgcatgaagagttcttcctcccaggagaagttatcttggagcaaggcaccgtggttgatcaaatttacatcgtggcacatggatgcctggaagaggtggccaatggggaagatgggtctgaagagatcatctcagaactgcggccttacggcatagttggcgatgtcgcggtgatctgcaacattccacagccatacacagttagagtctgtgagctttgcagccttctgagaattgacaagcaatccttgactagcatcttacaaatttacttcaaggataatagtcagatattgagcaaccttctaaaggggaaagaaacggagtcgaagcggaagcaattggaatcagatatcacatatctgctagcaaagcaagaatcagaactagtccttggagtaaacaatgctgcatatcatggggatatatttcgtttgaaaagcttaatcagtgcaggagcagatccgagtaaatcagattacgatggcaggactgcattgcatattgctgcactgagaggatacgaaaatattgtcaggttccttattcaacgaggagcgaatgtcaacagcatagacaggtttggaaactcaccactgctgcaggcagtaaaatcaggccatgacaggatcacgtcgctcctcgtggagcacggcgcgatcctgaacctggaggacgctggaggttacctctgcagagtagtcaggggtggcaggatcgatctgctgaagaagctgctcagattcgggatcagcccaaactgcaggaactacgatcagaggacgccgctccacatcgctgctgccgagggcctgcaccttgttgccagcacgctgatagaatctggagcagacatacaggccaaagataggtggggaaacacgccgcttgacgaagggagacggtgcagcagcaaaccactggtcaggatactggagcaggctagaactgttgcgactaattgatgaaaaacaatgtgtattcatggggaaactaattgcaatgaaatattctttctgaggc

SEQ ID NO: 101059 - DNA, 581 bp, Oryza sativa
  Clone ID: PAT_MRT4530_98716C.1
gcacgaggacgcttgataaaatccctagttgggttggtacgcttgggagattggtaaagattcaactagttctgacagggctgaaggatgctgaatccataagtattcttggggaattgcgcagcctcaaatgcctccgtcttttttacaacgcgtataatggacaagagctacttttttccccggggaagtttccagagctaacgattctcatacttgaagatttaaaggtgagaaaggtgacttttgaggagagaacctcacccaagctgaaaaagataaccattcatgattgctccgcagagttaacaatctgtggtactgccagcctccaaagctttgagaaaattcagtatcttgaaaagtggaaattggtgaaggaggaaacgcataggcgtctgcaagtgggtcagagccaaagcagccataccgtagaggatgaagtcgtttggtttgatgccctatcaaatttttgctagtgcccaagttcagagaagttttgactttggtagggcatgcactatttaggcatttttcatagtgaaagatgaaagatacgtcaccggccagtccttgctatg

SEQ ID NO: 101060 - DNA, 2443 bp, Oryza sativa
  Clone ID: PAT_MRT4530_98717C.1
cccacgcgtccggaaatcagaaagagagagaaattcccacgcagcagcaagcaatccaatccgagagcgcgcgtttgcgattattcgctttcgattccgcgaggtttttggagagggaggagaaggaggaggagatgtcgaagggggaagggccggcgatcgggatcgacctggggacgacctactcgtgcgtgggcgtgtggcagcacgaccgcgtggagatcatcgccaacgaccaggggaaccggaccacgccgtcgtacgtcgccttcaccgacaccgagcggctcatcggcgacgccgccaagaaccaggtcgccatgaacccaaccaacaccgtcttcgatgcgaagcggttgattggtaggaggttctccgacccgtccgtgcagagtgacatgaagctatggccgttcaaggtggtgcctggccccggcgacaagccgatgatcgtcgtccagtacaagggcgaggagaagcagttcgccgcggaggagatctcgtccatggtgctgatcaagatgagggagatcgcggaggcctacctcggctcgtccatcaagaacgccgtggtcaccgtcccggcctacttcaacgactcgcagaggcaggccaccaaggacgccggcgtcatcgccgggctcaacgtgatgcgcatcatcaacgagcccaccgccgccgccatcgcgtacggcctcgacaagaaggcgacgagcagcggcgagaagaacgtgctcatctttgacctcggcggcggcacgttcgacgtgtcgctgctcaccatcgaggagggcatcttcgaggtcaaggccaccgccggcgacacccacctcggcggcgaggacttcgacaaccgcatggtgaaccacttcgtgcaggagttcaagcgcaagaacaagaaggacatcagcggcaacccgcgcgcgctgcggcggctcaggacggcgtgcgagcgcgccaagcgcacgctgtcgtcgacggcgcagaccaccattgagatcgactcgctgtacgagggcatcgacttctacacgacgatcaccagggcgcggttcgaggagctcaacatggacctgttccgcaagtgcatggagcccgtggagaagtgcctccgcgacgccaagatggacaagagcagcgtgcacgacgtcgtgctcgtcggcggctccacccgcatccccaaggtgcagcaactgctccaggacttcttcaacggcaaggagctctgcaagagcatcaaccccgacgaggccgtggcgtacggcgccgccgtccaggccgccatcctgagcggcgagggcaacgagaaggtgcaggacctgctcctgctcgacgtcaccccgctgtccctcggcctcgagaccgccggcggcgtcatgaccgtgctcatcccgaggaacaccaccatcccgaccaagaaggagcaggtcttctccacctactccgacaaccagcccggcgtcctgatccaggtgtacgagggcgagcgcgccaggaccaaggacaacaacctcctcggcaagttcgagctctccggcatcccaccggcgccgcgcggcgtgccccagatcaacgtctgcttcgacatcgacgccaacggcatcctgaacgtgtccgcggaggacaagacgacggggcagaagaacaagatcaccatcaccaacgacaaggggcggctgagcaaggaggagatcgagaagatggtgcaggaggcggagaagtacaaggccgaggacgaggagcacaagaagaaggtggacgccaagaacgccctcgagaactacgcctacaacatgcgcaacaccatcaaggacgagaagatcgcctccaagctcgccgccgacgacaagaagaggatcgaggacgccatcgatggcgccatcagctggctcgacaccaaccagctcgccgaggccgacgagttcgaggacaagatgaaggagctggagggcatctgcaacccgatcatcgccaagatgtaccagggccccggcgccgacatggccggaggcatggacgaggacgcgccggcgggcggcagcggcgcaggccccaagatcgaggaggtcgactaaactgctccatggttgccgctcacgatgttctttctgccatcgtctcttttggctgtggcttgatctgtcgtatcgtcgttgcttctggtagaaattaagtgagagttgtgggggaggaacgctgtggtttacctgtggtttggaactttcatctgaacagcttttggatatggcgatgcattcttagttaattattgtgagtaactctgttttgctccgttctttctttttttatctgtgcaatgctcgactctgggccaaacgggtctctccttcgacagctttgatctcgctataagagcaatcagatattttatgttgcccagtcgttcgtaagttttgcaaatgttaatttacttaaaacaaaa

SEQ ID NO: 101061 - DNA, 1833 bp, Oryza sativa
  unsure (1)..(1833): unsure at all n locations
  Clone ID: PAT_MRT4530_98718C.1
atggtgctcgacctgttcgcgctcatgggcgcctacgccgccggggtcagcagggacgtgctcgccgtcgcctacgtctcggcgctgttcggcctggtgttcgcgtacgtcgcgctgcacatcgtcgtggccacgtcggcgctgccgccggtggagtggctgcgcgcgtcggcgaagaggctccccgaccaggcggaggagctgctcaggaagggcgacnacaagaaggcagcgtcggcgtcggcgtcaatgacgacgcggcgcgtcgaggaggaccggcaggagcggcgcaagttcctgctgctgctggccacgttcgcgacgccgctgacgtacgccgccgggttcgatccgccgggcggcttctgggacagcaccggcggcggccacaccgccggcgtccccgtgctccgcgacggcccgtccaggagccgctacagggcgttcttctactgcaacgccacgtcgttcgtggcgtcgctcgccatcgtcatgctgctgatgagccgcacgctgagccgccgcgtcgcccggtcgtacgcgctgcaggtgtgcgtgatggtggagctgcttggcctcgtgggcgcctacgccgccggcagcaacaggaagcgcgagaccaccgcctacgtcgtctccctcgccggcgcggtgctcgtctacatcgcgctccaggtggtcgtcgggatgttcgccatggccgcgatcaagagatggctcgtcggcctctgcaggatcctgcagtgccgacgcagcatggagccagctgaacacctgcgcgctgatgacgtcacgcatgatcatcgcgtccaatacttggagatgaagccgtgcccagcaactccgaacaacacgccatgcgaagttcgtgctccgaatggcgatgtcaccggaggaggaggaggcgatggcgatgaaggcgacgcggacacggtggaagagtcacggtcgctgctgctgctgctcgccacgctggcggcgacggtgacctacgacgccgggctcaacccgccgggtggcttctggccggacggcggccgcgccggcgagctgatcctcctcgacacgcacccgaggaggtacaaggcgttcttccactgcaacacggcggcgttcgtggcgtcgctggtggtgatcgtcatcgtgcagagcaggcagctgagctcgggcgccgtcgtgaagcgccgcgcgctgcaggcggccatgacgctcgacctgctggggctcatgggcgcgtacgccgccgggagctgccggagcgcggcggcgaccgtctacgtctccgccctggccgtcgccgtcttcgtctactccctcggcaacgtcgtggcgttcaccaccatggggcggagcagggagacgaggctgatgcggtgggtggacgggatggtccagaaggttctagagaggctgcacctctgggacggccaggccgaggaagccgacgacgacctggagaggaagcgcaagttcttgctgcagctcgccatcctcgccgccaccgtgacgtacaagacagggctgaacccgccgggcgggttctggtcgggctccgacgacggccgcgccggcgacccggtcctcgtcgaccactaccggaaccggtacatggtgttcttctactgcaacgcgacggggttcatggcgtccgtcgccgtcatcctcatgctcgtcaaccggcggctgtacaagcagggcatccggtgcaacgcgctcaacgcctgcgtcgtggtcggcctgctcggcctcatgctcgcctacgccgccggcagctgccggaggctccgcacgtccgcctacgtcatcgcgctcgtcgccgccgtggttacatga

SEQ ID NO: 101062 - DNA, 757 bp, Oryza sativa
  Clone ID: PAT_MRT4530_98719C.1
atgggcttcactatgggccctcaagtggcgaaaggccattttaagccttataacttctttggttcacgagcggcggcggtagcggcactgcgaaggcagggttgagcggtcagtgccgcgcatctccgacaagcagctgcggtcgtcggcggaggaggtgtcgcgggaaagtagcagctccaagccgctgcgcgcggtcgtcggcggaagccgcgcacgacccgcagagatggctaagcagggagcagggaagaagctgctccgacacaagcgcgatatagacctcgtcacctcgacctgtcgcttgtgacctgtgtgtgatgcttctcctccctggaaccagtggccggggctgagggtggcggaagagccaagaagaggcgggcgccgtcgccggggaggagaggagggcgcggcgaaggcggtcgtggacaaagattggatgtgccgcggaggtggaggagagcgccgctcgaggggacgccgtcgccggccacctcgcccgcggtgggcgacggcgagttcttttcatgagccggcggcaggcgagggctcgagcggcggtgcggtcggagagctcggcgaggagcgcgttgacggagagcagcgcggcggtggagcccgcgatgacgccgagcacgacgcctgtggtgcccaccaccttcgcaggcgccggccagttgtcacgcccactcccgcttgtggtaagcacggtaagtctcccagggtttcccgtgaaccggtccttaattgccat

SEQ ID NO: 101063 - DNA, 309 bp, Oryza sativa
  Clone ID: PAT_MRT4530_9871C.1
tgccagccgcacccgcctggcagactggcctgcatagaacactgggcctgcactgcacttgcaagggaacactgcaaaccatggggcaaatcccacgcctgcactatgccccaagcacaaatggtgggcgtgttgcacagtgccgcactgtgccacccaatgcaagcaacactgcacgtgcagactggctgccacaaggatgcaactggatattgacctgagctgtggatgcaatgtctgcccccctggaggatgccggattaatggtgatgggaagatgtcttagaggagtggacctcgtttgccaca

SEQ ID NO: 101064 - DNA, 623 bp, Oryza sativa
  Clone ID: PAT_MRT4530_98720C.1
aatccccctccagatccagccctccgccggcgccgtccatccatcagcctcgcccttctcctccgcgccgtcattcgctgtcgaggccgccgccttccccaatcctagacctattggcccggataggggatctcgccgccatcgtcgtatctcgccgtcgccgcaacctacaagccacggaatctgaaattatttgtatacatgtgcattctcatgctgttggagatgcatgtgtgtggcggcggctgcctgtgggtggcacatgcatgtggcgtcgtggtcagtagagcgtcaacccccgcggaggctatgagtggcgtaggtgtgcggcgcggcggcgagtggaggcgcaggtggctcaaggccaaaagcgagtactattactgcatatacatgttttggagagcgatatgcgtttaaaatgctggcatgcgaaactgtgccactttgcccacgcctctttccgcactgagtcgatgccggtagcacaaccgacgaggtaaatttttttttctttgcaaactcctgttcttcccaacttctggaagcctggtcctattctatttcagcgaaatacaatgatatttcactagggatatactgcaggggttatgcctgttact

SEQ ID NO: 101065 - DNA, 429 bp, Oryza sativa
  Clone ID: PAT_MRT4530_98721C.1
atggacgctccagcaagcagggagacgaccacgacgacggaagaccaggccagcgacggagtccccgtcggcgggcggccgccgccgaacttcttgccgccgttcatcacacggacccggatagcaagaagaacaagggggggacaactcgccgatttcccggcaccgggtgaggagcggaatagccaaaagcaacggatcaagctccgcaacacccgcctccgcctgatgcgagagccggggctgagtctccgagccggacgaggccggcggcggcgccgcggcggtggcggcgaggagaggagaggagaggaggcgcagccgcgcagggagcgtggagcgatgggagagaatggacggtggagatggaccgggatccggagaggattcggcctgtcagatgcaaccacaaaggttgtatgggtttga

SEQ ID NO: 101066 - DNA, 417 bp, Oryza sativa
  Clone ID: PAT_MRT4530_98722C.1
aaaacccggtccatctccaccgtccattctctcccatcgctccacgctccctgcgcggctgcgcctcctctcctatcctctcctcgccgccaccgccgcggcgccgccgccggcctagactcccccccccctctctctctccctctccctctctctcccatctcctctccggtcgagcgcgcgtgcggcctcccaatcccgacgccgccaccagcccaaacgcacacgcagacacctcgtccggctcggagactcagccccggctctcgcatcaggcggaggcgggtgttgcggagcttgatccgttgcttttggctattccgctcctcacccggtgccgggaaatcggcgagttgtcccccccttgttcttcttgctatccgggtccgtgtgatgaacggcggcaagaagttcggc

SEQ ID NO: 101067 - DNA, 845 bp, Oryza sativa
  Clone ID: PAT_MRT4530_98723C.1
gcacgaggggggagccggacgacggcggtggtcaccgacgacagagtgcgcggcgaggggaggaccgctccggcgagcggcgacgaggggaggacacgcgcatgcgcgcgctcgacgccagcaagcggcaagcggcgggcgtgtctgtccatcttccccatcgtccatcgtcgtcccggtcgcacgcccgcctcgcccccgcgaccaccgctggcgaccacagccgccagtcagttcatcaacatcttcaaatagtagtttttttttaagataacagtgagatttgtagttgttggcaaacaatggaacttctacaagagaagaacatacatgtcagccaaagggatgacaaggcaaagtggattattgataactatagtaatattaggagtttcacagaacatgacattgagaaaatcactagcaactattgcactctaattggaaagggtggatttggagaagtatttagaggggttcttgatgatgaagatgacgtagttgcagtgaagagatatatccgtggagatttaagagaagagttcatggaagagataagaatccatgctcaaatgagccataagaatatagtgaaacttataggctgctgtataggaaaaaatagactgatgatggtaactgagtttatctcaaatgggaatcttgaagatgcacttcacaacagtgatattttcatccctttgagtacacgcttgggcattgcaatgggatgtgcaaaagcattgagctacatgcattcgatgcatttatcaagtagcagccttatatgtcatggcgatattaagcctgcaaacattcttcttgatgccaatcttacagcaaaa

SEQ ID NO: 101068 - DNA, 991 bp, Oryza sativa
  Clone ID: PAT_MRT4530_98724C.1
ccggccggctcagtactcaagccggaggcagcacactgcaacttaagtttttctatagctcctagcaagctagcaatggctccctcggtgatggcttcgtcggccacctccgtggctcccttccaggggctcaagtccactgcgggcctcccggtgaaccgccgctccagcagctcgagctttggcaacgtcagcaatggcggaaggatcagatgcatgcaggtgtggccgattgagggcattaagaagttcgagactctgtcgtacttgccgccattgacagtggaggaccttttgaagcagatcgagtacctgctccgatctaagtgggtgccttgcttggagttcagcaaggtcggattcgtctaccgtgagaatcacagatcacccggatactatgacggtaggtactggaccatgtggaaactgcccatgtttggatgcaccgatgccacccaagtgctcaaggagctcgaggaggcaaagaaggcataccctgatgccttcgttcgcatcattggctttgacaacgttaggcaggtgcagttaatcagcttcatcgcgtataagccaccgggttgcgaggagtcaggcggcaactaagcgctttcgttccttcgtgcatgttctttctttttcttttttttttttgtgtgtccgtgttaagctgcacgtaattgttctctcgcgctccgacctgccgttgttgcaagagtactactacaactatcggtctatcgttcggtgacggtgagacagggcacgtgaatgcaagatctccggctatacacacgtactcatgtaatatgatgcctagagcatatctgaatccgtcgacaatgaaattttggttttgcaaaatgctggtatttgtttatcatcctggcacgtgatatttgcctagagcatctaaatcacttttacgaaatgtgcgcgtcaacaaactgatacggcccaaatgccagaaattaccagcacatatagccatatc

SEQ ID NO: 101069 - DNA, 1027 bp, Oryza sativa
  Clone ID: PAT_MRT4530_98725C.1
ccgggctgcaggaatcggcacgaggcctcgtgccgaattcggcacgaggcagcacactgcaacttaagtttttctatagctcctagcaagctagcaatggctccctcggtgatggcttcgtcggccacctccgtggctcccttccaggggctcaagtccactgcgggcctcccggtgaaccgccgctccagcagctcgagctttggcaacgtcagcaatggcggaaggatcagatgcatgcaggtatcagaaacgatacgtttcaatttctccttcaaagtgctcgttgttcatatatattaaatgttggcccgattctattatctgcatcaattcattcaatcaggtgtggccgattgagggcattaagaagttcgagactctgtcgtacttgccgccattgacagtggaggaccttttgaagcagatcgagtacctgctccgatctaagtgggtgccttgcttggagttcagcaaggtcggattcgtctaccgtgagaatcacagatcacccggatactatgacggtaggtactggaccatgtggaagctgcccatgtttggatgcaccgatgccacccaagtgcttaaggagctcgaggaggcaaagaaggcataccctgatgccttcgttcgcatcatcggctttgacaacgtgaggcaggtgcagttaatcagcttcatcgcgtataagccaccgggttgcgaggagtcaggcggcaactaagcgctttcgttccttcgtgcatgttctttctttttctttttttttgtgtgtccgtgttgagctgcacgtaattgttctctcgctctccgacctgccgttgttgcaagagtactactacaactatcggtctatcgttcggtgacggtgagacagagcacgtgaatgcaagatctccggctatacacacgtactcatgtaatatgatgcctagagcatatctgaatccgtcgacaatgaaattttggttttgccaaaaaaaaaaaaaaaaaaaaaaaccacaaaaaaaaaaacaccccaacc

SEQ ID NO: 101070 - DNA, 639 bp, Oryza sativa
  Clone ID: PAT_MRT4530_98726C.1
atgggtgccacggagcttggcctggacgcgcacgcaatcagtggaggcagcatggcgcgttgcggcgtggtgccatgtggtgtcgcacagtggcgatctttggcatggagggggaaagagatgaagaggagccttcgagggacaatgggaatggcgaagatatctctgacgaactccctctgctccttctctcgtgttatccaaacacaaattagcttcgatttcctattcctccaccatcaccgcctggccttgctggcgtcgaaaagcatcaatgtgtcggcacggctctgcctggtcggcctcctcccctacctgttgactcgctttgccccccacgtgcgaccgacccaaggctttggtggcatcgccatcgccattaccaccgcctcgcctcccacccttcctgacaccgactgcctaccactttttctcttagggcgttcacagtgggaggatgtgtcgttcagccttgttgccgagaaccgaatattcgacgacacgtcagccagccgcggagccaaaactggtcacacgaacttcgctggaatcgaggtatgcggcacggggagaaaggcgggggcgcggcgttgtggaggtcatcgcctcgtcgctccgtggtttcgcgcgctgccatga

SEQ ID NO: 101071 - DNA, 258 bp, Oryza sativa
  unsure (1)..(258): unsure at all n locations
  Clone ID: PAT_MRT4530_98727C.1
gactagttgtagatcgcgggcggccgccgcgatctaggcttgcngcgcgcncngnttctncaagctncgtancgtttctngnnaganagtggaggaggaggaggaaggggaggaggatggcggcgaacngggggatggtggcgggatcccgcaaccggaacgagttcgtcatgatccgccccgacggcgacgcgcaccgccgctaagcanggaagagtttaatggtcaagtctnccaaatttntggcgcactgtttgc

SEQ ID NO: 101072 - DNA, 151 bp, Oryza sativa
  unsure (1)..(151): unsure at all n locations
  Clone ID: PAT_MRT4530_98728C.1
ggcaacagagttgcccatanatatgtggagtgtgcctaatttccgagaaagtggcacatatcgtgtaaagtgtgtgcaccgtgtgggtactatagctcgccacagtnncagagccctcacaatgggcccattttaacgaagacagtgggca

SEQ ID NO: 101073 - DNA, 195 bp, Oryza sativa
  Clone ID: PAT_MRT4530_98729C.1
atgggccttgtgtggcccgacgagacggcgaaggcgacgacagagaggaacagcgacggcggcggcggcgtcgcgacgcccggaatcgcttcgcctcgcggggaacttgaccggggcaacggagggatcgccgtcgccgtcggccatcgctggggtgcagccgtcgtgctctcctaccacccatgctcctggtaa

SEQ ID NO: 101074 - DNA, 1036 bp, Oryza sativa
  Clone ID: PAT_MRT4530_9872C.1
atgtggaagtacggtagtgctttgcaacagaggcccgaagaccggtccttatatggccgagccgggagagaggagcgcgcggaccgggtccacgggagtggggcccactcggcagcctctcggtccacggtggaccggccgcggggcgcgcccgaaggcggcctcgccggcacggccgacggggaggcggcgcgcccgcgccccgatggtcgccggcggcgaccaccagcgcggcggagcggcgcccgagagaggggagggaagggggaagtgaaacggcggtccacggctcaccccgggtcgacggcgacgacggaaacggcgaccggagtggaggaaggcggcggcgcggctcgggtagacgaggacggcggcgttccggcggtcggtgagcgaaacggaggggtggacgaggtcggcgaggtcgcggcgaacccgaagaaggcgatgccgaagcgggagaaggtccggggcgacgacggcggcgaaccggagctcggcggcgacggcggagagggaggacgacggcgcgagctcgattccgacggggagagagagcggcgagtggcggaaacggtggagggaggccacggggagtgtttatatatggttgggagtgagagagggcggtcggatgagggggaaacggccgcggaagatccggccgccattgatgcgccggcgaggtttaggggaaaagatcccgaacgaatccgatggagagagagagggaaaagtggggggaaagagggagggaatcatgggaaatatttcccccctcttgattgcacgcgggccggacggaaacggcggtatttccgcgggcgctcggcgctagggcacggccaagccggcgggaacggcggaaggtagggaatgacgggtgggccccacctgtcagcgagggtggcgagcgggcccgcccgtcagcggcacgcgcgcggggaggaggccggatgggccgcgggggagaggagagagagggagggaggtgggccgagccggcccaagagggggaggggggaaaaagactttt

SEQ ID NO: 101075 - DNA, 295 bp, Oryza sativa
  Clone ID: PAT_MRT4530_98730C.1
cggacgcgtgggactagttctagatcgcgagcggccgcctttttttttttttttttttaagggggtaacactggattgcttatatatattaagtatctcacaacactgcatgtctgcatctactggctttttttcctagtcaaaggctaatggcatcttcacttgtggttttaatagagctacccactaaaaagggcaccgcccaagcaaataaacaagggagctaacactatgctgacacttcactccttttctcctatattccactatcgcttttcttttgcttcttgcgctc

SEQ ID NO: 101076 - DNA, 168 bp, Oryza sativa
  Clone ID: PAT_MRT4530_98731C.1
atgcgaggtccgaacttcgacttctttcaccccgactcggagatcaccacctatgtcaaggtcatcttccacttttgtccgagcaccaaccggctcttcttctctctccacagcacggcatttggtctgccatctgctctgtaccggaaattttcatatgtggtctga

SEQ ID NO: 101077 - DNA, 578 bp, Oryza sativa
  Clone ID: PAT_MRT4530_98732C.1
cccccccccccctctctctctctctctcctccccctcggatctgcctgccctctgcccccaccgtttctaacctccattcccccaggtgcacgaaccgagagggtcaggaggcgaggatcggaggggagattttcgttcgttccaaattcggtacgtgaggggaggcgggagggggagatcatggcgcaccgggtggacaacgagtacgactacctgtgcaagatcgttttcatcggtgattccggtgtcggctggtacaatatcctctcccgcttcacccgcgatgagttcttcctcgagtgctagtccaccatcgtcgttgagttcgcctcccgcacgctgcagatagagtggaagactatcaaggttcagatatgggacacggcaagttaagagagataccgtgctatcaccagtgtttattacagggttgcatttggagaacttcttgtattcgacataacaacgaggcaagccttcgacaatgttcataggtggctgcgggaggtccgcgaccatgcagatgccaacattgttgtcatgatggcccggaaacaagtctgacttaaaccatcta

SEQ ID NO: 101078 - DNA, 814 bp, Oryza sativa
  Clone ID: PAT_MRT4530_98733C.1
cttcgactagcattgtgcatgcacaaagtactagcgcaaaatagacaaaatgttcattaaaatgaaatatttagttttggtcaggctgcagaatgttaggagctttattctaatatttttggttgtaagcttggatactttcctgtaagatatcttggtatttctatgcattttaggaaactaaacaacaagggctagaaaacaattgaggaaagaattgacaagaaactttgtagttgtctgtagggggggagattggtgttaattaattctgtgctttctagtttagccatgtttatcatatatttttttgagatttcaaaaggagttcttcaaaaaattgattattataggccacgtttcttttggcaaggtgatgagcataagaagaaatatagacttacaagataagatattatatgtcatcctaaagatcagggtggtcttggagttcataatttagaaaatcaaaattaatgtctttttagcaagttgttgtttaagctaattaatgaacagggtgtttggcaagatctatggaaaagaaaatatttgaataatcaggcttttaagtcaagttgagtggaaacaaggggattcccatttctggtcgggctttatgaaagttaagagcacatttctaaatatgggttcttggattgtgcataatggtcagcaagtgagattttgggaggataattgggtaggaaatctttttttaaaagataagtacccctcacaatatgctatagttcgaaggagaaactcttcgattgcaatattatggcttatgtttctctgaatgtttctttta

SEQ ID NO: 101079 - DNA, 474 bp, Oryza sativa
  Clone ID: PAT_MRT4530_98734C.1
atgtcgctgcaccgcctctctcatctacgccctcaccccctggccaccccccggagcgcggctgtcttcatgctatcatccaccgatcgtcacacctctcgtcccgtccctacaagcccaagcacgaacggcccgccacactcgacatatctctattccgccacacacacacagacccccgaggatacccatgccctgcccctaccccaccaccacaccagtgttctcggcggcccccacacccttctgctcacaccgcgtaagaacgaactatctcacacctccataccaccaccccgctctcactccgcctccgaactatacctcccctaccacctccggcctacccatagccctggcggcccgcctacacccctccccggtccccgtttgcgcggcatcgccaccagtcctaagctggaaagacgcgagaagggcttgccatgcacggaacacatctcccaattgggctga

SEQ ID NO: 101080 - DNA, 1465 bp, Oryza sativa
  Clone ID: PAT_MRT4530_98735C.1
ggtccaggcccaggcctcttgtgtcttgtaatgtaatctagggttttgctccttctctcatccagtagcggcggccggcggcgagggcagcggcggcggcatggcgaaccgcacggaccccctggcgaagagcatccacgggacgaaccctcagaacctggtggagaagatcgtccggtccaagatctaccagagcacctactggaaggagcagtgctttggcctcaccgccgagaccctcgtcgacaaggccatggagctcgaccacaccggcggcacctacggcggcaaccgcaagcccacccccttcctctgcctcgccctcaagatgctccagatccagcccgacaaggacatcgtcgtcgagttcatcaagaacgaggattacaagtatgtccgtgttcttggtgccttctaccttcgcctcactgccaccgtcgccgacgtctaccaatacctcgagccgctctacaacgactaccgcaagatcaggcacaagctcagtgatggaaagtttaccctgacccacgtcgacgagttcattgacgacctcctcaccaaggactactcctgcgatacggccctcccccgcatccagaaaagatgggttcttgaaacttctggaactctagaaccaagaagaagtgcacttgaagatgattttgaggaagaggaggaagacaaggaggatgaacaacctatggatatagatgagccaaatggtcgtgaaaagcatgatcattatcgtggaaggagccctactagagatcgagacagggagaggaaacatgaaagacaccacagggaccgagattacgacagagatcgggattatggtaggggacgggaaagagaccgagatagagaccgtgaaagagatagagacagggatagagatcgggatcgggatcgggatcgagaccgtcatcgcatacgagatgaggactacagtcgagatagggaccgagcaagagatagggatggcagggaaagagaacgctgggacagagaccgtgggaggcgcaggagccgttcaaggagcaggagcagggatcgacgagaaagagaccgagaagatggagagtaccgtaggaggcgtgatcggggtagtgccagtcctcgaggtcatgcggaggatggtggctcaagagatgagccgaagaagagaaaggaaaagaaagagaagaagggtgaaggaaatgcaccagatccaaatgacccagagattatagaaatgaacaagctccgagcctctctagggttgaaaccactgaagtagtaaccttgatgtaatgcacctgatgtttgagcgcctttagctttagcttgaaaccatgatttttctgacgacttaagcagtaccgcctgtcaaagagtacagcgtaggtgtaattacctgttgccatattattacttcgctgtaacggtatgtgtctgcatctaaaaacattttaaaatggagcgc

SEQ ID NO: 101081 - DNA, 615 bp, Oryza sativa
  Clone ID: PAT_MRT4530_98736C.1
ttattcttctgaacacgccttgaaagccaatgggagcagcttactaacacttaaaggtttcttagcattcattgtaagcccgatgataccaaaagacaacagcactaagctccccatgaccccaaaaccccggacggagcggtagccagcttcccgtgagtagcaacgcctcggagtcggagtcagagtcggaggcgaccgcctttggtcgccggcggcggcggcggcggcgccttcttccatccggcgcaggaagctctcgcgcagcagcatgtcctgctcgccgccgccgtcgtcgtcccggcggtgtcgccggaaaaagaagtagtgcatcattgcaacggccatggatggatggatggatggctagctaggcgcacgccggcggcgagcggatggccggccggggtcgacgacgacgaacgcggcgggccgagcagcaacaggagaaggagagatgagatcgatcgcctaacgcggggcagagcaaaaaccagcagcggtatgtgtatatgtgatgtgatgatcgcgtacgtggtcgcgctcgtgtcggattggaatattggacccgataacgagctcggtttcgggaggacacgaatcgaaggagtccag

SEQ ID NO: 101082 - DNA, 238 bp, Oryza sativa
  Clone ID: PAT_MRT4530_98737C.1
actaattagacatatatacaagcttggtaaagagctaagggatataagcgggcctgaagaacaaaaaaagaagaagaaagagaaaaacaacaagaagaggggaaagaacgaaaaacgacgacagaagaaaaattcaggactagctagaaagaggaggcattgctgcatacgggtagagaaaaggataggatcggatcggaaccggggaggccagcaaaggggccggacggcccagggg

SEQ ID NO: 101083 - DNA, 154 bp, Oryza sativa
  Clone ID: PAT_MRT4530_98738C.1
attagatctgcagcgagagagagccagcgaagcgcgactccgttttaaccgccttcgccgtcgtcgccgtgatatcgattccctccctctcgccgtagacgtcgttggtattcatggtgccagtgctttataccgtcattggcaagatgaccag

SEQ ID NO: 101084 - DNA, 297 bp, Oryza sativa
  Clone ID: PAT_MRT4530_98739C.1
tccctcatgctggaggaatcatgaccatggcctggctggtcggagcgctatatgcatgctggactcgaaacccctggaacttgagtgtgccacgggcttgagacaccagaacttttttgaacatataaaccacctcccatgggtggtttctctttgaagacgcacagagctggctgccggatcccaatcccatgaagtgaacccctgctgtgcatccggaagagtgttagtgcatgtctgggttattaggagattgggcatttagttcgacctgggacccgcctgggtgtactgttc

SEQ ID NO: 101085 - DNA, 526 bp, Oryza sativa
  Clone ID: PAT_MRT4530_9873C.1
acggttgtgttcgccggtgagccgcgtattccattgcggcgatgttacacacaggtcttgtgggtctaacaatagtaccttaattgtggatgagggagagagtgatttgattacgatagtctggactggcagagatgctgtgtccctatctagtgacatcgatgagagggaggcagtgttcagcttctcacggggatagaaaaggagattgcgtactacttctaagacatgaactcggaaaagagattgaatggctagtgaactaattcctgaaagatcgagtttcaagttgactgacaaacgtatcttactcgttccctcaactgctcgactgaaagaactctgcatacgagtccgcatctccttatcgaaaagtaaagcctattgcataggtactccagcttcagaaaaaaggaaacccatctatgatactaatgcaggcctcaggattgatacagaaccacatcatatcgaagcacttactgcgcattagtttatgctgccataaaggataatcaatccaggg

SEQ ID NO: 101086 - DNA, 254 bp, Oryza sativa
  Clone ID: PAT_MRT4530_98740C.1
aagcaaaaggcaaaggaaatttcccgcaaatacttatttatttgttttgacaacatttttcccgacccatgcttattgggggaaacgcaggtgaccacctagaggttttagttcaccatttttttttagaccaagcattcgtcccaagatcagaacacatgcttacaagggaaaattctaatagcctgggtgggtggttcacagaataaccaaacgacaaccttaacagataaaaatgccccggaatgaaaaca

SEQ ID NO: 101087 - DNA, 382 bp, Oryza sativa
  Clone ID: PAT_MRT4530_98741C.1
cactggaacatgattatgacagtgatgcctatagtggagcattgcaacattaagatctatattgttttacaaggaggtttacactttcaccaaagaatatgatttagataaccatcttatcaaaatacaactggaaaataaatgagaatggtatgtgtacataaattgcacactgtgcaacattttttctttaccattcactaaccagcctacaagctggtgcagtttagagtgtgaaatattaggggagaaaaaaagagaattgcatcccactaataaaattatcccaaaagtgtatataacttggtcatctactcacaggacaattattgcagatggtttgcatgctaagaaaatatgggtcacatccaaacaattctgt

SEQ ID NO: 101088 - DNA, 500 bp, Oryza sativa
  unsure (1)..(500): unsure at all n locations
  Clone ID: PAT_MRT4530_98742C.1
gctcgctggggcagctacacaggggagtgaagtagagtgagtgtgagagagagtgattgttacttggtgttattgtttttctcagtttgtcantttcttcccagattccccaacgcgactagattcattgttacttttcgtagcagagccgccaccgtcatcctggcttccgtcaccgtcctaggcgggggcgacagtacactttcgccgtactcggtggaggatccgtaacagcactcgcggcgatggtttccttaacggatcctgagtggaggcggaaatttcttgcggctgaagttggcggaggcgataaggcggttgagagggagtatttcattggggcggggttcgagaggtggaggatgatctacggtgtgactgatgaagtgtatcgagtgcggaagggtgttctactcggtcgtgctatgacggtggcgaacacggtgcttatgctggctggtgatggatgcttggccggggtggcgggttgcgacgccggg

SEQ ID NO: 101089 - DNA, 204 bp, Oryza sativa
  Clone ID: PAT_MRT4530_98743C.1
atgggggccggaggcggcatggaggaggcgtgggcgacgagcaggtggcagctgtcgcgcgccacgaggtcagacacctcatggttggaggaggccgccagccgaggatgggctggtttggcccagcccatggttcggccgaacccccatcagcgccgtccatcctggggttttgcgtcgacgtccaggattcatcctcaatga

SEQ ID NO: 101090 - DNA, 1844 bp, Oryza sativa
  Clone ID: PAT_MRT4530_98744C.1
gaaaactcataaatttattcatatagtgaggattacagacagagctcaaaggaaatggcatccccagaacatcgccataaaagataagacataaaaaacaacaccatccattcagaaggtaaagctagctgaactaagaaaaacatcgtgcaagataatccaaacagcagtaaagaacgcgatcgacaggggactgcggtaatgccgcgacgaccacgtccacgagcctctactgaagacgcgcacaccgcttgacagaccggtgaccccttcggctgcctccacggaaacggcgctattcgaggtttgttgttgagtcgtaaatttttcttaagcttcaccggactcaacaaaatattgtcaaggagttctccatcaaatctgaggagcccagactgcaatcatggaacagacccaatatagaagttatatactaatcctaatagtgctctcatagcactaagctccgcctgtccatccatcctaatatcacatttcaccattttccggctagccttctccacaggcaagccaagcacaacacctccagccatgccacgacggcctagcctttgggcatacataaagatcatatcggctgaacctctagtgtatactagtatgaacccctttgcctcacgatatcgattaagctcaaggctagatatgtgccatcctctaatagcccaatcattcactcgaaccatctctgtcccgaggtactgagccaggcacagttctcctcctagctcgaccaggtcgagccgtgtttcgtcagatggtgaaacaacatcgtggagtacaagaccgaatgtctcatcttgtaaatcgaagcggaggaaaccctgtggaggaggagggcttccctcctggaggagttccttgcaaatgtgccaatacaaggaacccttgaaatacatagggtctgccgtaaccgggtatggtggatcctccgctatggtcctccaacacgaatcacggttgccgatagtgaacacctccatcccggcagcatcgtgagcccactgattgaaatcgatggatcggtcgaaggaccgaacaatcttgtaagtgttggtgccaagatcaaggcctaggcctgcagtctggaacctgctcttttggccatcaggcagcttgaggacatcacccttgcctgtagctgggttgaagacgtacaacctggtattggtggggaatataacaagcccatcatagtgcgacatgccgtaaaccgacctgaattccccatgtaggttggtcgcacgcacaaggtgcgcatcgtcctgctcggtctcctgccaacggtagaaggtgattatgttggagaatgtggttggccagggctcttcgtcgtcgatcatgctgtcaagggtgtgcggggtgatgaggaaggacggcttctgctcgtgtctggagacggcagactgctgctgctgcttgagatgcgtggtgatgaaggacgggttggagatggtggcgcgccacgccctgcacacggatttcgaccgggaaagggttttgacggggaggcggagcaggatctcgtagacgagctcgttagggagggatgatgcgccggggtggcagtggtgctgcaccctcctcctcttcctcctcttgtacgtcttgatcaacgtcgtcgtcggctcttgtgggttgcgatctatagctttcttattattcttcgtggcaattacgtccatggtaccagaggtcgaagggataatgttctcgcagagagcttcaacaagcaggagcctgagcaaccaaccaacaagcttgccaccaagagatagattggtggccttcccgcgtctccgcaaaccaagttgcaacgacat

SEQ ID NO: 101091 - DNA, 706 bp, Oryza sativa
  Clone ID: PAT_MRT4530_98745C.1
ggccgcgggtttttttttttttttttcgcacagcacaatataatggatttaaatgcattgacatgattgttcaattagtcaaattgacaacaatctgatcagagaaaatagcaataccaatcttacatacagatacaacaatatcaatgcaaatcttacttatagctagtacatgattacatgctaggtcaaagaagtccagcaaaaaaaacaaatctaggaagaagtttagatgagcattgtcacattggtcgatacaaggtcaatttgctagcacctcaaacaatttagcaaataagatggttggcttgcataccctgaatgctcattgttgtttggtgcatctagtagggttctattgttgcttccttgacctggacagagagattcctcttgaaatcatgcctgcaacatcataatcttcttcgaaatattgtacaatatatcactgttgggcgcaacgccatgatccgaatcagcaagtgcagcaaatttatggattggttgcacctactacccaacttccagcaaaagctgacactgatttgcatgagtggttcctaagcacagaagcagcaactgggtctgagtgcccgagctccagagggtggcggcggggcggcggccagcagggccctggatctggcggagggagccgagatctgctgcatgacctcgtggtgatgctcggtaggcctcagcccgg

SEQ ID NO: 101092 - DNA, 249 bp, Oryza sativa
  Clone ID: PAT_MRT4530_98746C.1
atggactgttgtgaagtggacctctccaccataaatgaaacatgtttatggggagccccagccagtctggagctgaaaggacgtggacaagataccagcgctgagtcattagaactggtggcgtctttgatgcgtgtcgaacatgcctcacaccacctaatttggccaaacgggcagaagaggaaccgtggcgctgtttcaggcagcccgggttcctccaggcccaccacttgccacgtggtgggctag

SEQ ID NO: 101093 - DNA, 2688 bp, Oryza sativa
  Clone ID: PAT_MRT4530_98747C.1
ggtacaacaaattatctcacttcattcaacaaattgtcattgtgtttgcaaactataatgtacacgagaaagacttcaagctgctagagcacttacaaatgctacgaaaatcctacaaccttgacctgagttctcacagttagctgcacataaaacagaatgatattctaaaattcttcatcgggtgaaaactcatcgtcgggcgaatttactgtcaagagtgagtatttcacccgcagcgatatcttgcccctctcaagatgcagctttgcacctgaaaccacccagtaacctggcaggtcctgcggtccacgcaacatctccgttgtatccacaaacctgagcaactttggggtctgcactggaacaggcgggccaccagggtacaccgccgaattgatgttcacttcggcagggcgaggcgcgggctttagagctgctgtggagaaatgtgtgctgataagtgttgagatgaggcctgatttctgacccaggtttggagatccatcccactctgggttcttgacagaagtggcattgcagactttggagaaatgaaggcgaaggaagagtattttcttgaaaccatggctgactacttccagatgtgcccctgtgacaatggaggaatcatctgaatcaactggtgcggtgcagacatgggagaaacgcttccatgaaccaatcggttcgtagtatttgcggatctctgcttctggagtttggggattgtaagtgtcgtcttcgagctgaataatctgaggaagagagcagagatgctggagatggatagctagtttgttgctcttctgtccctcaagaaacaaccggagtcctgtaacaggtcttttgcccacatcaaccatgttggtacaaacgtatagctttggaccaattaaatttactggtaaagatgcactgctttgtcttttcctctgaggacccagagggaggtcactgtagacaggtgcccactgccttggaagctgaaactctaaaaactggtgcaattcctcaatttgaggcttatatcgaaggtacagattaattgcatggttcaaaaatccacagccaggaactccattcaacagtgaagtaataggtatgaaggacattgagataacatcaggttctgcctgaacagtattcagccactcgctgtgagaaaggatatctttatcccttccacctcttcgcttaggcatcatcaccaactcctccttagaagagtaagaatttaatggactggactccacaaatctcagtcgttgctctcttgtgtcaaccttattatctttagcgtatgaatctgccaaactaatgtcagagtgcccatttgcatcaagaaatcgctggtctgacatctctttcaatcgtttttgaacatcaacagcttgcaagcttgacgagtgctgttgctttaaataaattacatcctttcctcccatttttacaccaacgactatatgagtcccaaattttttaataaaccttgctaaggcagcaggttcccatgttgatggaacagcctgcttaacatgatcctttagtattatatgtgcctttgagagtgcaacagtgtatagtgtgatacaccaaccatcaaaagcaagtgatttggtaatagaagcatctttctgccagcacccagtaaattcaaacatcgcattgaaaaatccagatggaatttttccagacaatgatagctcccggttgaattgttcagacatctgctgaaatgataagacgtcagagcggaaccgcatacgctcccctttatcgcacttgattgacttagacacaccagtaaccgtcagattaccagggagcacaatatcctgaaccttgtcatggtcgagctcaatgagcagcggatcaggcgaaccacgctgcttgcagtttttgagacggatatcattagcaatgtcgtagccaagaccaatggaccgtattgcagattctgaaacactttgcagctttgctttatgcgccatcttttatcatacaacgatcataaatcccaaacctgctgatcaagagttgaaaagacagccaaaattttccctttttgccgatgagaacctgccgtagaatcaccaaaacacacaatccttttgcagttgaaatggtcaaggatcaagtattccttcttccccaactgaatcaactagaaatggaagcgaaataccactacctaacaatctggagccgagtttatccaataattccaaagtaattttgccgaatctaagaggaaacaaggggaatctttgagttctcttgctactctcaaacccacatcaaaccaaaacaccagcggggacagctaatatcgagacactctgaactgaagtataaccaaatcataggcccgaccagatcaaattccctacagatctccacgattttctttgacaagctacgaattccaccaaaccgggtaaagaaattaaagaaacgagctcctaaattcaggaccagcagaagccgagcaaaggagaaaacaaaaaaaaattctcagaaatactcccacggcaggaagggccgatcaggtcacggattctcgcgcgcggcgagcggccggatcgcggcggaaaccgcgggggaattcggcgaacgcgagggagaaggggggaggagaggagtaggagacgtgtagggcaggatgaggtaattttggctcctgac

SEQ ID NO: 101094 - DNA, 629 bp, Oryza sativa
  Clone ID: PAT_MRT4530_98748C.1
ggctgcaggaattcggcacgaggggggaagggatcccgaagacgaagataggagcgtggaatgttggaggtgaggaaatattgcaaaattagcatgcaaaaaacatcttaatggactgaataatatgcacataaataaaccgatgaaaaaaactcacatgatcttgttaacgatgttggtgtgatgcccccaatattgttatccatatcttaatttagtgttgagccagctgaacaatcccaacagcatgcttcacatcgagagttaaaacttgttcctgtaaatcagaagaaaaattcaaaagtaaactaatgagagtgaaaataaattattctgaacttaactctgaaaacagcttagaaaagctgatgatattcgcaacatcatgttccttttgaataaaaagtatgaactccaagcagctattatatctgtttattccatcgattaaagatactttccattaggaaaaagatatattagctgcacatttcgtagaacacatgaatgcttgcaggtatatattacgctgcacactttccgtagaactcatgaatggcttggaggtactctccatgcattggttatgtatatgtgtgtttctggtgataacctaaattagttacaga

SEQ ID NO: 101095 - DNA, 2722 bp, Oryza sativa
  Clone ID: PAT_MRT4530_98749C.1
ttttttttttttttttttctttcaacaaattatctcacttcattcaacaaattgtcattgtgtttgcaaactataatgtacacgagaaagacttcaagctgctagagcacttacaaatgctacgaaaatcctacaatcttgactcatcctagcaaaagaacgttcatttcagactcaatgttacaaacccgcaactgtatacaacatagacttccagctagttcacttacaaatgctacgaaaatcctagattgagcattcgagttcctgctgttagctgcccataaatgataaaaacaaaatgaggggggtttcttttcttcgctcggtttcatggttctaaaactcttcatcgaacgcaaactcatcgtcgtcaggcaacattgctgtcaagagcgagtacttcacccgcagcgagatcttgcccctctcgagctgcagcttcgcacctgagaccacccaataacctggcagatcctgcggtccacgcatcatctctgttggatccacaaacttgagaagttttggggtctgcactggaacagggggtccaccagggtacactgccgagttgatgttcacatcagcagggcgaggcgcgggcttttgagctgctgtggagaaatgtgtgctgatgagtgttgagatgaggcccgatttctgagccaggtttggagatccttcccactcagggttcctgacggaagtggcgttgcagaccttggagaaatggaggcgaaggaacagtattttcttgaagccatggctaaccacttctaattgtgcccccgtgacaatggaggagtcatctgattcaactggtgcagtgcagacatgggagaaacgcttccatgagccaattggttcgtagtacttgcggtcatatgcttctggagtttggtcattgtaaggatcatcttcaagctgaagaatctgaggaagagagcagagatgctggagatggatagctagtttgttgctcctttttccttcaagaaacagccggattcctgtaacaggtcttttgcccacatcaaccatgttggtacaaacataaagctttggaccaattaaattaactggtaaagatacagtgctttgtcttttcctctgaggaccaagagggaggtcactgtaaacaggagcccactgccttggaagctggaactccaaaaattggtgcagctcttcaatttgaggcttatctgcacggtacttacacatgtcacacagttgcttgtgttgtttcaggcctaatgccatctttttcctagctagaatgattgtctgtatgccatgatacgacagtgacccataacatcgaaggtacagattaattgcatggtttaaaaatccacagccaggaactccattcaacagtgaagtaataggtatgaaggacattgagataacatcaggttctgcctgaacagtattcagccactcgctgtgagaaaggatatctttatcccttccacctctccgcttaggcatcatcaccaaatcctcctttgaagagtaagaattcaatggactggagtccacaaatctcagccgatgctctcttgtgtcaatcttatcctttccataggaatccttgaaactgaagtcagattgcccgtttgcatcaagaaatcttcggtctgacatctccttcaatcgtttttgaacatcaacagcttgcaaagttgatgaatgctgttgttttaaataaattatatccttgcctcccatttttataccaacaactacatgagtaccaaactttctaataaaccttgctaatgcagcaggttcccatgttgatggaacagcctgcttaacatgatcccggagtacaatctgtgcctttgagagtgcaacagtgtacagtgtgatacaccaaccatcaaaggcaagtgacttggtattagcagcatctttctgccagcagccagtaaattcaaacatagtattgaataaaccagatggaattttcccagacaaagataattcctggttgaattgctccgacatctgctgaaatgacaggacatcggaccggaaccgcgtccgctcccctttgtcacacttaatcgacttggacacgcctgcaactgtcagtccaccagggagcacaatatcctgaacctcgtcatggtcaagctcaatgagcaacgggtcaggcgaactgcgctgcttgcaatacttgagacgtatatcatgagcaatgtcgtaaccaagaccaatggactgtatagcagactccgcagcactttgcagcattgctctgtatgccatctctcttcatgcctcgttgggatatccgatccctccctccctcatcaaaccaaaacaccagcggggacagctaatatcgagacactctgaactgaagtataaccaaatcataggcccgaccagatcaaattccctacagatctccacgattttttttgacaagctacgaattccaccaaaccgggtaaagaaattaaaaaaacgagctcctaaattcagaaccagcagaagccgagcaaaggagaaaacaaaaaaaaaaattctcagaaatactcccacggcaggaagggccgatcaggtcacggattctcgcgcgcggcgagcggccggatcccggcggaaaccgcgggggaattcggcgaacgcgagggagaaggggggaggagaggagtaggagacgtgtagtggcaggatgaggtaattttggctcctgaccctcgtg

SEQ ID NO: 101096 - DNA, 404 bp, Oryza sativa
  Clone ID: PAT_MRT4530_9874C.1
gccatacagcgtcaggatgatcgcgcagacaggtcgtcagcgtgccaggccattagccagtgtttcaggcgagttgtgcagcagcgtacagctacaacaggtttgctggcgttctgacttcgatcaggctgcaagctgcaagcccaaggctgatgttgggccctgaaactgtgccgtcaatgatgcgggtgatgctgacccaagctacaacactgctgccctggtgagcattgcctgacccgtcgggtggtatgctggtgattggaattgtgagcagtgatagtagtacaggagagaaaaataaagtcatgcatcatcgtgtgtgacaagttgaaacatcggggtgatacaatctgaataaaaatgtcatgcaaatttaaacataaaaaaaaaaaaaaaaaaaa

SEQ ID NO: 101097 - DNA, 191 bp, Oryza sativa
  Clone ID: PAT_MRT4530_98750C.1
ctcttttagttgcggcggcggcgccgtcctcctgggctttcccactcgcccgcctcgtctcccgccgtggcctcgccggcaccgcaagacggcatgaggctgcacgggtcaacatttgacaagaaccgatcaacccatttaactggcatgctgaaccgagggccctaccgcgctctcccacttgtggaggc

SEQ ID NO: 101098 - DNA, 670 bp, Oryza sativa
  Clone ID: PAT_MRT4530_98751C.1
cgctccaaaaaagaacatcaagattatctgtgatatattagcagatgaactttacatctttacaacattcacaattaggaattgcacaatgtactatattcagagcagcctgtgcccatgtgtgtgtgtttttgagtggctacgctgaagactccccctccccctcaccctcaccctcctcttccttccagacagggaggatcccttggccagccagcctcttgtaaacccagaacaccacatacttggcgtttgctctcttctcgtcgatcaggaacggctcgatggtgctcacttctgtgctatacgatgacagcgcgaagcccttcggtcctgtgaggtctccatttggaaagaaggcccagaagtaataaggcacttcatcctttatgaaggaaccctccaacctattatcttcgaaggagagctccacttgggacacgtcgtcctcagcctccagagctgccttcagcggggggatgatctcctcctgcatcatctccggcagcggcttcaccggaggcttcttcggcttcgcggccggcttcgctgcgggcttcgcctccgcggtggcttccttcttggcatcggccgcatccttcttctcactgacatttctgtttgctgatgctcctgctgctgcttgcttggttctttcggacggcgtggg

SEQ ID NO: 101099 - DNA, 247 bp, Oryza sativa
  Clone ID: PAT_MRT4530_98752C.1
tgtactctctgagctctatctatctactagatagattaggtcgctcgagggtaaatagagctttgagcgcggctttgaggggaggacatcggcatgaggatccagtgcgacacgtgcgaggccgcggcggtcacagtggtgtgcttagcagacgaagcggtgctgcgcgcgcgctgcgacataaagatccacgcggccgacaagcttgctaggaagcaccagctcctaccgttggacgccacactgc

SEQ ID NO: 101100 - DNA, 323 bp, Oryza sativa
  Clone ID: PAT_MRT4530_98753C.1
acttgtcatccgaccgaccgtgcgagagaggggaagtctcgtggcgactgtaccggtaccctagcttgcgcgcgtggtacatggggatggcggaggctaggtccagggagcacggcgggggcggtggaggaggcagtggcagcgcggggaagatcttcgtcagtggactgccccgtgacaccacggaagcggattttgtagaagcatttctggccagattggagaaatagttgattcagctataatgatgtataagcacacatttcacccgaggagctctggctttattacatattctgacgctgccgttgtggatagagtga

SEQ ID NO: 101101 - DNA, 801 bp, Oryza sativa
  Clone ID: PAT_MRT4530_98754C.1
tgtctacgcgggcacacgacgatccttgcgggctggactgtatacctctgaagcgccgccgcagtcgtgttgcctcctgatcatccgccgccagatcgccgtctttgctgtcctcttaggtgcagccgctgcgcacacccacggtacctttgccgccaggagatcgccctcatgtcacctcactgccgggtcaccagatcatctacgcaccgtcttgacataccggttcggcgttgactctgcacacgcttgaggtctaccacgacaactctttcaagttaatttcaacagagtaaaacggaaggagtgatggattctctacgccttgcaaagttgcaagtgcaatatgaaatgctggggatacgacatttcagattcatgcttcaagtgatcaccatatgctgataagctgagagtatgctcaaatgctcagccagaccttctcttagaggtttcacttgatgaggaatgagtttatagatgtgtagagaatctgaaaaagatatttgggaagagatggtaggtgcatttcagacaatggcaaggagccaaggaggttcagaggttgcttaacttgatgaacctattggaaagggtgacaaagatttcgacaggtttttacttgttttgagcttaatccatatgggaactgttacagtaaactgaaattcacatttgtaattcacatgtaaaccattgacatgacagtgaaaccactggccattttgctggtatagtgatattagggccatacatgaattatagttcagtctttttttataaactttggtgatgaagttc

SEQ ID NO: 101102 - DNA, 560 bp, Oryza sativa
  Clone ID: PAT_MRT4530_98755C.1
aattaaaaaacacgacagataaaggagctgcaaactgcatatagtctggggcttttgtagagaaattgccaaagttatgtcattacactgagaatgatatgtatacaccgagaattccctatttgtctagacgatacaccatttattgaggtaatattattgtataccaagaataacataactcttcaatgatattttcaaatcttcttgttatgagagttcaatagcacatgatagattgggtctcggtacgacacttggaaaagttgtatgacaatgtagccacatgtcgtgatgcttccaaagcatattaacaagcatatccagatggcagtagatatccagtttgactccttgtgagcaacccataccgatattgcgaagacatttatatagaagtcaattaaggttgccgccatccacggggtcaacaagtccttcctgaaaggtagtccatcagtgatgacagtataaattacgactgcagccatcattgcccccaaaatgctgaaaataattctcccaattatgacaaaagaggactttctttcggatagatc

SEQ ID NO: 101103 - DNA, 489 bp, Oryza sativa
  Clone ID: PAT_MRT4530_98756C.1
cccacgcgtccggtagcaataaaacgtgcgcagcagggatctcttcagggttcgaaggagttcttcacagagatagaattgctgtccaggctgcatcaccggaaccttgtttcattgcttggttattgtgatgaagaagatgagcagatgctggtatatgagtttatgcctaatggtactctacgtgatcatctttcagctcgatcaaaagagcccctaaattttcccacgaggttacgaattgcgctggggtcgtcgcgaggcatcctctatttacacacagaagcagaccctccaatatttcaccgtgacatcaaagcaagcaatattttactggactcaaagtttgtcgcaaaagttgctgattttggtctctctcggcttgccccagagccagaatcagaggggattgctcctggtcatgtgtcaactgttataaagggtaccccgggttatcttgatccggagtatttccttactcataagctg

SEQ ID NO: 101104 - DNA, 579 bp, Oryza sativa
  Clone ID: PAT_MRT4530_98757C.1
tcagtaaattccttgtgttagagcctcattctccaaaagagaaacttgaggaatgtcagtaaatttactctcatcaaactgaagaggagaatcatctggaggaccaaaaagacccttataataagtggtaatatgcgatttcaaattttcatcaccatttattaattggtcaccatcttgtagttcaaaaattctagttttcctatgttttccatttgcaaccaagtgaaaatactttgtattagaatcaccctctagaatatccttagatttggccctcagataccatttgatttcctcctctctcataattgaagataatctattcctataaaaccatctaatatccaattcctcctgactcaaaagaatatcctctttgtctcccatgtttcttttgatttcttgatccaccataaaccacgagtatgcagtttcccctttcctcctcagatttcttccattttggcatgctagaatgattgatagtttggggctcttttgctttgctccttgttctattttcatcttctttgcttgggtgtccttgtccacaatgttcagcgaccatcccaccat

SEQ ID NO: 101105 - DNA, 533 bp, Oryza sativa
  Clone ID: PAT_MRT4530_98758C.1
ttggaaatagaagtcttatattggatttccagaacaattctctaaccaatctatcaaatcctctttcaccacctgccaatgttaccatcctgttatctggaaaccccatctgcacatctccaaatcaactgaacattactcagtactgtcaatcagtgccagttattgtgcctgacggttctgcaagtaatgccacagtttgtccgccatgctctactgaccttccgtttgaaaacatactgatgtcaccaatacgatgtatatgtgctattccactttatgttgattaccggctaaagagtcctggattttgggattttgttccatatgaaggacagtttcaacagtacttgtcatctggactttcattgtcttcttaccaattagaagtttctcaatttatgtgggaagaaggcccacgggtgaagatgaatctgaaactgtttccaaataacactgcttattttaataagagcgaggtgttcagactgagaggaatgttcacaggctggctgattccagactctgatata

SEQ ID NO: 101106 - DNA, 3297 bp, Oryza sativa
  Clone ID: PAT_MRT4530_98759C.1
gcccccggctcctccccccggggcctggggtatgcgggcagtgccttcctcctccggtgctggcccgcttgtcctccccttccgccctcttctgctgtctcgccgcctcatgcggcagtctcgactcttctatctttgctccattatcttcatgttctacttggtgcaaagaacagaagcacagatcactgcaccttgggaagttgatgctctgaaagctatcaaaggcaatctgatagatccgcaaggacgtctaaacaactggaaccgtggagatccgtgcatgggaaattggtcttatgttcactgttacaatgaaacagcaagtgatggatatctccatgtattagaattgcaacttctaaaattgaatttatctggatctttagctgctgagcttggtcggctatctcacatgcaaataatggattttatgtggaataacatcagtggcagcatacctaaggaggttggcaacatcacttctctgaaattactgctcttaaatggaaaccagcttactggttctctaccagaggagattggtttccttcctaatctggataggattcagatcgaccagaactacatatctggacccatacctaaatcatttgctaatctgaacaaaacaaagcactttcatatgaacaacaattcattaagtggtcaaattccacctgaactatccagattaccttcacttgttcacttattgttggataacaataacttgtcgggctatcttcctccagagttatcgaagttaccaaaactacttatcatccagcttgacaacaataatttctcaggaacctcaattccttcatcttatggcaatatcaccacacttctgaaactgagtttgaggaactgcagcttggaaggacctgttcctgatgtcagtggaataccccaacttggctatctagatctttcccacaatcttctaaatggatcaattcctggaagtttctctggccttcccaatctacaaagactgtcattggacaataacaatttggatggttctgttccatcagatgtctggcggaatattgatttcagtggaaatagaagtcttatattggatttccagaacaattctctaaccaatctatcaaatcctctttcaccacctgccaatgttaccatcctaagaaccgagaatggctttctcaagtcttctttcatggaggagaaatgtccatcctgctatgtgagagtcagaaaaagaaggttgatcggtaacctggattttttttgtattgatggtattgtgatgtactctgcaactttgctctttctaaataaactaatggatactttggccaaggttgatatgaaacagaacatgttatctggaaaccccatctgcacatctccaaatcaactgaacattactcagtactgtcaatcagtgccagttattgtgcctgacggttctgcaagtaatgccacagtttgtccgccatgctctactgaccttccgtttgaaaacatactgatgtcaccaatacgatgtatatgtgctattccactttatgttgattaccggctaaagagtcctggattttgggattttgttccatatgaaggacagtttcaacagtacttgtcatctggactttcattgtcttcttaccaattagaagtttctcaatttatgtgggaagaaggcccacgggtgaagatgaatctgaaactgtttccaaataacactgcttattttaataagagcgaggtgttaagactgagaggaatgttcacaggctggctgattccagactctgatatattcgggccctatgagctcctcaacttcaatccagggtggtataacaatttatttccagatcgtgcaaagtccagcctaagtacaggtgccattgttggtattgtcgtggcagcgtttgctgcagcagcatttctttcatccctcattactctcattatactgagaagacgttcaagatattcttcaaaaagacgctctgcaaaaagaattccaatgaagattgatggtgtaaaagacttcagttttcaagaactgtcacatggtacaaacgactttagtgactcagcactaattggtcaaggagggtatgggaaagtgtacagaggtattctctctgatggaacaatagtagcaataaaacgtgcgcagcagggatctcttcagggttcgaaggagttcttcacagagatagaattgctgtccaggctgcatcaccggaaccttgtttcattgcttggttattgtgatgaagaagatgagcaggttgttcctgccgctatcagattttattttggagaacagatgctggtatatgagtttatgcctaatggtactctacgtgatcatctttcagctcgatcaaaagagcccctaaattttcccacgaggttacgaattgcgctggggtcgtcgcgaggcatcctctatttacacacagaagcagaccctccaatatttcaccgtgacatcaaagcaagcaatattttactggactcaaagtttgtcgcaaaagttgctgattttggtctctctcggcttgccccagagccagaatcagaggggattgctcctggtcatgtgtcaactgttataaagggtaccccgggttatcttgatccggagtatttccttactcataagctgacagacaaaagtgacgtgtacagccttggtgttgtttttctggaactgctgacagggatgcaacctatttctcatggaagaaatatagttagagaggttgttgcggccaatcagagtgggatgatattgtcagtggttgacagccggatgggatcgtacccagcagaatgcgtggagaagtttgctgcactggcactgagatgctgccgagacgagacggacgcaaggccgtccatagtggaggtgatgagggagctggagaagatatggcaaatgacaccggacaccgggagcatgtcctcactatccttggaacctagcaacacagccaccccatcgtcgggatccaggatgatggtttcatcgtcatctggggttggaaatgatgatcaccatcactacaacatgtcatcatccgatgtctccggcagtaacctcctcagcggtgttgtacctagcatcaatcctcgctgaacattatttgttatatactccatagtgtaagacacgcatgtatttaaagatttaactttaaaaacatctgactaacaagtagtgtaatgtaaatcgaattttatttgctgaaaataatatcattggattggtatttcaataaaaaaaaaaaaaaaaaaaaa

SEQ ID NO: 101107 - DNA, 271 bp, Oryza sativa
  Clone ID: PAT_MRT4530_9875C.1
ccacacaccgaagcgcccagaaagctagtgaaaaagcaatagagggaaagggacaatcccaccggaccacgaaactggacaacatgacaacacacagaactttggctctgagcacgcgactcaaagaccatgcatcacactatcaccaggacgccaagaacgacgacacggcgtgaataggcatgaccagaccagatgcgctgttaaccatccaaaatccccgataggaagaggaccaaacaaccaccgaaacagccagcagccaccaccc

SEQ ID NO: 101108 - DNA, 165 bp, Oryza sativa
  Clone ID: PAT_MRT4530_98760C.1
atgacggcggtcggcggcggcggccaatctcgccggcacgccgacgtggctgcgtgggagaagggcgaagggcgcgcgggctcgggctcagctgacgcggaaaggagttgcgacgtgcacgcggtgacgcgggacccgatgcgtgcaacgtcggtagggatgtga

SEQ ID NO: 101109 - DNA, 421 bp, Oryza sativa
  Clone ID: PAT_MRT4530_98761C.1
ataaaaaaaaaaaaaaaaattttttttttatttaaaaacccccagggttcaaagggcaaaaaaaaggaacccggggtttatattttcctttcccaaccaaaaattggggaaaattaaaaaaaaaaaccccccaggggggggaaggctatggggggccctaaagaaccagggggaaaaccccttggggggggggggggtaaaaaccaaaaggggtggggctggagccaaattccgggaaagggaaaaaaggccaaaccgggggggggggagtgggggcccttaggccggaaaaaagtaaaagcccgggaaagaaaaatggggcccccccccccggagctggggaaaaaattggttgtttttcagttaaaaacccctttattgcaaaagagggcttgcccaaaggttaaaacgggggccttaa

SEQ ID NO: 101110 - DNA, 738 bp, Oryza sativa
  Clone ID: PAT_MRT4530_98762C.1
gctaaaataacccgactaaaggaatagcttgggcccgtctgattatatactgattccccgactacgagaccgggaatcctcgaaactcagaagtgcctaatcggatctcaagggaatagttgattaattacataaacatgtaaaggctcacagtgcaaaaaaccatttaactgacaaatcctcacacaaagactcaactcactaatcgtagctccggaaattacaccggacctattggaatgacctccacaacacctaaatacccatcgatccatgcaaagcttccctagcttatgccaatcttgccaaaatttaggcctagctggccatgttgctggacaaccaggccaggccctcgtgcaatccctcacctgctgtatcacaaacgctctggatttaccagtgtcgctggcgaaaggagtgcaatccaagcttatcgcggatctcaggagcttccataacgtatggcatatcttgcgttgtagcatagaccgcaaggcagcatcacgtacctcatcctcgttaagcatcctgtggagctcatccctggctgctacaacacggtccctatcattgctgtcctcaacacagatgacaccctgggtgatctggaaataatgcctccacatacgcctgatcttgtcctgacccctccttgccagaccgcgaagctgaagcctttggactccacggtatcaacattgaattctatcgtggggatgggggtgactatctcat

SEQ ID NO: 101111 - DNA, 1611 bp, Oryza sativa
  Clone ID: PAT_MRT4530_98763C.1
atgtggacccccaaaagaagaaaagctctgagcacagatgggtgcaccaagtccacgtacaccgagtgtcacgggttcacgacccccgctgcagaagaccgggcgctccgtggaacgagtccacgcccgcccagctccttccttctgcgctacggctgtcagagctctactacctccgtgaacctggctcaccgtgaaccagcaacccataccacctcctcggcttctcctctccggcttctcgcttccctttcccacagttcgcttcgccggcctcctccgccgcgcagaatgcgtctcccgctccgccgcgcgctctcccccgcggcagttcggcgcgccttctccacggccgccgcctcgcgccctcagtgggcgatgatccgccaggcgccgccggtcagatctccgtcgccgcacgcgtccctcctgctcgccgagcccccgcgcgactcctacctcctcgtgccggaccacctcatcgaccggcgtccgggccccgaccccagcagcgacatccgggggatcctaggcggcacggtccacgccacgagcggcgacggcggcctcctcctcgtcgtctacatggactcccacgccccggcccccatcatctccaagatcgtcaccggcgcctttcctgctcggcctcgggtcagcgatctcgccggcctcgacttgagcgacccagacttcatccgtttcgtctgcaaccccatcaccggcgagctgttccgcctcccggacatcgacggcaccaagaagaccatgttccgcggctgcgacaacgccggcctcctcacccgctccgcagccggagccgggcacggctcgcctgacagctacgccgtcgccgtgctcggcgaggaccgcaacggcgggaccttcaacatgcggcggttcctctcgcgaaccgggaagtgggagaagctagtgggcttaccatccccgctcccgctcacgcggcggatggacatgtacaccgaggcggtggcgttcgccggacggctatggtgggccgacctgacttggggcgtcgtctccgccgacccgttcagcgactggccggagctccacttcgtcgagctcccgaggaacagtgtgtggccagtgcccagcacagatcttgtacaagagcaggctatgcaccggcgtctgggaatcagcgaggggaggctgcgctacgtcgaggtgtcccaggaggatcctttcgtggtcagctcatttgcccttgacgacgacggcagcggctggacgctggagcacgaggtggcgcttggtcgaatctgccaggtgaagggaggaggcccgagggacaccgcgcggattgccgtcattgacccactgaacgcaagcgtcatgtatctgatcgttggcaaacatgttcttggtgttgatatggacatggggaaggtgatgggttgttcactggcagatgaaactgaaggccctccatatgctatcacctctgtccttaaaccatgtgtgctcccaccatggctttcatcaagcaaaatccctgctgcaggaactttttcacgcgacaatggtgacgccaaaagcaagactttatcagacatattggttcgtgcagacagcgacaagaggtga

SEQ ID NO: 101112 - DNA, 522 bp, Oryza sativa
  Clone ID: PAT_MRT4530_98764C.1
tgttcctccctcttgtctcgccctctccctctcgggccgccttgaccgcgacagccgccgcctccgtcttcccctcgcgccgccaccgcctccacctccggcgccgccgccgtcgccgtggcgtagccgtcttcgagcgcctccacctccttctcccccctcgcgtgggcaggctacctcgggagctgggggagaggggactggagcgagaacagcagcaacgaggagaaccggaggaagagggggcaagcccggtggctgaccaaggcgagctcgtcgtcgtcggcgtcggtgccttcctcctccacgtcgtgggcgagcggctcgacggtgatggactgggtgagctctgaggaggccgagctgcaacgcggccgtggcttctccttcctcgtctacgcctggaaatgctagcaattgggcgccatcaggaacttgctttcatcacataagggaactgctacatttgcttatgtggggttactttagcaacataagttacttcaattctctttacaagag

SEQ ID NO: 101113 - DNA, 4548 bp, Oryza sativa
  Clone ID: PAT_MRT4530_98765C.1
atggcgacagctacagcgcgcggaatgaggaggcctccggcactatcgtcgtggtcgtggccgctccaccctagccctcccgtcgctgccagacctcgcctgccaccgtcatcgctgacatgtgggatagagagagaagagagggtgggagtgcggccggcgacggtggaggtgcgttggcgcgacgtgtgcgtggaggcggaatgccaggtggtctccggcaagccgctcccgacgctctggaacgccgcgctctccagattctcgctgctcgcggccaagctgggcttcagccatcaccagtccaaggtccagatcctcgaaaatgtcagcggaatcatcaagccttccaggattactcttctgcttggacccccggggtgcggcaaaaccacactcttgaaagcacttgctggaaggctcaataaaagcctcaaggaaacaggagaaattgagtacaatggtgtgaagctagatgagttcgttccagcaaagacatcagcttatgtaagtcagtatgaccttcacgttgctgatatgactgtgagggagacgctcgacttctcagcaagatttcaaggcgttggcagcagagcagaaatcatgaaggcagtgattaaaagggagaaggaggctgggattacccctgatcctgacatagatgcatatatgaagatcatgggacttgacaaatgtgctgatgtaaaagtgggaaatgccatgagaagaggtatttcaggtggtgagatgaagagacttaccacagaaggacataacactaggttttacagtcctaatgtttcacaaaacaccaatctcaaggaaatcccagctgaactggcaaaatggtcactaaataactcaaagcactaccttgtgctcttcgggcttcagccctctacaatgtcctgcaggattgtcactacagttggacccaacttctcaactcagctggatttccttatgggggagatgatagtcggaccatgtaaggtgctcttaatggatgaaatatcaactgggttggatagctccacaaccttccaaattgtttcttgcctccaacagttggcacacatctcagagtataccatactggtttcactccttcaaccagcaccagagacatacgatctttttgatgatattatcataatgggagaaggaaaagttgtatatcatggaccaaagaatctcataatgaccttctttgagtcatgtgggttcaaatgcccagaaagaaaaggacctgctgactttcttcaagaggtgttgtcaaaaaaagatcaacagcagtactggagtcgaagtgaacaatggtacaatttcattactgtcgaccagttctgtgataaattcaaagcatctcaagttggtcagagtctagctgaggacctttcaaagctatatgagaaatcaaaagcaaacaagaatgccttgtcctgcagtatttattcattgtccaagtggcatctcctcaaggcatgttttgatagagagcttcttctcatgaaaaggaatgctttcctccacataacaaaagctgttcagcttggacttcttgcaattattactgggacagtgtttttccgtacacacaagaattttgatatagttagtgccaactattacatgggttcactcttctatgcactcatcctgctgatggtcaatggaatccctgagctggtcatgtcaattagcagacttccagttttttacaaacacagagatcactacttatatcctggatgggcttatgcaataccagcttttatcctaaagattccagcctctttagttgcggcattatcttggacatcaatatcttattacctcattggatatactccagaagcccccagatatttccgtcagcttctcgtcctcttcctcgtccacacaggagcattgtcattgtatcgatgtgttggttcatactgccaaacaatagcggttggtccaattgctgccacaatgtcacttctagtcatccttctgtttggcggtttcctcattcctcggccatctatgcctaattggctaaaatgggggttttggctctctccattgtcatatgctgagataggcctaactggaaatgagtttttggcaccaagatggctaaagatcacaatatctggtgtaacaattggaaggaggatactgatagatcgagggctagacttctctgtctacttttattggatctcagttgctgcattgattgggtttattttgttatacaatatcggttttgccattggtttgactataaaacaatctccaggggcttctcaagctattatttctaatgataagataaggatatgtcatggaagagaccaagaaaagtcaaaggacatcaagattgggacgaggaggatggcattacctttcacaccccttactatatcatttcaagatgtgaactactatgtagacactcctccggaaatgaggaagaaaggttacatgggaagaaaactacaactgctccggaacatcacaggggcattccagcctgggatcctgtctgcactaatgggtgttactggagcagggaaaacaaccctcctcgatgttcttgctggaaggaaaactgggggtgttattgaaggagacataagaataggtggttatcctaaagttcaacaaacattttctaggatatcaggctactgtgaacagaatgatgttcactccccacaaatcacagtgggggagtctgtagcatattcggcctggctacgccttccagcagaaattgacacaaaaactagaaaagaatttgttgacgaagttcttgaaataattgagttagacgaaattagagatgctttggttggaacacctggggtaaatggtctatctagagagcaacgaaaacggctcacaatcgcagttgaactcgtgtctaacccttcaattgtattcatggatgaaccaacatcaggcttggatgcaagagcagctgctattgccatgcgtgcagtgaagaatgtggcagaaacaggtcgaactgttgtgtgcacaattcatcaaccaagtatcgaaatatttgaagcatttgatgagttaatgctgatcaaaaggggtggagagttgatttatgccgggccacttggacaacattcgtgcaaggtcattcaatattttcagtcaataccaggagtacccaagatcaaggacaactacaatccatcaacatggatgctagaagttacttccacatccatggaagctcaacttggagtagattttgcacaaatttacacgggatcatcaattcgcaaggacaaggatgagctgataaagggcttcagcatgccaccaccaggtacgagcgatctccatttcccaacacggtttccgcagaagtttctggagcagttcaaagcttgcctctggaagcagttcctgtcgcattggagaactccttcatataacctggtgcgaattgtgttcatggcattctctagcattatcttcggtgtgctatactggcagcaaggcaacatcaggcacataaatgaccaacaaggtcctgttcactattttgggatgcatgtatggcatcaccatcttcactggtattaacaacagccaatcagcgatgccatttgtcgccgttgaacgctctgtcatgtacagggaaaggtttgctggaatgtactctccttgggcctactcctttgcacaggttgctatggagattccctatgttttgatgctggcattgttgttcatgttgatcgcatacccgacaatagggtatgcctggacagcagcgaagttctgctggttcttttacaccatgttctgcacgctgctctacttcgtctactttggaatgctgatagtatcaatcacccccaacctccaagtggcctcaatatatgcatcctcgttctacatgacacagcatctcctttctggcttcgtcatgcctccttcacaaataccaaaatggtggatctggctgtactacatctccccgatgtcgtggacgctgaatctcctcttcaccacacagttcggattcgaggacaacagcaacatccttgtctttggagagactaaaccgatcgcagccttcgtaagagactattttggtttccaccgcgagctgctaccactttctgccataatattggcagcataccctgtcctcttcgccatcctgtacgggtacagcatctcaaggtttaacttccaaaagagatagacagatcaggggtgtaaataggaaaatttgaacaggataataactgaaccacatgtccattaccatataagttgagccggattcgaatacgaaccggatatctgttgaatgtggatatggatacagattcagattagatattggtctgtttcaatcagattcggttatccactaattgcaatgatgacaaaaatttaatagtccaagagacttatatactattgtattaaatttaagtgagaagaaatgtaatggcagtcttgtttggttacagcaatatgaaggctgaacttccaaaagtaaaaacatactatcatggc

SEQ ID NO: 101114 - DNA, 121 bp, Oryza sativa
  Clone ID: PAT_MRT4530_98766C.1
tgagtcgagccgccacgcacctgctgtctcgtccgcgctcgtcagctagctgcatccgcgccagcggcattcatggatgtaaccgccagacttcccagtctaccagctcctctactcgctc

SEQ ID NO: 101115 - DNA, 386 bp, Oryza sativa
  unsure (1)..(386): unsure at all n locations
  Clone ID: PAT_MRT4530_98767C.1
taatnactttttgggggttttttttttttttttttttttttttttttttttttttttttttttaaaggggaaacacaacaaaaagggggaattttcaaaaaaaatacaaaccccttctcatggggaaagggaaaaggcaacccgaaaaaaaaaaatccccaccccccttttaaaaaagaaaagaagcccccaatccttttggggcccgggggccaagggcccctttatcaaccccgggaaggagggacccaggccccccccagttttgggcgggtactaaaaaaccccaccctttgccagggttttggaaagggaaaaggggacccccccctaaattttcctggggggctccttaattgacccggtttttttgggggggggccccc

SEQ ID NO: 101116 - DNA, 1190 bp, Oryza sativa
  Clone ID: PAT_MRT4530_98768C.1
ttcctcttcttcttctgcccgcggcttcttcttcttctgccacttggttgctatatacaccaagctcgatcacgaaactatcttagctgctgctgctgctgctgcgttggagaagaagagagtggcagggtgaggatggccggggtgcaggtgatgccggcggtgggggcggtggcgacggcggaagggagctgcagggcggcggggcagaggaggggccgcggcgtgagcagcttgttcgccggagactggaggcggcggcctcgccgggcggcgtgcacggccagggtcaggggcaggaggcagcagcagcagcagcagggcctcgccgtcgtctgcaacctcggtggcacctacgatgaaggtttcgaggacatccacgtgcaactgattaatgtgttcacctacaaagccgtcaagaccgtgctcacgcagctctacgaaatgaacccaccaagctaccgatggttatacaacttcgttgctgtaaacaagcctaccgatggcaaagtgttccttcgtgctcttggaaaggagaagcaggagcttgcagagcgagtgatgataactaggcttcacttgtacagcaaatggatcaagaaatgtgaccatgcgatgatgtacgagaggatatctgacgagaacctggcgttgatgcgagagcggctcatggagacggtcatctggccaacagacgacaccaacactgagaagattggctgaaaaataatgcctgatctgtctgcctgacgcatacacttctttttgagttgctcaacttaattaaactttagctcgttaggtagagcattctaaattattcctgctcgatcgagtccgatgtatatgtatgtatattaagtgtacaattaatgtaccaagccagtgtaatgggtacaaattcaagatgcattcagggttaagtatagattaagatctagctgatagcgtgtggtttagtttggtcatttggtgagtgaagtgaagaagctgcaaactgtttggtccatttcatcgacagtgtacaagtacaacgtagcaactaatacttgtaatttgggtcaagttcgtcgacacagtttatttcatgagttacaactcttgctgttggttctagacagcgatctggtaaagtttaaaaaaaaaaaaaaaaaaaaaaaaaaaaaagggggggagcctcgtgccgaatt

SEQ ID NO: 101117 - DNA, 414 bp, Oryza sativa
  Clone ID: PAT_MRT4530_98769C.1
atggtggcgccgaggattggtttgccacctagttttggtgcgaagaaaggaaggtgcaaggttgccaatgtcaatgacggcatgagtggccacagatggcataggcaactgacacaggagaaggaagcgattgcggctgaggtggttgtccaacacattagaggtactgtgctggagacttttgtgttgtggcggagtaaaaggtactacattgggtgtgatctaggatatgataacccacgatttcatgatcctgcaaggtggaggcaatataacaacttcttcgctttggcaacgaagattggaaggtacaaagagcttagggaaaaggccatgcctggtcttagatcaatgctggcgacgtcaacgttcgtgggcaattgggcatcatttctatccttggaggcgttataa

SEQ ID NO: 101118 - DNA, 687 bp, Oryza sativa
  Clone ID: PAT_MRT4530_9876C.1
cccccgcgtccgcctacgcgtacgtacacgcgcgaacacttccgttgagaaactcatctgctggatcgagcttctctgttaattaatggcgtcgaaagcctttgcactcgtgctgctggcggcggcgacgctggccatggcggccagcacggcggcggcgcagagctcgccgcaggacttcgtcgacgcccacaacgacgcccgccgcggcgagggcgtcggcctccccgacgtggtgtggaacacgacgctgcaggcgttcgcggagagctacgtggcggtgctcgccgccacctgcagcctcgaccactcgaacagcgtgcagctgggctacggcgagaacctgtacatgggcggcgccggcagcgcgtcgacggcggcggacgcggtcggcttgtggatggaggagaaggcggactacgtgtacagcagcaacacgtgcacgaggggggcgctgctcgactgcggccactacacgcaggtggtgtggcggagcacgacgtcgatcggctgcgcgcgcgccgcctgcagcaacggcggcggtgtcatcatcagctgcaactatttcccgcccggcaacttccccgatcagcgcccttactagtacactatacttactactacatgaatgtacgcatcagatatatatttatatgaataaattaatcacgttcatgtatgtataac

SEQ ID NO: 101119 - DNA, 652 bp, Oryza sativa
  Clone ID: PAT_MRT4530_98770C.1
agtagtatatactcattccaaaaaaaaatcagtatatactcattccgagaaaaatcagtgcaaacgggagggaggtccgcctgcatcacaactactgcgaaaatcatcgattttcgcagtcggggcaacggcctgcctgcgaaaatgcaaaaaaacgaaaaaaaaaatcgccgcacgccttgccaccgccgccctcccccggccggatctgagaggggaggggagccgctgccgccgccgctccataccgtcgtcgccccgcgcgtcgtcttcaccgccgccccgcgccttcgtcgccgccgccacccccgccggcctcccccctccctcctccggccagatctgtgagggaggaagggaggggagacgccgccggccgccccgcgccggggagggaggggggaggggagccgccgccgtcgcccccgccggcctccccctccctcctccggccagatctgagagggagggggcaggggagtcgctgccgccgcccggaccgcaccgccgccgctccacgccatctgggagggaggggggaggggagccgccgccgccgctcggacttcggccgcgcctcctcgccgctgccgccctccaccgccgccgtcgggagccaccgccggggagagtagaagtgaggggaggggag

SEQ ID NO: 101120 - DNA, 574 bp, Oryza sativa
  unsure (1)..(574): unsure at all n locations
  Clone ID: PAT_MRT4530_98771C.1
cgaggtgatctttcaaaggctcaccgcacgtgtattagtgtttggtttcgtactagaggttcaaacaagtgtgaaatctgccagcaggttgctgtcaatattccccctccagagacgcaagctagtacaagttattgggtttggagggttgattcagcttatggaaggggccgaggaggacatgaaagggtatttttgtaactggagacagataaaaaaaagaaacagatgcatatgaattaactatctgactgcactgatgcagaaagaaggatggtttagccctctgtgggttgcatttgcaattcttattggcggactcttgttggatgttctgatatctgtttctcttggcgtctccgcacttcctgtgaacataataattggtgttcttatagttctcggcctcggcaccgccctgcggctagctctagagtgctgccaggaatggggctccaggagaagcatgccgaggctgccgatggacggcagcatggcgcccagtggataccaccctggtgtataatagtgagaactaggcgtgtaaatagccataggacacgaaacanactct

SEQ ID NO: 101121 - DNA, 352 bp, Oryza sativa
  Clone ID: PAT_MRT4530_98772C.1
aaaacatggtaattttttttgttttatctgacttttttaaggtattgctgaattgttcaccttatatgaccttccattgagcgactttaatatacttttttgaggcggaagcgtgtggcgcacaaaaaacagaccaggggggggggctatgaaaaacgcctctagcatccacagatgcttatgggggacaactgacagctcaggaggaaaaagggaacctggttgacatcggcaaaaaaaggcagggcacctttagggggcatgggacgagatggactctggggcgttcatcccaccgagaaaggcaatgaagacccatagggtgagaacaccaaagaaggcagcccttaag

SEQ ID NO: 101122 - DNA, 868 bp, Oryza sativa
  Clone ID: PAT_MRT4530_98773C.1
ttgtcatcctctctctttcttctcatccccctctttctcccttctctctttatttctctttctctccccttccaccgtccgcggggagcacgggttgaagcggcgacggggcgggggctggagtggtggtgaccggtgggagctgaagcggcggtggcggtagcgggctagagctaacgcgggtggaggcggtaggagaaggaggcggcggcgatcggctcccgacgacgccgaaccaggtcaccttcttctgcgcctcgcccaacgtcttcaggaactcctcacgccaccggaagccgcactcccccatgatggcgcgcaacgtcaggttgtgccggcggtggcggcgatggcgctgacgaggctaccccccccccccccggtggcgtcgatggagttcctcactgtacgcccagccatggaggtgggagcccccgggctaggcgccaggaggaggccgagctccatcctcgactttggccatgatggtgtacacatcttcttgcttgcttgtcttctcctgtgatgctacattggtgtgtttgttgtgctgctgctcgactctgccggctccgctccatacacctttgccggagcattgtgtgggttggtcgggctgggttcatggactgcatcctcggggaccgccaccatcaggcatgcggatacggtgaggttgaggtctatcacgatggggaagctggctcccgcccgctgctgccacgtcggccatcgcccgccgccgctctgactcccgcttgccgtcaccgcccctgcccgcagattgcgctatgagagacaaggtgaagagaaacggggagataaagagagagaagggagagagagagagagggagggggaagaagag

SEQ ID NO: 101123 - DNA, 325 bp, Oryza sativa
  Clone ID: PAT_MRT4530_98774C.1
atgcagctcaacccgaaagcaagaactcgtcgaaacaaaactaaatcaaaagggtggtgatgtgccgaaattgtattgaacgtaactctatccatgtacggcaaccaccttgaagcacctcaatcgaacccgacatcacacattaagttgtattgtcgggatcggctacgtctgcttacctagcccgactcagactcagccgatcttatcgtagccgatctggactccagccgattcctgccttgttttcgaactcaatctccgcctccgactttgcttcgatctaatcttctttcccaatgccgatgttaccaaatttggttgt

SEQ ID NO: 101124 - DNA, 354 bp, Oryza sativa
  Clone ID: PAT_MRT4530_98775C.1
atggccgaggacgtcgaggcgggcggtgttgtgcgcctggtcgcggcggagcgggcggcggaagaccgcggcggggtggccgcggagggagcagcggaacgacaaggaagaactcgccgcggcggcggcggcgaggcggtaggaggaggagaagttggcggtggcggcggcgagctcgtggaaggcgcgcgagaaggagaaggcatcgggatcggcgacagcggggaggcgcgcgaggaagtgagcgtagatggcggcggcggtggaggaattggaaggcggcgatcaccagaagagcagcggcgaggcgggagcaagctggggagaagaacagcggcggccgggggagagtag

SEQ ID NO: 101125 - DNA, 339 bp, Oryza sativa
  Clone ID: PAT_MRT4530_98776C.1
atggagttgaggaaacagatgcggcgtactcacattgtcattgacacggtcacaccggttgatgagaagaaggaaaaggaggagaaggaaaagaaggagaaagaggagaaggagaagaaagagaaagaggagaaggagaagaagaagaaggaagaagagcaaaacaatcccaagattgtttgcggctcccgctgccctgcttcatctgcttctcgaccttccttcactgctagcgtgcacaacacggtgtcctctccgccgccatcggcgtgcatgacgaccccgccttgccactacggcacaacatggtgtcctctccgccgccatcagcgtgcatga

SEQ ID NO: 101126 - DNA, 5106 bp, Oryza sativa
  Clone ID: PAT_MRT4530_98777C.1
atggccaagacatccacagcagcaggaggtaatgaaacaactcaagaagaaagaattgctggtgcggtggtggaagaaacagggaaaacacccatgagtgatgtagagctggctgaattggtccaagcgcaaggggctgtcatggtgagtaaaggacaatatgaggaattgcaaaaagagttacaaagattgcaaaccctacacaatcagacagtaggagcaggaggatcaagtgatcagtgtgcaataccaggggctagggaaaagcaatcagatcaggcaaaaggagatgcccagggggagaacaaagaaggagaaagtaccaaagccacccaagctcaagatctaccacgaacccaagctcccagtcaagtacaaaacccatctcaggctcaaattcccattcttacccagaatacacctcaagctcaaattaccattcctactcagaacctagctcgaaccttgatccctagccaaaaccaaattcccattcaaacgcacatttctttccagccgcatattccaattcaaactcaaattcctaaccaagtacaatatcctcaaacacaattacatcaaacccacccagttcttcccaatcaaatccaaatcccccaacctcatatcctacaaagtaatatcccacgaacacaactcccacaaaatgatataccacaaatacaagttccacaaacccaaataccacagattcaaacatctttgcccaacttcacacatacgcaatcaacaaacactcaagcagctcaaaaccatcaccaagtcccccaaggtttttcccctttccatatgcaacaaccagagatgatgcttgaacaagggtacatcccacaaatggccaaccatatacaatatgcaggtcaaataccgaaccaggcctttcaattccagcccacacaaccctattttcaaccgaccagagcaatagatacaaagaatcccttaagtcaaaacctgcaaatggcaccttggccaataaacttcaagttgtccaacatcacaaagtacaaaggagacacagatcccaatgaatacctcagagtatatgagacagcagttgaagcagcaggtggagatgataccacgaaagctaagatactcccaacaatgctagaaggagtacattatcatggattcattggggcgtatgaagaaccaaaagaggcagatgacttgtatgccatgaagcagcttccaggggaaacattgagaagtttcatcgtgaagttttcaagggtaagatgtcagatcaggcatgtagatgacgaaatgctcatagcggcagcaaaaagggcattgctacccggtcctcttcgtttcgatcttgctagaaatagaccaaagacagcaaaagacttgtttgaaagaatggaaagttttgcaagaggagaagaagatgagttgagagtgcaagaggaagaagccgtctataccggaaagccctggaaaaggttcaagtatgactataaacaagatcagaagaaacaggtaaattttatcggagatggatccaacaatgaaagagaaaaaggaaaacatcaatgggacaacactcgcagagggagaaacaattgggggcaatctggaaaaggtcgaggacaatggtggaattcaggcagaggaggtcattccacagaagaatgcaggcaaatgactcacttgttggaaaaacacgtaaatcgatatgagaacaagtatgaaggagctcgtgatcaacgaggacaaaacgccatagaagcaccgcaagttatgaagatagaggcaattgaagaagtgccaaagagagtgataaatgccataactgggggctcttcgttaggaattgagtcaaaaaggcaaagaaaagcatatgtcagacagggagaatacataaaaatacaaaagccaattcctgaagggaaaacaaagaaagtacagttggatgaacatgaccctggaaagttcattctgataggagaaaacttggaaaaacatgttgaggaagaaatcttaaaggtagtgaaagaaaacatggctgtatttgcatggtcaccagatgagttgcagggagttgatagaagtctaattgagcacaacctagcgattaagtcacgatacacgcccaaaaaacataaattgagaagaatgtctatagacagacaacaagctgcaaaaattgaacttgaaaagttgttgaaggcgaaagtcataagagaagtgatgcacccagaatggctggcaaatccagtgttagtaaagaaggcaaatggcaagtggagaatgtgcattgactttacagacctcaacaaggcatgcccaaaagatgattttcctttgccacggatagatcagttggtagatgccacagctggatgcgaactaatgagtttcttagacgcatactctggctatcaccaagtttttatggtgaaggaggatgaggaaaagacatcatttataacaccatttggaacttattgttttatcagaatgccatttggtttgaagaatgcaggagcgacttttgccaggctgataggaaaagtcttggctaagcagttaggacggaatgtcgaggcatacgtagatgacattgtggtaaagagtaaacaagcatttacccatggcaaagatttgcaagaaacatttgaaaacctgagaaaatgctcagttaagcttaatccagaaaagtgtgtttttggcgttagagcaggaaagttacttggtttcttggtgtccaaaagaggaatagaggcaaatcctgacaaaatcgcagcaatccatcaaatggagccgccaaaaaacacaagagaagtgcagagattgacaggccgaatggcatctttgagtagatttttatctaaatcagcagaaaagggattacccttcttcaagactttgaggggggcaaacaccttcgagtggactgctgaatgccaacaagctttcgaggacttgaagaaatacttgcatgaaatgccaacattagcaagtccgccaaaaggtcaacctctgttaatgtatgtggcagcaactccagcgacagttagcgcagttttggtacaagaagaagaaaataggcaagtgccggtatactttgtctcagaagcattacaaggaccaacaacacgatactcagaagtagaaaagttgatttatgcaattgtgatggcttcaagaaagttgaggcattattttctgtcgcatgacataacaataccatcggcatacccgataggagaagtgttaacaaacaaggaagtcgcggggagaatagcaaaatgggcaatggaactcttaccttttgacctgaaatacatatcaagaacagccataaagtcacaagtactagcagattttgtggcagaatggactcccaatgaggtagaacaacaggaagaagtcgaaaaaccatggatagtattctctgatggagcatgcaatgccgccggagcaggagccgctgcagttgtgaaaacaccaatgaagcaaacgttgaagtattctgttcaattagcttttccttcaacaaacaacacagcagagtatgaaggcgttttattggctatgagaaaggcaagagcgctaggggctcggcggttaatagtcaaaactgactcaaagttggtagcaggtcacttttccaaatcctttgaagcaaaggaggaaactatggctaaatatctggaagaagcaaggctgaatgagaaacatttcttgggaataacggtaaaagccataacaagggaagaaaatggagaagctgatgagctagctaaggcagccgcaacaggtcaaccattggaaaattcatttttcgatataatcacccagccaagttacgaaaagaaagaagtagcatgcatacagagagaaggagattggagagaaccgatcttgaaataccttgccagtgcacaacttccagaaaaggaagaagaagcaaagagaatacaactaacatccaaaaaatacaaggtggtagagggacagttgtataaaagtggagttactgctcctttgttaaagtgtgtaacaagggaagaaggcatgaagatggtggtagaaatacatgaaggcttgtgtggagctcatcaagcaccacggtcagtggcttcaaaagtcataagacaaggaatctattggccaacaattatgaaagatacagagaaatacatcaagacgtgcaaagcatgtcagaagttcggcccaatgacaaaagcaccacccaaagaactgcaaccaattccgccagtctggcctttttacagatggggaatagatatagtaggtcctcttccaagagcgaagggagatttgcgctttatcattgttgcaattgaatacttttcaagatggattgaggcagaagcagtggcaagaataacttctgcagcactacaaaagtttgtttggaagaacataatatgtcgatttggaatcccaagggaaatagtatgtgacaatggaaagcaattcgaatctggaaaatttcaagacatgtgtaaaggccttaatttgcaaatcaactttgcctctataggccatcctcagacaaatggagctgtggaaagggcaaatggtaaaatcatggaagctatcaagaagaggttagaaggatcagcaaaaggaaaatggccggaggatttgctatcagtgctttgggcactaagaactacggtagtaaggtcgactggcatgacccctttcagattggtttatggcgatgaagcaatgactccaagcgaagtaggggcacattctccaagaatgatatttgaccaaaaagatgaagaaggaagagacataactcttgaaatgctagatgaaataagggttgaagctttggagaagatggcatcatacacagaaggaacaaagagctattacaaccaaaaagtaaagacaaggccgattgaagaaggagatttagtcttgaagaaagtgctcaatgaggtagctgttggaaaactcgagtcaaagtgggaaggaccattcatagtcaaaaagaagacagaaacgggagcattcaagttagcatatcttgatggtgatgagttaaagcatacttggaatgctatttctttaaagaaattttatgcctaa

SEQ ID NO: 101127 - DNA, 118 bp, Oryza sativa
  Clone ID: PAT_MRT4530_98778C.1
ttttggcctagcttccccggtgaagatgcaggagaacgtcgtcaatgctggtgcggcgctggaagcaaacgattgtttactccccggagattgtggtactgtattacactacctctaa

SEQ ID NO: 101128 - DNA, 5676 bp, Oryza sativa
  Clone ID: PAT_MRT4530_98779C.1
atggccaagacatccacagcagcaggaggtaatgaaacaactcaagaagaaggaattgctggcgcggtggtggaagaaacagggaaaacacccatgagtgatgtagagcttgctgaattggtccaagcgcaaggggctgtcatggtgagtaaaggacaatatgaggaattgcaaaaagagttacaaagattgcaaaccctacacaatcagacagtaggagcaggagggtcaagtgaccagtgtgcaataccaggggctagggaaaagcaatcagatcaggcaaaaggagatgcccagggggagaacaaagaaggagaaagtatcaaagccacccaagctcaagatctaccacgaacccaagctcccagtcaattcttcccaatcaaatccaaatcccccaacctcatatcctacaaagtaatatcccacgaacacctacaaaatgatacaccacaaatacaagttccacaaacccaaataccacagattcaaacatctttgcccaacttcacacatacgcaatcaacaagcactcaagcagctcaaaaccatcaccaagtcccccaaggttttccccttttccatatgcaacaaccagagatgatgtttgaacaagggtacatcccacaaatggccaaccatatacaatatgcaggtcaaataccgaaccaagcctttcaattccagcccacacaaccctattttcaaccaaccagagcaatagatacaaagaatcccttaagtcaaaacctgcaaatggcaccttggccaataaacttcaagttgtccaacatcacaaagtacaaaggagacacagatcccaatgaatacctcagagtatatgagacagcagttgaagcagcaggtggagatgataccacgaaagctaagatactcccaacaatgctagaaggagtagcattatcatggtacactaccattccaccaatgacaatctattcatgggaacatatgagagacacctttcgggcaggattcattggggcgtatgaagaaccaaaagaggcagatgacttgtatgccatgaagcagcttccaggggaaacattgagaagtttcatcgtgaagttttcaagggtaagatgtcagatcaggcatgtagatgatgaaatgctcatagcggcagcaaaaagggcattgctacccggtcctcttcgttttgatcttgctagaaatagaccaaaaacagcaaaagacttgtttgaaagaatggaaagttttgcaagaggagaagaagatgagttgagagtgcaagaggaagaagccgtcttgttgggaaaaaagcagtcaaagaacaagcaaatttcccaaggggaagaacaaaagggagagaataccggaaagccctggaaaaagttcaagtatgactataaacaagatcagaaaaaacaggtaaattttatcggagatggatccaacaatgaaagagaaaaaggaaaacatcaatgggacaacactcgcagagggagaaacaattgggggcagtctggaaaaggtcgaggacaatggtggaattcaggcagaggtagaggacgatggtggaacaatgaaagaggaaaaggaagagaaaataaacctgaccaaaccaaattttgtcaaacacatggaccgggaggtcattccacagaagaatgttacaaagaatgcaggcaaatgacccacttgttggaaaaacacgtaaatcgatatgagaacaagtatgaaggagctcgtgatcaacgaggacaaaatgccatagaagcaccgcaagttatgaagatagaggcaattgaagaagtgccaaagagagtgataaatgccataactgggggctcttcattgggagttgagtcaaaaaggcaaagaaaagcatatgtcagacaggtaaatcatgtcgggacaagctatcagtcaaaatcaccagtatactcaaaaacggtaatttcctttgggcctgaagatgcagaaggaatacttttccctcatcaagatcctttagtggtctcagtggaaatagcacaatgcgaagtgcaaagggtgttaattgatggaggaagttcagcggatgtgctgttttacgatgctttcaagaaaatgcaaataccagaagataggttaacaaacgcaggagtacctttacaaggttttggtggacaacaagtacatgcaattggaaaaatatctttacaagtggtctttggaaaaggcactaatgtgagaaaagaagagatagtatttgatgtggtcgatatgccatatcagtacaatgcaattcttggaaggtcaacaatcaatatttttgaggccataatacaccacaactacatatgtatgaagctcccaggaccaaggggagtaataacggtccgaggagaacagcttgcagcaagaaagtatgagcttcaaggaacaccaagtgtgaaaggagtacatgtggttgaccaaaaacagggagaatacataaaaatacaaaagccaattcctgaagggaaaacaaagaaagtacagttggatgaacatgaccctggaaagttcattctgataggagaaaacttggaaaaacatattgaggaagaaatcttaaaggtagtaaaagaaaacatggctgtatttgcatggtcaccagatgagttgcagggagttgatagaagtctaattgagcacaacctagcgattaagtcaggatacaagcccaaaaaacaaaaattgagaagaatgtctacagacagacaacaagctgcaaaaattgaacttgaaaagttgttgaaggcgaaagtcataagagaagtgatgcacccagaatggctggcaaatccagttgttagtaaagaggcaaatggcaagtggagaatgtgcattgactttacagacctcaacaaggcatgcccaaaagatgattttcctttgccacggatagaccagttggtagatgccacagctggatgcgaactaatgagtttcttggacgcatactctggctatcaccaagtttttatggtaaaggaggatgaggaaaagacatcatttataacaccttttggaacttattgttttatcagaatgccatttggtttgaagaatgcaggagcgacttttgccaggctcataggaaaagtcttggctaagcagttaggacggaatgtcgaggcatacgtagatgacattgtggtaaagagtaaacaagcatttacccatggcaaagatctgcaagaaacatttgaaaacctgagaaaatgctcagttaagcttaatccagaaaagtgtgtttttggcgttagagcaggaaagttacttggtttcttggtgtccaaaagaggaatagaggcaaatcctgacaaaatcgcagcaatccatcaaatggagccgccaagaaacacaagagaagtgcagaggttgacaggccgaatggcatctttgagtagatttctatctaaatcagcagaaaagggattacccttcttcaagactttgaggggggcaaacactttcgagtggactgctgaatgccaacaagctttcgatgacttgaagaaatacttgcatgaaatgccaacattagcaagtccaccaaaaggtcaacctctgttaatgtatgtggcagcaactccagcgacagttagcgcagttttggtacaagaagaagaaaataggcaagtgccggtatactttgtctcagaagcattacaaggaccaaaaacacgatactcagaagtagaaaagttgatttatgcaattgtgatggcttcaagaaagttgaggcattattttctatcgcatgacgtaacaataccatcggcatacccgataggagaagtgttaacaaacaaggaagtcgcggggagaatagcaaaatgggcaatggaactcttaccttttgacctgaaatacatatcaagaacagccataaagtcacaagtactagcagattttgtggcagaatggactcccaatgaggtagaacaacaggaagaagtcgaaaaaccatggatagcattctccgatggagcatgcaatgccgccggagcaggagccgctgcagttgtgaaaacaccaatgaagcaaacgttgaagtattctgttcaattagcttttccttcaacaaacaacacagcagagtatgaaggcgttttgttggctatgagaaaggcaagagcgctaggggctcggcggttaatagtcaaaactgactcaaagttggtagcaggtcacttttccaaatcctttgaagcaaaggaggaaactatggctaaatatctggaagaagcaaggctgaatgagaaacatttcttgggaataacggtaaaagccataacaagggaagaaaatggagaagctgatgagctagctaaggcagccgcaacaggtcaaccattggaaaattcatttttcgatataatcacccagccaagttacgaaaagaaagaagtagcatgcatacagagagaaggagattggagagaaccgatcttgaaataccttgtcagtgcacaacttccagaaaaggaagaagaagcaaagagaatacaactaacgtccaagaaatacaaagtggtagagggacagttgtataaaagtggagttactgctcctttgttaaagtgtgtaacaagggaagagggcatgaagatggtggtagaaatacatgaaggcttgtgtggagctcatcaagcaccacggtcagtggcttcaaaagtcataagacaaggaatctattggccaacaattatgaaagatacagagaagtacatcaagacgtgcaaagcatgccagaagttcggtccaatgacaaaagcaccacccaaagaactgcaaccaattccgccagtctggcctttttacagatggggaatagatatagtaggtcctcttccaagagcgaagggagatctgcgctttgtcattgttgcaattgaatacttttcaagatggattgaggcagaagcagtggcaagaataacttctgcagcagtacaaaagtttgtttggaagaacataatatgtcgatttggaatcccaaaggaaatagtatgtgacaatggaaagcaattcgaatctggaaaatttcaagacatgtgtaaaggccttaatttgcaaatcaactttgcctctgtaggccatcctcagacaaatggagctgtggaaagggcaaatggtaaaatcacggaagctatcaagaagaggttagaaggatcagcaaaagggaaatggccggaggacttgctatcagtgctttgggcactaagaaccacggtagtaaggtcgactggcatgaccccttttagattggtttatggcgatgaagcaatgactccaagcgaagtaggggcacattctccaagaatgatatttgaccaaaaagatgaagaaggaagagagataactcttgaaatgctagatgaaataagggtcgaagctttggagaagatggcatcatacacagaaggaacaaagagctattacaaccaaaaagtaaagacaaggccgattgaagaaggagatttagtcttgaagaaagtgctcaatgaggtagctgttggaaaactcgagtcaaagtgggaaggaccattcatagtcaaaaagaagacagaaacgggagcattcaagttagcatatcttgatggtgaagagttaaagcatacttggaatgctatttctttgaagaaattttatgcctaa

SEQ ID NO: 101129 - DNA, 546 bp, Oryza sativa
  unsure (1)..(546): unsure at all n locations
  Clone ID: PAT_MRT4530_9877C.1
tttttttttttttttttttttttaactaaaattagcatcactttactcaactgaactgaagatgcgattcgcgatacaaacagtacagaatacagagcttattttgcattctgcaacacattctcagtccagataagttctatcacatctcaacgactaatgtgaaactaacaaaatttgccagacgaaaaatgtggactaaaagtacattggtgtcacgagtgtaccagcacgcaagacaaacgcttcgaccattcgggtatatatacatgtacacgcgctggttatagccgtcgtactgatagtcaaggaacgagttagcctattgcacatgaaaatctttgtacattgttcatacacatgtgatggtccaagtgattgcttgtttgaaatctgcttgaactgtatccagaagtggcactgaaaaagagacaccactggctgattgctcggtagcacactaattaacactnttggcctctgaccatcaaaattgctaaggggaaaccaccattttgcccttctcaaaggaacatatgatactat

SEQ ID NO: 101130 - DNA, 5394 bp, Oryza sativa
  unsure (1)..(5394): unsure at all n locations
  Clone ID: PAT_MRT4530_98780C.1
atggccaagacatccacagcagcaggaggtaatgaaacaactcaagaagaaagaattgctggtgcggtggtggaagaaacagggaaaacacccatgagtgatgtagagcttgctgaattggtccaagcgcaaggggctgtcatggtgagtaaaggacaatatgaggaattgcaaaaagagttacaaagattgcaaaccctacacaatcagacagtaggagcaggagggtcaagtgatcagtgtgcaataccaggggctagggaaaagcaatcagatcaggcaaaaggagatgcccagggggagaacaaagaaggagaaagtatcaaagccacccaagctcaagatctaccacgaacccaagctcccagtcaagtacaaaacccatctcaggctcaaattcccattcttacccagaatacacctcaagctcaaattaccattcctactcagaacctagctcaaaccttgatccctagccaaaaccaaattcctattcaaacgcacatttctttccagccgcatattccaattcaaactcaaaatcctaaccaagtacaatatcctcaaacacaattacatcaagcccacccagttcttcccaatcaaatccaaatcccccaacctcatatcctacaaagtaatatcccacgaacacaacccccacaaaatgatacaccacaaatacaagttccacaaacccaaataccacagattcaaacatctttgcccaacttcacacatacgcaatcaacaaacactcaagcagctcaaaaccatcaccaagtcccccaaggtttttcccttttccatatgcaacaaccagagatgatgtttgaacaagggtacatcccacaaatggccaaccatatacaatatgcaggtcaaataccgaaccaagcctttcaattccagcccacacaaccctattttcaaccaaccagagcaatagatacaaagaatcccttaagtcaaaacctgcctatggcaccttggccaataaacttcaagttgtccaacatcacaaagtacaaaggagacacagatcccaatgaatacctcagagtatatgagacagcagttgaagcagcaggtggagatgataccacgaaagctaagatactcccaacaatgctagaaggagtagcattatcatggtacactaccattccaccaatgacaatctattcatggnaacatatgagagacacctttcgagcagaatccattggggcgtatgaagaaccaaaaaaggcagatgacttgtatgccatgaagcagcttccaggggaaacattgagaagtttcatcgtaagttttcaaggaaatagaccaaagacagcaaaagacttgtttgaaagaatggaaagttttgcaagaggagaagaagatgagttgagagtgcaagaggaagaagccgtcttgttgggaaaaaagcagtcaaagaacaagcaaatttcccaaggggaagaacaaaagggagagaataccggaaagccctggaaaaagttcaagtatgactataaacaagatcagaaaaaacaggtaaattttatcggagatggatacaacaatgaaagagaaaaaggaaaacatcaatgggacaacactcgcagagggagaaacaattgggggcaatctggaaaaggtcgaggacaatggtggaattcaggcagaggtagaggacgatggtggaacaatgaaagaggaaaaggaagagaaaataaacctgaccaaaccaaattttgtcaaacacatggaccgggaggtcattccacagaagaatgttacagtaagttttgtcatatacatggtccgggaggccattccacagaagaatgcaggcaaatgactcacttgttggaaaaacacgtaaatcgatatgaggacaagtatgaaggagctcgtgatcaacgaggacaaaatgccatagaagcaccgcaagttatgaagatagaggcaattgaagaagtgccaaagagagtgataaatgccataactgggggctcttcattgggagttgagtcaaaaaggcaaagaaaagcatatgtcagacaggtaaatcatgttgggacaagctatcagtcaaatccaccagtatactcaaaaacagtaatttcctttgggcctgaagatgcagaaggaatacttttccctcatcaagatcctttagtggtctcagtggaaatagcacaatgcgaagtgcaaagagtgttaatcgatggaggaagttcagcggatgtgctgttttacgatgctttcaagaaaatgcaaataccagaagataggttaacaaacgcaggagtacctttacaaggttttggtggacaacaagtacatgcaattggaaaaatatctttacaagtggtctttggaaaaggcactaatgtgagaaaagaagagatagtatttgatgtggtcgatatgccatatcagtacaatgcaattcttggaaggtcaacaatcaatatttttgaggccataatacaccacaactacatatgtatgaagctcccaggaccaaggggagtaataacggtccgaggagaacagcttgcagcaagaaagtatgagcttcaaggaacaccaagtgtgaaaggagtacatgtggttgaccaaaaacagggagaatacataaaaatacaaaagccaattcctgaagggaaaacaaagaaagtacagttggatgaacatgaccctggaaagttcattctgataggagaaaacttggaaaaacatattgaggaagaaatcttaaaggtagtaaaagaaaacatggctgtatttgcatggtcaccagatgagttgcagggagttgatagaagtctaattgagcacaacctagcgattaagtcaggatacaagcccaaaaaacaaaaattgagaagaatgtctacagacagacaacaagctgcaaaaattgaacttgaaaagttgttgaaggcgaaagtcataagagaagtgatgcacccagaatggctggcaaatccagtgttagtaaagaaggcaaatggcaagtggagaatgtgcattgactttacagacctcaacaaggcatgcccaaaagatgattttcctttgccacggatagaccagttggtagatgccacagctggatgcgaactaatgagtttcttagacgcatactctgggctaccaccaagttttatgaatgcaggagcgacttttgctaggctcataggaaaagtcttggctaagcagttaggacggaatgtcgaggcatacgtagatgacattgtgaggcaaatccctgacaaaatcgcagcaatccatcaaatggagccgccaagaaacacaagagaagtgcagaggttgacaggccgaatggcatctttgagtagatttctatctaaatcagcagaaaagggattacccttcttcaagactttgaggggggcaaacaccttcgagtggactgctgaatgccaacaagctttcgatgacttgaagaaatacttgcatgaaatgccaacattagcaagtccgccaaaaggtcaacctctgttaatgtatgtggcagcaactccagcgacagttagcgcagttttggtacaagaagaagaaaataggcaagtgccggtatactttgtctcagaagcattacaaggaccaaaaacacgatactcagaagtagaaaagttgatttatgcaattgtgatggcttcaagaaagttgaggcattattttctgtcgcatgacataacaataccatcggcatacccgataggagaagtgttaacaaacaaggaagtcgcggggagaatagcaaaatgggcaatggaactcttaccttttgacctgaaatacatatcaagaacagccataaagtcacaagtactagcagattttgtggcagaatggactcccaatgaggtagaacaacaggaagaagtcgaaaaaccatggatagtattctccgatggagcatgcaatgccgccggagcaggagccgctgcagttgtgaaaacaccaatgaagcaaacgttgaagtattctgttcaattagcttttccttcaacaaacaacacagcagagtatgaaggcgttttgttggctatgagaaaggcaagagcgctaagggctcggcggttaatagtcaaaactgactcaaagttggtaggaggtcacttttccaaatcctttgaagtaaaggaggaaactatggctaaatatctggaagaagcaaggttgaatgagaaacatttcttgggaataacggtaaaagccataacaagggaagaaaatggagaagctgatgagctagctaaggcagccgcaacaggtcaaccattggaaaattcatttttcgatataatcacccagccaagttacgaaaagaaagaagtagcatgcatacagagagaaggagattggagagaaccgatcttgaaataccttgtcagtgcacaacttccagaaaaggaagaagaagcaaagagaatacaactgacgtccaagaaatacaaagtggtagagggacagttgtataaaagtggagttactgctcctttgttaaagtgtgtaacaagggaagaaggcatgaagatggtggtagaaatacatgaaggcttgtgtggagctcatcaagcaccacggtcagtggcttcaaaagtcataagacaaggaatctattggccaacaattatgaaagatacagagaagtacatcaagacgtgcaaagcatgtcagaagttcggtccaatgacaaaagcaccacccaaagaactgcaaccaattccgctagtctggcctttttacagatggggaatagatatagtaggtcctcttccaagagcgaagggagatctgcgctttgtcattgttgcaattgaatacttttcaagatggattgaggcagaagcagtggcaagaataacttctgcagcagtacaaaagtttgtttggaagaacgtaatatgtcgatttggaatcccaaaggaaatagtatgtgacaatggaaagcaattcgaatctggaaaatttcaagacatgtgtaaaggccttaatttgcaaatcaactttgcctctgtaggccatcctcagacaaatggagctgtggaaagggcaaatggtaaaatcatggaagctatcaagaagaggttagaaggatcagcaaaaggaaaatggccggaggacttgctatcagtgctttgggcactaagaaccacggtagtaaggtcgactggcatgacccctttcagattggtttatggcgatgaagcaatgactccaagcaaagtaggggcacattctccaagaatgatatttgaccaaaaagatgaagaaggaagagagataactcttgaaatgctagatgaaataagggttgaagctttagagaagatggcatcatacatagaaggaacaaagagctag

SEQ ID NO: 101131 - DNA, 2103 bp, Oryza sativa
  Clone ID: PAT_MRT4530_98781C.1
ggcacgtgggagtgagtgttcttgtctcgagttttttttttttttttttttttgacctactgggataaaacgatttctatagcattagcaagctcattgctacaaattattaacagtaagatctcaaaatatagaacataagggagtaaacaaaactgaacaaccaaacaactacagtactgtacatgcctggtatcctacatgaggcgactgatctaggagaatgctgataagcatagatactgggcaagggaagggagcctgggcagtcagactcgcgggaagcgagaaggtcctctcctccgaaggaactcaggaatctcaatcatgctgccttctgcagaggatgggcgtcgaccattgtctccttgcgtttgttggccaccctttgtggtgcgaccttctggttcatcttgacgtttgaagccagtggcaatcaaggttatgctcacttggccattgagtgatgggtctatgacagcaccaaatatcagattagcatttggatcaacaaggtcatagatgatctcagcagcagaattcacctcaaacaaagtcatatcagctcccccagtgatattccacacaatgcctgtagctctttcaattccaatgtctagcagtggtgactgaatggcattaagagcagcatctcttgctcttgacttccctgtagccgttccaatacccatcaaggatgagcctgcattttgcatgatggctcgaacatcagcaaaatcaacattaaccaacccaggaaccgtgataatatcagagataccacgaattccttgtcgaagaatatcatcagccaagttgaatgcttcggttactggagtatttggagaaacagcagacaacagcttgtcatttgggatgacaatgagggtgtccacactatttctcaaggctgctattccttcttgagcctgaactgcccgtctcctcccttcaaatgagaatggtgtcgtcacgatgccaactgtcagtatacccatggacttggcaattccagcgattacaggggcacctccagttccagtgcctccacccatcccagccgtgacaaaaaccatatcagcaccgtaaagagcttcctgaatggactcgacactttctttcgccgcattcatcccaatgtcagggtttccacctgcgcctagaccccgagtcagctcctgcccaatctgcaacctgttctgcggaaggaccggcgacatccttatcgcctgcacatcggtattcacaatccagaactcgacgccgttcatggagctctcaatcatcctgttgacggcattggagcctcctccgccgaccccgactaccttgatcttggccccgtcgtaatcgcagtgatccggcggcgcgcccagcccctccagcgggctcccgttcggagaccccttcctcgtggcgacgacggccgcctcgtcgccgccgcggaggagggtcacctcagggtggaggtccaggaaggagtctttcttctggaacgagcgaggcctcgcggcccccgcacagcacctgaaccgtgaacgtgccagggttcttgcctccgccgccgccttcccgggacacgggggagcgaggcgagtgcagcacggtagctgcggcgccgccatcatctccggtgaagcctagcaatctgtggaggaggatgcaggggcggaccaaacgcggggcattggggatcggagtgtatcccttccctgcaaaacctcaacaactcagctccggcggcgtgtccggccggcgggggagccgagggctgaggagaaagaagggaacgcacggccggtgaccaccgctcgccgccgccaacagtagcaggccaagaaacaacaaaatcaccaaaaaaaaaaaaggagaacaaatcaagaatgaagaatcaacaaggtgacaagaatgcgtcggaggttggagaaaggcggcggggcgcgcgcgggggtgggaggaaatgtcggcgaggaggacgcccgtcggcgcggggtttggggataacgaaggaggctaccgctgcgctactaccagcctactactaccaatctggcacgcacaacacaacgcacgggaggaaggtggctgtgggcagcagaggca

SEQ ID NO: 101132 - DNA, 6006 bp, Oryza sativa
  Clone ID: PAT_MRT4530_98782C.1
atggcagtggaagaaagtgacttggcaagagcaacagaaacacttgataagcagtgggcagagatggccaagacatccacagcagcaggaggtaatgaaacaactcaagaagaaagaattgctgatgcggtggtggaagaaacagggaaaacacccatgagtgatgtagagcttgctgaattggtccaagcgcaaggggctgtcatggtgagtaaaggacaatatgaggaattgcaaaaagagttacaaagattgcaaaccctacacaatcagacagtaggagcaggagggtcaagtgatcagtgtgcaataccaggggctagggaaaagcaatcagatcaggcaaaaggagatgcccagggggagaacaacgaaggagaaagtatcaaagccacccaagctcaagatctaccacgaacccaagctcccagtcaagtacaaaacccatctcaggctcaaattcccattcttacccagaatacacctcaagctcaaattaccattcctactcagaacctagctcaaaccttgatccctagccaaaaccaaattcccattcaaacgcacatttctttccagccgcatattccaattcaaactcaaattcctaaccaagtacaatatcctcaaacacaattacatcaagcccacccagttcttcccaatcaaatccaaatcccccaacctcatatcctacaaagcaatatcccacgaacacaacccccacaaaatgatacaccacaaatacaagttccacaaacccaaataccacagattcaaacatctttgcccaacttcacacatacgcaatcaacaaacactcaagcagctcaaaaccatcaccaagtcccccaaggtttttcccctttccatatgcaacaaccagagatgatgtttgaacaagggtacatcccacaaatggccaaccatatacaatatgcaggtcagataccgaaccaagcctttcaattccagcccacacaaccctattttcaaccaaccagagcaatagatacaaagaatcccttaagtcaaaacctgcaaatggcaccttggccaataaacttcaagttgtccaacatcacaaagtacaaaggagacacagatcccaatgaatacctcagagtatatgagacagcagttgaagcagcagggggagatgataccacgaaagctaagatactcccaacaatgctagaaggagtagcattatcatggtacactaccattccaccaatgacaatctattcatgggaacatatgagagacacctttcgagcaggattcattggggcgtatgaagaaccaaaagaggcagatgacttgtatgccatgaagcagcttccaggggaaacattgagaagtttcatcgtgaagttttcaagggtaagatgtcagatcaggcatgtagatgatgaaatgctcatagcggcagcaaaaagggcattgctacccggtcctcttcgttttgatcttgctagaaatagaccaaagacagcaaaagacttgtttgaaagaatggaaagttttgcaagaggagaagaagatgagttgagagtgcaagaggaagaagccgtcttgttgggaaaaaagcagtcaaagaacaagcaaatttcccaaggggaagaacaaaagggagagaataccggaaagccctggaaaaagttcaagtctgactatagacaagatcagaaaaaacaggtaaattttatcggagatggatccaacaatgaaagagaaaaaggaaaacatcaatgggacaacactcgcagagggagaaacaattgggggcaatctggaaaaggtcgaggacaatggtggaattcaggcagaggtagaggacgatggtggaacaatgaaagaggaaaaggaagagaaaataaacctgaccaaaccaaattttgtcaaacacatggaccgggaggtcattccacagaagaatgttacagtaagttctgtcatatacatggtccgggaggccattccacagaagaatgcaggcaaatgactcacttgttggaaaaacacgtaaatcgatatgagaacaagtatgaaggagctcgtgatcaacgaggacaaaacgccatagaagcaccgcaagttatgaagatagaggcaattgaagaagtgccaaagagagtgataaatgccataactgggggctcttcattgggagttgagtcaaaaaggcaaagaaaagcatatgtcagacaggtaaatcatgtcgggacaagctatcagtcaaatccaccagtatactcaaaaacggtaatttcctttgggcctgaagatgcagaaggaatacttttccctcatcaagatcctttagtggtctcagtggaaatagcacaatgcgaagtgcaaagagtgttaatcgatggaggaagttcagcggatgtgctgttttacgatgctttcaagaaaatgcaaataccagaagataggttaacaaacgcaggagtacctttacaaggttttggtgggcaacaagtacatgcaattggaaaaatatctttacaagtggtctttggaaaaggcactaatgtgagaaaagaagagatagtatttgatgtggtcgatatgccatatcagtacaatgcaattcttggaaggtcaacgatcaatatttttgaggccataatacaccacaactacatatgtatgaagctcccaggaccaaggggagtaataacggtccgaggagaacagcttgcagcaagaaagtatgagcttcaaggaacaccaagtgtgaaaggagtacatgtggttgaccaaaaacagggagaatacataaaaatacaaaagccaattcctgaagggaaaacaaagaaagtacagttggatgaacatgaccctggaaagttcattctgataggagaaaacttggaaaaacatattgaggaagaaatcttaaaggtagtaaaagaaaacatggctgtatttgcatggtcaccagatgagttgcagggagttgatagaagtctaattgagcacaacctagcgattaagtcaggatacaagcccaaaaaacaaaaattgagaagaatgtctacagacagacaacaagctgcaaaaattgaacttgaaaagttgttgaaggcgaaagtcataagagaagtgatgcacccagaatggctggcaaatccagtgttagtaaagaaggcaaatggcaagtggagaatgtgcattgactttacagacctcaacaaggcatgcccaaaagatgattttcctttgccacggatagaccagttggtagatgccacagctggatgcgaactaatgagtttcttagacgcatactctggctaccaccaagtttttatggtgaaggaggatgaggaaaagacatcatttataacaccatttggaacttattgttttatcagaatgccatttggtttgaagaatgcaggagcgacttttgccaggctcataggaaaagtcttggctaagcagttaggacggaatgtcgaggcatacatagatgacattgtggtaaagagtaaacaagcatttacccatggcaaagatttgcaagaaacatttgaaaacctgagaaaatgctcagttaagcttaatccagaaaagtgtgtttttggcgttagagcaggaaagttacttggtttcttggtgtccaaaagaggaatagaggcgaatcctgacaaaatcgcagcaatccatcaaatggagccgccaaaaaacacaagagaagtgcagaggttgacaggccgaatggcatctttgagtagatttctatctaaatcagcagaaaagggattacccttcttcaagactttgaggggggcaaacaccttcgagtggactgctgaatgccaacaagctttcgatgacttgaagaaatacttgcatgaaatgccaacattagcaagtccgccaaaaggtcaacctctgttaatgtatgtggcagcaactccagcgacagttagcgcagttttggtacaagaagaagaaaataggcaagtgccggtatactttgtctcagaagcattacaaggaccaaaaacacgatactcagaagtagaaaagttgatttatgcaattgtgatggcttcaagaaagttgaggcattattttctgtcgcatgacataacaataccatcggcatacccgataggagaagtgttaacaaacaaggaagtcgcggggagaatagcaaaatgggcaatggaactcttaccttttgacctgaaatacatatcaagaacagccataaagtcacaagtactagcagattttgtggcagaatggactcccaatgaggtagaacaacaggaagaagtcgaaaaaccatggatagtattctccgatggagcatgcaatgccgccggagcaggagccgctgcagttgtgaaaacaccaatgaagcaaacgttgaagtattctgttcaattagcttttccttcaacaaacaacacagcagagtatgaaggcgttttgttggctatgagaaaggcaagagcgctaggggctcggcggttaatagtcaaaactgactcaaagttggtagcaggtcacttttccaaatcctttgaagcaaaggaggaaactatggctaaatatctggaagaagcaaggctgaatgagaaacatttcttgggaataacggtaaaagccataacaagggaagaaaatggagaagctgatgagctagctaaggcagccgcaacaggtcaaccattggaaaattcatttttcgatataatcacccagccaagttacgaaaagaaagaagtagcatgcatacagagagaaggagattggagagaaccgatcttgaaataccttgtcagtgcacaacttccagaaaaggaagaagaagcaaagagaatacaactaacgtccaagaaatacaaagtggtagagggacagttgtataaaagtggagttactgctcccttgttaaagtgtgtaacaagggaagaaggcatgaagatggtggtagaaatacatgaaggcttgtgtggagctcatcaagcaccacggtcagtggcttcaaaagtcataagacaaggaatctattggccaacaattatgaaagatacagagaaatacatcaagacgtgcaaagcatgtcagaagttcggcccaatgacaaaagcaccacccaaagaactgcaaccaattccgccagtctggcctttttacagatggggaatagatatagtaggtcctcttccaagagcgaagggagatctgcgctttgtcattgttgcaattgaatacttttcaagatggattgaggcagaagcagtggcaagaataacttctgcagcagtacaaaagtttgtttggaagaacataatatgtcgatttggaatcccaaaggaaatagtatgtgacaatggaaagcaattcgaatctggaaaatttcaagacatgtgtaaaggccttaatttgcaaatcaactttgcctctgtaggccatcctcagacaaatggagctgtggaaagggcaaatggtaaaatcatggaagctatcaagaagaggttagaaggatcagcaaaaggaaaatggccggaggacttgctatcagtgctttgggcactaagaactacggtagtaaggtcgactggcatgacccctttcagattggtttatggcgatgaagcaatgactccaagcgaagtaggggcacattctccaagaatgatatttgaccaaaaagatgaagaaggaagagagataactcttgaaatgctagatgaaataagggttgaagctttggagaagatggcatcatacacagaaggaacaaagagctattacaaccaaaaagtaaagacaaggccgattgaagaaggagatttagtcttgaagaaagtgctcaatgaggtagctgttggaaaactcgagtcaaagtgggaaggaccattcatagtcaaaaagaagacagaaacgggagcattcaagttagcatatcttgatggtgaggagttaaagcatacttggaatgctatttctttaaagaaattttatgcctaa

SEQ ID NO: 101133 - DNA, 3897 bp, Oryza sativa
  Clone ID: PAT_MRT4530_98783C.1
atgactcacttgttggaaaaacacgtaaatcgatatgagaacaagtatgaaggagctcgtgatcaacgaggacaaaacgccatagaagcaccgcaagttatgaagatagaggcaattgaagaagtgccaaagagagtgataaatgccataactgggggctcttcattgggagttgagtcaaaaaggcaaagaaaagcatatgtcagacaggtaaatcgtgtcgggacaagctatcagtcgaatccaccagtatactcaaaaacggtaatttcctttgggcctgaagatgcagaaggaatatttttccctcatcaagatcctttagtggtctcagtggaaatagcacaatgcgaagtgcaaagagtgttaatcgatggaggaagttcagcggatgtgctgttttacgatgctttcaagaaaatacaaataccagaagataggttaacaaacgcaggagtacctttacaaggttttggtggacaacaagtacatgcaattggaaaaatatctttacaagtggtctttggaaaaggcactaatgtgagaaaagaagagatagtatttgatgtggtcgatatgccatatcagtacaatgcaattcttggaaggtcaacaatcaatatttttgaggccataatacaccacaactacatatgtatgaagctcccaggaccaaggggagtaataacggtccgaggagaacagcttgcagcaagaaagtatgagcttcaaggaacaccaagtgtgaaaggagtacatgtggttgaccaaaaacagggagaatacataaaaatacaaaagccaattcctgaagggaaaacaaagaaagtacagttggatgaacatgaccctggaaagttcattctgataggagaaaacttggaaaaacatattgaggaagaaatcttaaaggtagtaaaagaaaacatggctgtatttgcatggtcaccagatgagttgcagggagttgatagaagtctaattgagcacaacctagcgattaagtcaggatacaagcccaaaaaacaaaaattgagaagaatgtctacagatagacaacaagctgcaaaaattgaacttgaaaagttgttgaagacgaaagtcataagagaagtgatgcacccagaatggctggcaaatccagtgttagtaaagaaggcaaatggcaagtggagaatgtgcattgactttacagacctcaacaaggcatgcccaaaagatgattttcctttgccacggatagaccagttggtagatgccacagctagatgcgaactaatgagtttcttagacgcatactctggctatcatcaagtttttatggtgaaggaggatgaggaaaagacatcatttataacaccatttggaacttattgttttatcagaatgccatttggtttgaagaatgcaggagcgacttttgccaggctcataggaaaagtcttggctaagcagttaggacggaatgtcgaggcatacgtagatgacattgtggtaaagagtaaacaagcatttacccatggcaaagatttgcaagaaacatttgaaaacctgagaaaatgctcagttaagcttaatccagaaaagtgtgtttttggcgttagagcaggaaagttacttggtttcttggtgtccaaaagaggaatagaggcaaatcctgacaaaatcgcagcaatccatcaaatggagccgccaaaaaacacaagagaagtgcagaggttgacaggccgaatggcatctttgagtagatttctatctaaatcagcagaaaagggattacccttcttcaagactttgaggggggcaaacaccttcgagtggactgctgaatgccaacaagctttcgatgacttgaagaaatacttgcatgaaatgccaacattagcaagtccgccaaaaggtcaacctcagttaatgtatgtggcagcaactccagcgacagttagcgcagttttggtacaagaagaagaaaataggcaagtgccggtatactttgtctcagaagcattacaaggaccaaaaacacgatactcagaagtagaaaagttgatttatgcaattgtgatggcttcaagaaagttgaggcattattttctgtcgcatgacataacaataccatcggcatacccgataggagaagtgttaacaaacaaggaagtcgcggggagaatagcaaaatgggcaatggaactcttaccttttgacctgaaatacatatcaagaacagccataaagtcacaagtactagcagattttgtggcagaatggactcccaatgagcaaacgttgaagtattctgttcaattagcttttccttccacaaacaacacagcagagtatgaaggcgttttgttggctatgagaaaggcaagagcgctaggggctcggcggttaatagtcaaaactgactcaaagttggtagcaggtcacttttccaaatcttttgaagcaaaggaggaaactatggctaaatatctggaagaagcaaggctgaatgagaaacatttcttgggaataacggtaaaagccataacaaaggaagaaaatggagaagctgatgagctagctaaggcagccgcaacaggtcaaccattggaaaattcatttttcgatataatcacccagccaagttacgaaaagaaagaagtagcatgcatacagagagaaggagattggagagaaccgatcttgaaataccttgtcagtgcacaacttccagaaaaggaagaagaagcaaagagaatacaactaacgtccaagaaatacaaagtggtagagggacagttgtataaaagtggagttactgctcctttgttaaagtgtgtaacaagggaagaaggcatgaagatggtggtagaaatacatgaaggcttgtgtggagctcatcaagcaccacggtcagtggcttcaaaagtcataagacaaggaatctattggccaacaattatgaaagatacagagaaatacataaagacgtgcaaagcatgtcagaagttcggtccaatgacaaaagcaccacccaaagaactgcaaccaattccgctggtttggcctttttacagatggggaatagatatagtaggtcctcttccaagagcgaagggagatctgcgctttgtcgttgttgcaattgaatacttttcaagatggattgaggcagaagcagtggcaagaataacttctgcagcagtacaaaagtttgtttggaagaacataatatgtcgatttggagtcccaaaggaaatagtatgtgacaatggaaagcaattcgaatctggaaaatttcaagacatgtgtaaaggccttaatttgcaaatcaactttgcctctgtaggccatcctcagacaaatggagctgtggaaagggcaaatggtaaaatcatggaagctatcaagaagaggttagaaggatcagcaaaaggaaaatggcctgaggacttgctatcagtgctttgggcactaagaactacggtagtaaggtcgactggcatgacccctttcagattggtttatggcgatgaagcaatgactccaagcgaagtaggggcacattctccaagaatgatatttgaccaaaaagatgaagaaggaagagagataactcttgaaatgctagatgaaataagggttgaagctttggagaagatggcatcatacacagaaggaacaaagagctattacaaccaaaaagtaaagacaaggccgattgaagaaggagatttagtcttgaagaaagtgctcaatgaggtagctgttggaaaactcgagtcaaagtgggaaggaccattcatagtcaaaaagaagacagaaacgggagcattcaagttagcatatcttgatggtgaggagttaaagcatacttggaatgctatttctttaaagaaattttatgcctga

SEQ ID NO: 101134 - DNA, 475 bp, Oryza sativa
  Clone ID: PAT_MRT4530_98784C.1
ctcctggaagacaactatccaccggcgacctagctatccatcgaccggcaacgagcatcaagatgtgatctcggcggccggcgacctcgtccacagcacccctgtgagatcgtactcaaaccttcaggaggagagcaagtctctgtcgctttcttttctctcgtttcaggtgggagatgagcctgtacgcgacgccgccggggttatcgtggctgccatgactatttctgaaccatctccgctgccatcgagactcatccgcccgccgtcatccacattcatcaacatctccatctcatctcagatggactcatccattcatctacaaatcattcaagaagcgacaccaaagaaagtcttaatggccactacaggtaaagctaatttagattggttcctttcttttggttccagtgcctacgtgcatgcatggaggacggccgggtgtgctgccatcgccggagtcgtcgcgtag

SEQ ID NO: 101135 - DNA, 5937 bp, Oryza sativa
  Clone ID: PAT_MRT4530_98785C.1
aaggcagtggaagaaagtgacttggcaagagcaacggaaacacttgataagcagtgggcagagatggccaagacatccacagcagcaggaggtaatgaaacaactcaagaagaaagaattgctggtgcggtggtggaagaaacagggaaaacacccatgagtgatgtagagctggctgaattggtccaagcgcaaggggctgtcatggtgagtaaaggacaatatgaggaattgcaaaaagagttacaaagattgcaaaccctacacaatcagacagtaggagcaggaggatcaagtgatcagtgtgcaataccaggggctagggaaaagcaatcagatcaggcaaaaggagatgcccagggggagaacaaagaaggagaaagtaccaaagccacccaagctcaagatctaccacgaacccaagctcccagtcaagtacaaaacccatctcaggctcaaattcccattcttacccagaatacacctcaagctcaaattaccattcctactcagaacctagctcgaaccttgatccctagccaaaaccaaattcccattcaaacgcacatttctttccagccgcatattccaattcaaactcaaattcctaaccaagtacaatatcctcaaacacaattacatcaaacccacccagttcttcccaatcaaatccaaatcccccaacctcatatcctacaaagtaatatcccacgaacacaactcccacaaaatgatataccacaaatacaagttccacaaacccaaataccacagattcaaacatctttgcccaacttcacacatacgcaatcaacaaacactcaagcagctcaaaaccatcaccaagtcccccaaggtttttcccctttccatatgcaacaaccagagatgatgcttgaacaagggtacatcccacaaatggccaaccatatacaatatgcaggtcaaataccgaaccaggcctttcaattccagcccacacaaccctattttcaaccgaccagagcaatagatacaaagaatcccttaagtcaaaacctgcaaatggcaccttggccaataaacttcaagttgtccaacatcacaaagtacaaaggagacacagatcccaatgaatacctcagagtatatgagacagcagttgaagcagcaggtggagatgataccacgaaagctaagatactcccaacaatgctagaaggagtacattatcatggtacactaccattccaccaatgacaatctattcatgggaacatatgagagacacctttcgagcaggattcattggggcgtatgaagaaccaaaagaggcagatgacttgtatgccatgaagcagcttccaggggaaacattgagaagtttcatcgtgaagttttcaagggtaagatgtcagatcaggcatgtagatgacgaaatgctcatagcggcagcaaaaagggcattgctacccggtcctcttcgtttcgatcttgctagaaatagaccaaagacagcaaaagacttgtttgaaagaatggaaagttttgcaagaggagaagaagatgagttgagagtgcaagaggaagaagccgtctataccggaaagccctggaaaaggttcaagtatgactataaacaagatcagaagaaacaggtaaattttatcggagatggatccaacaatgaaagagaaaaaggaaaacatcaatgggacaacactcgcagagggagaaacaattgggggcaatctggaaaaggtcgaggacaatggtggaattcaggcagaggtagaggacgatggtggaacaatgaaagaggaaaaggaagagaaaataaacctgaccaaaccaaattttgtcaaacacatggaccaggaggtcattccacagaagaatgttacagtaagttttgtcatatacatggtccaggaggtcattccacagaagaatgcaggcaaatgactcacttgttggaaaaacacgtaaatcgatatgagaacaagtatgaaggagctcgtgatcaacgaggacaaaacgccatagaagcaccgcaagttatgaagatagaggcaattgaagaagtgccaaagagagtgataaatgccataactgggggctcttcgttaggaattgagtcaaaaaggcaaagaaaagcatatgtcagacaggtaaatcatgtcgggacaagctatcagtcaaatccaccagtatactcaaaaacggtaatttcctttgggcctgaagatgcagaaggaatacttttccctcatcaagatcctttagtggtctcagtggaaatagcacaatgcgaagtgcaaagagtgttaatcgatggaggaagttcagcggatgtgttgttttatgatgctttcaagaaaatgcaaataccagaagataggttaacaaatgcatgagtacctttacaaggttttggtggacaacaagtacatgcaattggaaaaatatctttacaagtggtctttggaaaaggcactaatgtgagaaaagaagagatagtatttgatgtggtcgatatgccatatcagtacaatgcaattcttggaaggtcaacaatcaatatttttgaggccataatacaccacaactacatatgtatgaagctcccaggaccaaggggagtaataacggtccgaggagaacagcttgcaggaagaaagtatgagctttaaggaacaccaagtgtgaaaggagtacatgtggttgaccaaaaacagggagaatacataaaaatacaaaagccaattcctgaagggaaaacaaagaaagtacagttggatgaacatgaccctggaattcattctgataggagaaaacttggaaaaacatgttgaggaagaaatcttaaaggtagtaaaagaaaacatggctgtatttgcatggtcaccagatgagttgcagggagttgatagaagtctaattgagcacaacctagcgattaagtcaggatacaagcccaaaaaacaaaaattgagaagaatgtctatagacagacaacaagctgcaaaaattgaacttgaaaagttgttgaaggcgaaagtcataagagaagtgatgcacccagaatggctggcaaatccagtgttagtaaagaaggcaaatggcaagtggagaatgtgcattgactttacagacctcaacaaggcatgcccaaaagatgattttcctttgccacggatagatcagttggtagatgccacagctggatgcgaactaatgagtttcttagacgcatactctggctatcaccaagtttttatggtgaaggaggatgaggaaaagacatcatttataacaccatttggaacttattgttttatcagaatgccatttggtttgaagaatgcaggagcgacttttgccaggctgataggaaaagtcttggctaagcagttaggacggaatgtcgaggcatacgtagatgacattgtggtaaagagtaaacaagcatttacccatggcaaagatttgcaagaaacatttgaaaacctgagaaaatgctcagttaagcttaatccagaaaagtgtgtttttggcgttagagcaggaaagttacttggtttcttggtgtccaaaagaggaatagaggcaaatcctgacaaaatcgcagcaatccatcaaatggagccgccaaaaaacacaagagaagtgcagagattgacaggccgaatggcatctttgagtagatttttatctaaatcagcagaaaagggattacccttcttcaagactttgaggggggcaaacaccttcgagtggactgctgaatgccaacaagctttcgaggacttgaagaaatacttgcatgaaatgccaacattagcaagtccgccaaaaggtcaacctctgttaatgtatgtggcagcaactccagcgacagttagcgcagttttggtacaagaagaagaaaataggcaagtgccggtatactttgtctcagaagcattacaaggaccaacaacacgatactcagaagtagaaaagttgatttatgcaattgtgatggcttcaagaaagttgaggcattattttctgtcgcatgacataacaataccatcggcatacccgataggagaagtgttaacaaacaaggaagtcgcggggagaatagcaaaatgggcaatggaactcttaccttttgacctgaaatacatatcaagaacagccataaagtcacaagtactagcagattttgtggcagaatggactcccaatgaggtagaacaacaggaagaagtcgaaaaaccatggatagtattctctgatggagcatgcaatgccgccggagcaggagccgctgcagttgtgaaaacaccaatgaagcaaacgttgaagtattctgttcaattagcttttccttcaacaaacaacacagcagagtatgaaggcgttttattggctatgagaaaggcaagagcgctaggggctcggcggttaatagtcaaaactgactcaaagttggtagcaggtcacttttccaaatcctttgaagcaaaggaggaaactatggctaaatatctggaagaagcaaggctgaatgagaaacatttcttgggaataacggtaaaagccataacaagggaagaaaatggagaagctgatgagctagctaaggcagccgcaacaggtcaaccattggaaaattcatttttcgatataatcacccagccaagttacgaaaagaaagaagtagcatgcatacagagagaaggagattggagagaaccgatcttgaaataccttgccagtgcacaacttccagaaaaggaagaagaagcaaagagaatacaactaacatccaaaaaatacaaggtggtagagggacagttgtataaaagtggagttactgctcctttgttaaagtgtgtaacaagggaagaaggcatgaagatggtggtagaaatacatgaaggcttgtgtggagctcatcaagcaccacggtcagtggcttcaaaagtcataagacaaggaatctattggccaacaattatgaaagatacagagaaatacatcaagacgtgcaaagcatgtcagaagttcggcccaatgacaaaagcaccacccaaagaactgcaaccaattccgccagtctggcctttttacagatggggaatagatatagtaggtcctcttccaagagcgaagggagatttgcgctttatcattgttgcaattgaatacttttcaagatggattgaggcagaagcagtggcaagaataacttctgcagcactacaaaagtttgtttggaagaacataatatgtcgatttggaatcccaagggaaatagtatgtgacaatggaaagcaattcgaatctggaaaatttcaagacatgtgtaaaggccttaatttgcaaatcaactttgcctctgtaggccatcctcagacaaatggagctgtggaaagggcaaatggtaaaatcatggaagctatcaagaagaggttagaaggatcagcaaaaggaaaatggccggaggatttgctatcagtgctttgggcactaagaactacggtagtaaggtcgactggcatgacccctttcagattggtttatggcgatgaagcaatgactccaagcgaagtaggggcacattctccaagaatgatatttgaccaaaaagatgaagaaggaagagacataactcttgaaatgctagatgaaataagggttgaagctttggagaagatggcatcatacacagaaggaacaaagagctattacaaccaaaaagtaaagacaaggccgattgaagaaggagatttagtcttgaagaaagtgctcaatgaggtagctgttggaaaactcgagtcaaagtgggaaggaccattcatagtcaaaaagaagacagaaacgggagcattcaagttagcatatcttgatggtgatgagttaaagcatacttggaatgctatttctttaaagaaattttatgcc

SEQ ID NO: 101136 - DNA, 1402 bp, Oryza sativa
  Clone ID: PAT_MRT4530_98786C.1
ccggccgggcgtagtcgagtctctccccccttcggcgtaaaaaggagaagagaaatcccccgtctcctccgctccttgcgacaagaacagggggagggagaggcgccgatccccatctgctcgagcaaagcagcggaggggaggggatcctgcagatctggaagaagctcatctcttaatttcagagagagcctcaaccttttgatacaagagtaacagtattgggggttcatctgaacccccaaatgtcccaagttggatccgcccctgagacgatggatctggagacggagaatcgtcttgcttctttacttctcgaggaggcgaggaggttgcaggcggaggctgacagggaaggtgttcacgcatatctgcgaaagcccaatgtaaggcaccgtccgaattcgcgcttccttacggccacagttcgtggagttcagcaagcgaaccgtgttgtggaggtcaatgaaatgtggcgtgccagagagaaggaacttgaactggagtctaagatgaaaaggagtagaggtcttggtgacgccagaggtgaaaaacgcaaaagtgacttgagaaaccagagttccagtccaagggttgaagaagaaggcatagcttataacagttcatattcggatcaggaggatggtctaggggacgatgacattgagaagtttcttcattcgagggtgaagcgaggtcgaggggccgttggttctaggatggatgagcctggtccataccttaatgttgcatctcgtagtcaagagaacgaacctaatgctgatactcaggtggaagaaaaatgggaacgaagagtacaaggcccggagaaaccagtgtctttgagatcaagatcacctgatgactattggcgtagggaagcactagatggagaaccttccagccctgaactccacaagaaaaaagagaagaagaaggaaaagagttcagagaaaaaggacaggaaagagagaaggaagaaaaaagacaagaagaaatctaagcatcgccaccaccaccatcacaaaagtcggcaaagggagtgattgttctgcttgctgagcataaaaaatgtacacaagaaacatgttagcttctaattgctactgttacttctcacttgaaacatgttgtaccaaaaacttgatatcgtgtggaatggagaactgttcttctcacacggagtgttgatacaaagccatatgttagattttagtgctctcgttggtcttgtgtatttattatcatgatgactaaatcacaccctcgttaattaggaataacgtggttttggtagctaaatgttacagcttccaatcttatctgcaactattgtatgttgtacaaatcgtacaaatcgatcaaatttgtatgctgtctgtctgtcaggcaaggattcctc

SEQ ID NO: 101137 - DNA, 655 bp, Oryza sativa
  Clone ID: PAT_MRT4530_98787C.1
ttctgtactactattttctctctctacaactcttgtcaatctctctctctagagcttagcttagcttaccctctctcatggctccaactgcagaggttgcggcggcgccggtgcaggagcaggagaaatgcaacggcggcggcggaggcgggtttaggggtgcggcggtgaggtgccacccggcgctgtcgacggagaagaaggcgtcgatcaggggcgtcgtcggggagctgctcggtgctgcggcggcggcggccggcgccggcgaggagaggaggaggagcctcatctcgctcggcgtcggcgacgcgtcctcgcacgcctgcttcaggctcggcggcgagttcgcggccgacgccgtcgccgacgcggccaggtccggggtgttcgactgctacgcgccgtcgtgcggcttcccggccgctcgccgcgccgtcgccgaccacctgtccgccggcgcgcgccaccgcacccgcgacgccgacgtgttcatgacggccggcggcacgggcgcgatcaccgcgatcgcgacggtgctcggcggcgcgccgggggcgaacgtcctgctgccgcggccgggcttcgcgccgtacgaggcggcctgtgagctcgccggcgccgagccgcggttctacgacctcctgccgcggcgggg

SEQ ID NO: 101138 - DNA, 374 bp, Oryza sativa
  Clone ID: PAT_MRT4530_98788C.1
tttccccctccagggttggattgaccgtattgcatacattgaatgatggactgctatacttgtacatattcatacaccaagaacatagtttatattgcagctgctgccatacccatctggtacctgttggagatgatggtcctcaagatccttgaagaggtcccttggcacttggagctgcactgcgaacgcgagattctcgggtacccttcggacttggagatccgacgcacgacatccgccggcgacatagctccgggtaacgacgcctttgctcctgcgtccccgacgccttcgctcttccggtgcctgtaacctgcctttgctgaagtctgagtgttggccatctccccttagctgccccagtcacgacc

SEQ ID NO: 101139 - DNA, 237 bp, Oryza sativa
  Clone ID: PAT_MRT4530_98789C.1
ttcctggctcaagaactccggaagttctgggctactcatgctgcccggaagttccgcctcttcgttacgacccgcgacttccccgtgaaaagtccatatcttgtaataatccataaatccacgctctacaatgtgcaaatatcatttgggtcttgcatcatcttttcgttcctgcaatcaaagcatggacagaaaatgtccctcttgttctccctcaaagcatgtgcatttgcctga

SEQ ID NO: 101140 - DNA, 476 bp, Oryza sativa
  Clone ID: PAT_MRT4530_9878C.1
atggtgaggaccgggactatgctcagggaggagcataggtctattgcggtcgggataccatgtgagaaggtgactagagtctggattcttggaggtcaacttcggtcaacggtggggatcgggactagactcagggaggagttgagttccagacggtcaaggataccggtgacgaagttggatacaagatagcatacagtggatggacatcgtgtgggagagatcttcgcaacgggcttcacgagcggtctaaccagcaactcatcggtggtcagaccggcggcattgcggcggtcagaccggcgggagcgaggcggtcagaccggcggcggcgacaggtgcggcaggcgacttcggcgatcagaccggagattcaacaccggtcagaccggcagcatccactcggtcagaccggcagatcaatctcggtcagaccgacttccgtcgatttcgaggataacttttatttccgctaa

SEQ ID NO: 101141 - DNA, 448 bp, Oryza sativa
  Clone ID: PAT_MRT4530_98790C.1
cacgaggcgcagaagcaaaacccaggagcagccatggatcccctcgccgtgctccgggactacgccggccgcggcgacctcgacaagatcatcttctccggcgacgaggtgctcttcgggtcggagtacaccttcccggccaacgcccccaccgccttcaccaacaagcagtcgggccgcccctacccgctctccgccgccgtcttcctcgcgcagcacaacgacctcaagcacaccgacttcatccaggccgcccgcctccgccgcatcccccccgtctccctccccgaccgtaagaccttcctcgacttcctccggcatgggcggcgcgggcggcatggcgaagcccaaggtggagaggtccttcggggacgggttcgtgcccatcatcctcgtgccgagcgcgtcgcagacgctgattacgatctacaacgtgagggagttcttg

SEQ ID NO: 101142 - DNA, 175 bp, Oryza sativa
  Clone ID: PAT_MRT4530_98791C.1
cgcctccggagcccccagaagcttctcgacccaccaccaccgctctccctctccccgtcagaacacaatgagcatacgctacagccgcaccatctatgtaggcaatctccctggggacattcgtgagagggaggttgaggatctcttttacaagtacggtcgcattttggacatt

SEQ ID NO: 101143 - DNA, 196 bp, Oryza sativa
  Clone ID: PAT_MRT4530_98792C.1
gatcgatccggacccaccgcgacaaacgctgtggccttccctacccctacgcccttcgctcccatccgctccgccccctcgccgcgcagcgccggcggcgagaaggttgagttcgtggggggtgtgaccgaacgatggcgtaccgggcggacgacgactacgactaccttttcatggtggtgctcttaggggacta

SEQ ID NO: 101144 - DNA, 297 bp, Oryza sativa
  Clone ID: PAT_MRT4530_98793C.1
atctgttccaccatccatgggtgagggtgaggtggccggtgctcaccgcactaccctggggctcgcgcccactcgccggggcgccgatcctctgcggtcgcaggcgtgaggacccaaaccatggcgccgctgctcctcgctcgcccgcggcacatctggctcgatggaccaaaacacgccacctgccgccgccgccgtccgcggacggcgcttcctcagatctccgagcgcaccggatgccgtcgtcgctcccccgagcgctccgactcgtcgtctgcttgctgggttggagcatta

SEQ ID NO: 101145 - DNA, 3086 bp, Oryza sativa
  Clone ID: PAT_MRT4530_98794C.1
ccgggctgcaggaattcgcacgcgtcccgtactgccggtttgctagccgcctcgctgctccggctccgcctctccacccatcccgccgccaccgccgccgccgccgcctcatcctcctctctacccgcgccgccgcgcctagctatctctaggaagggaggagaaggggccgggtgcgcgcgcgctcgctcgctcgctcgtctcgccggatctacagccgccgccgccgcctccgggtgttctctgcttgggatctatctcgtgagccaaagccatggccgccgtcgcgccgcctcaggtcccggtcgtcgcgccggcgcccgctgctgctgctgctcctcctgccccggctcctgccgccgccgccaccgctgcccccgtcgcggatcaaaccacggatctgctgcagaagttgtctttggattcgcagcccaaggcggtggatgcggccaccgagcccgccggcgctaagaaaggggcctgcagccagccagcctcttagcgtggcgattcctcctgagcggtccatcacgccagtgcttcaggattttatggatcccaacatgttctacctgccagcatactactatggaggttacgacggttctgtgagcgagtgggatgacgacggttctgtgagcgagtgggatgattatcctagatatgtaaatccagatggagtggagattaccccagcagtatatggagatatttatggatatgggtatgctccttatggtgcatactcccctgctagttccccagttccaacggttgatggccaaatgtttggccagcactatcagtatccaacttcgtattatcagcctcctacaccagttccttctaccactcaaggcgacctgcagccttctgccaatcctgacaagccaacagctaaggcagatcctgctaaaacaaccacaaatggtgctcctaatggtactgttcacagtaacagtggaactgtaccccttggatcaagccagcaaaattcatcactgacccctgatggaacttatagggcacccttgctaggtggagttccttctgctggttacctggactctacatatgggtatgacagcacaggagcacactttgcatggtatgatggttctgcttatacaaatggacagcagagaacaactacaaccaatcacatgtcgtcttcaacattcagtaatggctcttctgcaaggactcaaaacaagggctccacacctcagcagatgggcatgaataacagaagacctacaactacaacaggatcagctgctcctacatatccgaataggatgtacccgagcacccggtcttacagccagtatggaaactcatacaaaactggtctttcgtacagcacaaatggttatggaagtaatggctatggtagtaatggttatgattccaggctatatggtcggtggggtcttagtatggataacaggtacaagccaagaggccgtggtaacgggtactatggttttggcaatgagagtcaggatggaacaattgagttgaacagaggtcctagatcaggccgtttcaagaaccagaaattgtttggccatactgtcactattgctgtgaaagggcagagccttcctacaagtgacagcatgaatgctactgatgtacctgatagaacacagttcaaccgagatgacttccctgtccaatatgatgatgcaaagttctttgtcattaaatcatacagtgaggatgatatccataagagcataaagtacaatgtgtgggcaagtaccactaatggaaacaagaagcttgatgctgcttatcaggaagctcaggctaagagctccaaatgcccaatattcttgtttttctcggttaatactagtgggcagtttgttggtgttgctgaaatgactggcgctgttgattttgagaagaccttggagtactggcaacaagataagtggaatggttccttatctctcaagtggcacattgtcaaagatgtgcccaacaatattctcaagcacatcatcctagagaacaatgagaacaagccagtgacaaatagccgtgacacacaagaggtaaaccttgaccaaggcattcaaatgcttaagatattcaaggagcatgtcagtaagacctccatcttggatgactttgctttctatgagaaccgtcagaagttgatgcaggaaaagagggtgaaacaacagcagatccaaaagcaggtctgggacagtagggctccaagttctgtcactggagagaagcagcaggatgctgctactgcgaagccaaagctaccaaatggcgtcaatggagaactgaaggttcctgcagagaacggcacagctccagtcgttacctatgcagcgaaggtcgcccaaacagcagcgactgagaagcctgcccttgccaacggcaccgtcaaagctagttaactggatcacataccccatgttccctagctagccatgaagaacaagacggtcctgaagaactcaacaggcatgtggtcccaaggaactgatggtctggaaaactcttatctgtgaaactggcagcacgggcccaagatcctgctgcttggctgctactggggagcagttggctagttagttttgcctagttttcttttgccgtattcccgttttcggtttgcttttttttagctcgctctaagactccgtttatagtatcgtcgaaaatgccagaaaaaaacctagcggcaaagacaacaagttgcaaagaccatgtctggctttggtgcgttgcgtttcgcgcttattcagtggggggtggagtactataatcccgttgttgagtggttctggaagtgggttagattggtgctatttattttacttaaaagaatcttgctttatatagaaagcgaaaaccaacgctgctggcacagctcctgcagccgcgacttgtacatcctcgcggtcgcggcgatcaaatcgagagctctcccgtacgaatttttgattggatgggccttgtgtcgggtcgcgtcccttgctcctagtactgtcattggattgggctttggcggttgagtatggctgagctgacggggggggaaatggacatgagca

SEQ ID NO: 101146 - DNA, 494 bp, Oryza sativa
  Clone ID: PAT_MRT4530_98795C.1
ctgttggtatttcttacaaccacagataaatccgcaagcacacggaataccgctgcagcacttcactttcgggtgaccccaaaaggatatcgaactcagggaacgattactgggatgggattcagggctgtcaccacctgctgtctacctctgacaaatctgtgggatacacaacaaacaaattggaagttctccgaacccggagtagagtgtatcgacagctctggtacccctccagaattcctcctagaaagctacaatcgtcgaggtagaagtcggagagagcgccaaacttctgggcactcctccagagcttcccttcaccctctacctatttttaatgtataaaagatacaatagatcctcttataattcagctcaaagttgtatgtgatagattgaaggatgagaaggggtatttataggtggagcttgcttgggaggatgaggatgctccatggaatccaaagggcatcttcactcttgagcctcca

SEQ ID NO: 101147 - DNA, 1711 bp, Oryza sativa
  Clone ID: PAT_MRT4530_98796C.1
gcgcgcacaagttcgtggatctaagtgaaacctgcagacaactctaaggaaagcccaccgttccttccgccacgcttcaagcaaccgctcacctcccctcccctcccctcccctcccccaccactctcaccaaccacacccccccctcccgccgtccctggatgtgctccatggccgctgcccacaccagcaccgacgcccccgccgttgccacccccaccccccacccctcggctgccagatctgagtcctaacagcgacgtgcgtccaggctcaccggcaccatctagccatcctcattgtgtcgccgccaccgtacgctcgccatcctcacgccaccatgttcttctcttcctcctcgcgtcgtgtcctctgctcgtcctcctcaaccggcggccagcccacaaacgacgacacctccttctcccttttcccctctcctctcgtcgcccccgtcgccatctccaggagctcgcctgccactcgccccctctctgcccaccgcccctctgctgtgcccgccacctctcggcgctgcggtgccgccgccccttgcccgtcgcttgtgccagcttgctccagccgccgccgcttagctccgccggccggccactccgctcagacctgctccgcccagcctaactccaccaacaccgccatgtcgacggctacctcccccctcttgccagagtccctcgtcaacgttgtttccacgtccgttgccgacgccgtccgcgcgtcttaccaagccctgcccggctcgacaattgatgacgccatggccaagacggtcaccgactccgccgctgatcgacagggcatccgccgccgacccgccgtacatgctgccctcaaacagcacctgccggcgctctccatagcgcccaccgccacctcctcgaccagcaccagcccagccaccctcgacctcgccgccgccggcatgcactactacatctgcaccatcagcggccactgcgccggcggcatgaagctggccatcaacgtcggcagcggctccggctccggctccggctccgggacgccacccagcaccaccccaggaagcagcggcacgccgccggccaccccttcttccccctccaagccgaccggcggcgcgtccgccggcctgcaggccagcgccgccgtcgccgccgccgccggcgccaccaccactggtttcatcccaaaagtgtcatcgctaccggccaaacccgccccgcccgcgcacgcactaaccgcaccgaaaaaccgcctacgcgagcgtgtcggccgcgggcacgttaccaacgcgcgcagcccaaacgccacgcgccctcccctcgccgcatgtcttgccgtgctcacccaccccccaccaccaccacctccagcaccggacgcctctcccgagacaccggcgccacggccggcggccgagtcggcggggtcgccaccggtggctgcgccttcggagccggcgtcggggaggcgctcgggccctgcgccaccgccgcggcggcgaagagcgcggccatggccacgaccacctcttcttaacaaacccatagcagctcctgtgtcaattgctaagagctgtgtcccttgcacaacagtctgtgtagggaaaaaaatagagaaaaaggaaataagttgcaggtctgcattctatgctaactcaaataccaggtgcattcatgtcaacatttagaaagcatatattaagaag

SEQ ID NO: 101148 - DNA, 1092 bp, Oryza sativa
  Clone ID: PAT_MRT4530_98797C.1
atggagcgggtgtcgtgcgtgccgctgcttcggcggctgcttctcttggccgcggccgggctcgcgggcgccgagccgcaggtgccgtgctacttcgtgttcggggactcgctcgtggacaacgggaacaacaacaacatcgcgtcgatggcgcgggccaactacccgccctacggcgtcgacttccccggcggcgcgaccggccggttcagcaacggcctcaccacggccgatgccatctctcggcttctgggcttcgacgactacatccccccgtacgccggcgcaacaagtgagcagctcctcaccggcgtcaacttcgcctctgctgcggccggaatccgggacgacactggacagcaactgggtgaacggatcagcttcagcgcgcagctgcagaactaccaggcggccgtgcggcagctggttagcatcctgggcggcgaggacgccgcggcgaaccgcctgagccagtgcatcttcaccgtcggaatgggcagcaacgactacctcaacaactacttcatgccggcgttctaccccaccagccggcagtacacaccggagcagtacgccgacgtgctcatcaaccagtacgcgcagcagctcaggacgctgtacaactacggggccaggaaggtggcggtattcggggtagggcaggtggggtgcagcccgaacgagctggcgcagaacagccgaaacggcgtcacctgcatcgagcggatcaacagcgcagtccggatgttcaaccggagggtggtcgtcctcgtcaaccagttcaaccgcttgttgcccggcgcgctgttcacctacatcaactgctacggcatcttcgagagcatcatgcgcacgccggtggagcacgggctggcggtgacgaacagggggtgctgcggggtggggaggaacaacgggcaggtgacgtgcctcccgtaccaggcgccgtgcgccaaccgggacgagtacctcttctgggacgcgttccacccgacggaggctgccaatatcttcgtcggccggagggcctacagcgcggcgatgcggtccgacgtttacccggtggacctgagcacgctcgctcagctctag

SEQ ID NO: 101149 - DNA, 179 bp, Oryza sativa
  Clone ID: PAT_MRT4530_98798C.1
gcggccgggaagagcgcacgagcctcccctccgccgtcggccttgcttcttccccatccgtgctcttcgaggcgttttttaactctccagtgaacctgatcgctggctacccggtccctggtctgccggcgaaacgcctctccatctgctgatgactttacaaacattccgcatatcat

SEQ ID NO: 101150 - DNA, 156 bp, Oryza sativa
  Clone ID: PAT_MRT4530_98799C.1
atgtacctgggaggaggcaaggagcgttgccggcgcgccgactactgctgcgtcgtcatggtgaggcgcgttggagtggaggcgagagttacggggatgcgattacgggaaggagtgcggcgtgagggaggtccagagggattgggaacggcatga

SEQ ID NO: 101151 - DNA, 762 bp, Oryza sativa
  Clone ID: PAT_MRT4530_9879C.1
ctgatcccggagctagcattctagttaaattgctgtgactggccaaataacgatcggtacatactcaattctattgagaactcaacttcatcaaaatttggtggaagagctagagcaattttcagtcagtttgcacacgccaaggtagctgtgatcacagggactaagaaggatcaatttccaggtcaaaagagatatccatatacattatatatccagaagttgaagtgtaattgcttgtgaaaatggttcgcaggagactggaacatgatgaaattactagattctacttttgttatggtgaagaacatatacatagaatgatggctgagtatgttctgagaaggtcactccaaaaataactggatatagatgaggtgatcgactccttaaaaatgctacagatgtttttcatggtccatgcactgactaagcttcgtttattttcaagagtttcaagatatgtcatgaaaggcagcatgatggaatattggcccccattttgcagaacttgggcgaggttcttggaagttctgaacctttgcctatatgaactctggggaagttagtattaagctctatatagtaaatgatattcacagcattcaacttgtgttaatagtttgcaggcgtggaatattctttttgaccggaacatggactaattatttgacaattgtatatagagattcaatcaatacattcttgacagaaataaatgcagatagtggatcataccagtttgaaaaaaaaaaaaaaaaa

SEQ ID NO: 101152 - DNA, 612 bp, Oryza sativa
  Clone ID: PAT_MRT4530_987C.1
atggcgatggccgagcgggacgaacgccgaagcggacgacaatggccggactttaatttgcggctaacacggtatacgtcagcggtcgggcaggacaaagacggcagtcatgtagcgaacgacggcggccatgcgacaaatggcggcgaccgcgatgaaggaggcgacggacgcgggaaacggcggcgggcgagccgggcgacggcggcagtccgacggacgcagcagatggcggcgaccgagccgaacgacggcggccacgcggttgacgttgcagacggcggcgaccgagcaggacggctggctgtgtggcggacgcggttacggcgtcgaccgagagggacgaatgcggcgcgtcggcggaagccaatatgccgtacagtgtcggatgctgtccatgtactggataacattgttgggtatgatgcacttgatgctgaagccactggagcatcatccaagtatatcccacctggtggatatggacacttcttaaggatggatggattgaagggcaagaggattggtattcccaatggctttttcactaaagaaaaatatgggaagaaacaattgatggtataccaaaaacatgttgcattaatgaggtaa

SEQ ID NO: 101153 - DNA, 471 bp, Oryza sativa
  Clone ID: PAT_MRT4530_98800C.1
aatgattaaccgcaccatattcttatgttagttagcgaccaagaacactggctgtccctgcacagatgagtgctgtgacccatcatcatagcagcgtgaagaacataggagtatctaaaaacaacatgcaacgtagtaagaagtttaatcaaatgttatatagctatcactgagctctaccagagtagcagcagcgcacccagcaggtgacgtgcagaacttttaaatagcccttttgtacattgaaatgagccggcacatcaaccgcaccgtagcatccttcttcaagaatttgcctatacaaatactagcgcaaaagaagccagctcggtccacccgctgtcaacaatgtccgccggtgagagccgacgaaagctatctttctgtggtgtctgtgttaagtagtatcgtctcgtgtctatactgcttctgatactgatttcctgaatctgaatgctatcaggccaagtc

SEQ ID NO: 101154 - DNA, 2748 bp, Oryza sativa
  Clone ID: PAT_MRT4530_98801C.1
atggcttgccatgcccgccgcccccatgagagggagatgatcaaagaatcttcatctcctgcattggatgctgataaaatagaagttccttcaccaaaggacgaaaacaattcctcaaattctgaagctgctacagataatgaagactttgaaattagtgatgatgatgacgatgatcgtaaccacaagcaccggaagcgggaggcgagacctcaatcttttgatgagaatactgagcaatctccagggggtcctctgaaaaaaagacacaaaatttctggtggagctgattcacatggggaagcacagaaagatttctttccgaaatttaagaggcgccctggagcaggggctcatagtcgggcacctcgagttaatccatcctttcgtgattcatcagcttctgtggctgctcgcgctcctatgacacgtggaagaggaaggaatggtgcaccctgggctcagcatgaaccaagatttaacacacttgagatgattgactttgcatcacagatggcctctcaaggaccaccaactcatcctagcttatttatgggtcctgcattgccaagtggtggtagtgcacaaaatggttcttggggtccatatggatttatgcctggaatgcctaatggaatgctggatccaattcatccacttggaatgcaaggccctattcagcctgcaatatctcctttaattgatcttggcatgcctcgtcaacgttgtagagactttgaggagcgtggattttgcttgagaggggatatgtgccccatggagcacggtctgaatagaattgttgttgaagacatgcagagcctgtcacagttcaatcttcccgtcacagttccaaatactcaaggactaggaatccaaaatgaaccaggaactgctcctgtcaacacatcaagccttggaggcagtaaaggtgttcctgcaaaagacatcaaatctgctgtgacaaatgatgtactgaagctaaatggaaccactgctttagctgtttctgatgctgatgtatatgatcctgatcagcctctctggaacaacgaacaccctgatgcatctgctggttttgcacatactgatggagtatggaatgctgaatccttgggctatgaagcagctcgggagcagggaaatcaggttcttgcagctgatagttcacagaactcaaaatcttctgtttgggggcgaatagcatcaaaaaaactagggcatggcaagacagctaatgctacttcaactagcgccactggaaacaaaagaaatgaaagttatgatgaaatggctcctagcactgtccatgtcaatcctgcttctgctaaagacagtaatggtcaatccaattcgagaatatttggagatgtgggccggcaaagtaaccgggcttctcataaagcatcccggacactttatgtaaatggtattcctctagaaagcaatagatgggaggcccttctttcgcacttccagaaatttgggcaggtgatagatatctatattccatctaacagtgaaaaagctttcgttcaattctctaaaagagaagaggctgaagctgcccttaaagctccagacgctgtaatgggcaaccgctttataaagctatggtgggccaatagagataggattcctgatgaggtagagggtagaatcccagcaaaatcttcccatatgtctgctgccctggccaattctgtcccacagccatcttcttccaaccgaggcaaggaaaatcttcaatctgcaactccaagagccagttctggatcttctgctgaagcatcaggtcctggtacaggccataaaatgcttcctgcaaatagtgtaaaatcattacctcctgacaccaaaaggcaagaaagtcttgagctcttggaagaacttcgtaaaaagcaggagatcttagctcagaagcgtgatgaattccgccggcagttagagaaactggcaaagcaaaagggtttagcaaattcagccaaacaggcagaagctggtggaaaagaagttgcttctaatgatgtacatagagttactgattcgaagtccatgaacaccgggacagaagggcctcgagatgctgctggtacactgcaaaacagaacttctggagagctggcttcatcttcccacaaatcatcggcaacatctgcacagaaaccagctgtagctactaagcagacaagtcctctgttagtaccatcacagaataggtttaagcttgacaatcggaccacgtcatttcgaatccttccacctttgccacctgaaatcgcagatgaatctgtcttgaaagatcacttcatgtcatttggggagctttcatctgttgttctggaagacactgaagcgtacaaccatgatgctaccttaaaaccttctctgagttgctcagcttgtgtgacatacacgacacgacaatctgctgagaaagcatttattggtggcaaatcttgtaaagggcatacactaagatttatgtggttaacagcctctcctggttcgactaaccattctagattccagaaaacctcaattcctgccagggcctctagtttctccagtcaaactcaaaacatgccatctgagtcttcaactactgtaggaaaaatgtcatccacagtcaaatccagtacaactgcaaagcctcacagtgaatccatgccgactgccacaagtgcgaagacatctgttgaaattcccaaagctttgtcttctagagattctgatgtttcacaatga

SEQ ID NO: 101155 - DNA, 2925 bp, Oryza sativa
  Clone ID: PAT_MRT4530_98802C.1
atggcggagatgatcgccgtgacactctcggcgaaggtcgccgccgcgctgtccggacccgcggccgtcaggctctcctctctcgccggggttcgctcgggcatcgaagcggcggcgcgagacctggagctcctccgcgccttcctccgcttcgtcgactccctccacggcagcgacccgctcgccgacgcctgggttgaccaggtgcgcgacgtcgccttcgacctggaggacgccgcggacgagtacgccttcctctccggccacggcttcttccgccatggcgctaacttgggcgcctggttcgcgctctccaggcgcctgtggagggcgcgggagaggctccgcgagctctcggccgcgaaggagcagctaggaatccggccggcggaggtctccgcctcgagctcgggtggcgctggtggcttgtctgcggcgatgatcggtcggaagatagcagaggcgtcgcacttcgtagaggagggtgagatcgttggttttgcgatgcacgaaaggttactgatgaaatggctgactggggatactgacccccggcagctgctgatcgcagtctgcggcatgggcggcgttggcaagacaactcttgtcacaaacgtgtacaagaaagtcgctgcaacctgccactttgattgcgctgcgtgggtggctgtctccaagagcttcacaacagacgacctccttagaagaattgccaaggaatttcatcgggataaccgcggctgcgtgccgtgggacgtggacaatatggactaccgctcgctggttgaggctttgcgtgggcatctcgccaagaagaggtacttgcttttgctggatgatgtctgggatgcccatgcgtggtatgagatccgtcatgcttttgttgacgatggaaccaagagccggataatcatcactacacgcagtcaggacattgcttctctggcatcatcgaataggatcatcagactggagccactttctgagcaggaagcatggtctttgttttgcaacaccacgttcagggaagatgcagaccgagaatgcccatattatctgaggcattgggcttcaaagattctggacagatgctgtggcctgccattggcaattgtttctgttggtaatctgcttgttttgaaggatagaacagagtttgcctggaaaagtgtatatgacagccttgtgtggtatgaaagcagtgatcatggaattgggcaggtgtcaagcatactgaatctgagcttcgatgatctgccttaccacttgaagaaatgttttctgtattgcagtatataccctgaggattttatgataaagaggaagattctaatcagagcatggattgcagaaggtttaatcaaggaaaagggacagggcacaatggaggaggttgcggatgattaccttaaccagttagtgcaacgttccctgttgcaggctgctgtccagaatgagtttggacgtgcaaagcgctgttgcattcatgacctgatcagggaaatgatagtgcacagatcaacaaaggaaagattctttgtgttctctaaatgcactgtaacattgaagtcaagcaaaaaagcccgtcatcttgtatttgaccgatgcagaagtgatcgtttgtcagctcccaaaatgaactcgcttcgctccttccatgcatttaaggcagatttggacgcctcactcttctctagctttaggttattgactgtgttgaacttatggttcactccaacagctaaactgcctagtgcggtggccagtcttcttaatttgcggtatcttggcatccgttccactctcatcggtgagcttccagaggagttgggacaattacataacttacaaactttagatgctaagtggtccatggtacagagattaccacaaagcataacaaagctcaagaacctgcgccacttggttttgtatagacgccgatctgcagatttcacctatccaggccctggtacggcaattgcgcttcctgatgggctgaaaaatctgacctgcctgcagactcttaaatacattgaagctgatgagaagatggttagatccttaggaagcttaaagcacatgaggagcctagagctatgtggtgtgcatgagagcaatcttattcatttgccctcgtccatctccaaaatgacttgcctactgcgcttgggaattatcagtcaggatgctaatgtaaaattagacctggaaccattctatcctccaccaataaagctacaaaaacttgccttagcggggatgttagtaagaggtaagttaccttcttggtttggctcccttaataacctcatgcagttgcgattgcattcatctaacctcatggaagattcacttggattgctctcatcgcttccccggttgttgcatcttagccttgtcaatgcatacagtgggaagagtttgacctttgcaaatggttattttccagcccttaagaaactaactttgcacgacttgcctaacctttctcacctggagtttcagaaggggagtcttgtagatctacatgtgttgatgcttggccgatgtgctcagctaaataaactaccccaagacatcaggaacctggtaaatcttgaaaccatggatctttttgaaatgccaagtgagataatacagaatatacagaacaatgagatattacaggaacataatcatgagtctgagcacacaatagtaatcaagaacatccgttggaataatgggaaattgttggaggaaaaagtttatatcaacctatcactattggaaagtaggcccttcatagataaagagcagcataatgtaaagtcccaagctgaaattactgcagatttagtgacattcccccgtgacattctcggtgacattgagtcactgacatgtgggaatgtcaccgaatcccaatctgttttattttag

SEQ ID NO: 101156 - DNA, 422 bp, Oryza sativa
  Clone ID: PAT_MRT4530_98803C.1
ctaccgacggcgacaggcgaaagcaagggtggcggcgggtagcggcgggcttgggggtccttttaaaggggcaaggaggtggcggcgaaggcccacggcgaccgccgacgcgaaggaaagtttagggttcgaaggagagggatcgatccgaatcgaactcgaatccacggatttccaaacgaaattagccgacgattccaaaagagaaaaggtagaggagatctcgggaaacatttcccctcaattgatttcaccggagaaggaaaggcgcggtgggccccccctgtcagcggtcgcacgcgcgcgcgccagcggacggctcggctgcggactagcccggcttgggccggggagagagagagaaggttttggggcgactttcggcccaaaggcaaaagagacttttaaaaacctttttcaat

SEQ ID NO: 101157 - DNA, 200 bp, Oryza sativa
  unsure (1)..(200): unsure at all n locations
  Clone ID: PAT_MRT4530_98804C.1
nancaacncgancagaatcggnnttcggncgggccaggnnaaaggnaaanggccnccnccnccnccncgggtttttgcnctgttnntggcggtcgggcnctcnttggggntggggccggcggggnacatcgttcaccacgacnacnaggcccccaanattccaggatgctccaacgacttcatcctgntcaaagtgcaaa

SEQ ID NO: 101158 - DNA, 655 bp, Oryza sativa
  Clone ID: PAT_MRT4530_98805C.1
attcggctcgaggtccaagacaaaattccttttggaaattcctcctcctcgttttcgatcggctcactctcgctctccctagatcgcgcactttcgctctccctcgtcgcgtgctcgttctcgctatcgggctctcgcgctctctcggatctaactctgtctgtaatcatgtcaggcaagtatatcgtttctgctattcttggatcatttggagttgcatgggtttgtgattattatgtttcagaaaaaaagctatttggaggtactacccctggcactattacaaacaatgagtgggcagaagagaccgacaaaaaattacaggcatggcctcgtactgccggtccaccagtggtcatgaatcccataagtcgccaaaatttcattgtgaagtctcgccctgagtaatattttttgttgattgattttgagttaattggggccccttagtcatgggatatttttccataaatgatgataatgtttgaggtaaaactcttgcagtttaatcagtgtttggatgtttaaacatgtgaatgtttacttgctaaataaaatgttacttaagattgcccaaaaaaaaaaaaaaaaaaaaaaaaaaaaaaaaaaaaaaaaaaaaaaaaaaaaaaaggacagaccgcagaatagtgagctc

SEQ ID NO: 101159 - DNA, 332 bp, Oryza sativa
  Clone ID: PAT_MRT4530_98806C.1
tccacgcgttcgtccacgcgtccgtccacacatggtggccgctacgacgctcttataccaatcggtatgactagcttgcagctgctgtacaaacaattccccatggctggagtggatcaccttggcctactgttccagctctacgtggacgacctgcccaccgccgtatgtgactcctacctcgaggacgtcttcacttgtgagacgttcaccaccgaggatgtcaacggctgccaggacgagtacgactcgtcgagacagaggtgagagcagtccagctccatccgtatctagggcaggaccgaggccatcccggcggagcgttggatctg

SEQ ID NO: 101160 - DNA, 453 bp, Oryza sativa
  Clone ID: PAT_MRT4530_98807C.1
atggcgttagcggagacaatgatggcgcagtcggacatatccgtgcatggacagcgagcgcggcagcggccggctcgtagagacaacgacaacagcgggagggcgacgcaggtgacatcggcgcaggtgacaacagttggagattggcgtcaagaggtcaatgcaggcgacggcaaggaggccgccctggctgacatcgtcggaggtcaacgcggcgatgataagaagggcgacgacgacagtgtgccacaaagggccgtttttgagtcgttcctggtgaaaaccatgtcttggttctccttgaggtctcaagggaaggctagccagcgggtggggatgaggtcgccgacaacggacgtgaggacgagggggtcggcggcgacaggggcgaccgagtcgacggcggtggcggtgacgttgaggaggttggagatgaagacggcggaagcgtag

SEQ ID NO: 101161 - DNA, 519 bp, Oryza sativa
  Clone ID: PAT_MRT4530_98808C.1
atgctgcgcgcggcggggaagcgtctcctcggcgttgggctgcgcccggcgggcggcggcgctggagaggcggcggcggcggcggcggcttcggcggtggccgttgtgaggaggagggggtaccacgagcgggtggtggaccactacgacaacccgcggaacgtggggacgttcgacaaggacgaccccgacgtgggcacgggactcgtcggcgcgccggcgtgcggcgacgtcatgaagctgcagatccgcgtcgacgaggagtccggtaggatcgtggacgcctgcttcaagaccttcgggtgcggctccgccatcgcctcctcctccgtcgccagtgagtgggtgaagggaaaacaaatggaggatgcagcttcaatcaagaacagtgagatagcgaagcatctatcgcttccgcctgtaaagctccactgcagcatgcttgcagaggatgcaatcaaggccgccgtgaaggattatgaagcgaagaaggcaaagttggataaggggaacgagtag

SEQ ID NO: 101162 - DNA, 1290 bp, Oryza sativa
  Clone ID: PAT_MRT4530_98809C.1
gtttaccggctttctatcggtgccgcgtgtgggatgacatggccatctgacaagctggtgattcaggtgctggatgactctacagatccagccataagggagatggtggagggagagtgcgggcgatgggcggggaagggcgtgagcataaggtacgagaacaggcggaacaggagcgggtacaaggcgggggcgatgcgggaggggctgcggaaggcgtacgcgagggagtgtgagttggttgccatcttcgacgcagacttccagccggacgccgacttcctcctgcgcacagtgccggtgctggtggcggacccgggggtggcgctggtgcaggcgaggtggcggttcgtgaacgcggacgagtgccttctgacccgcatccaggagatgtcgctggactaccacttccgcgtggagcaggaggtggggtcggcgtgccacggcttcttcgggttcaacggcacgggggcgtgtggcgggtgcgagccctggaggaggcgggcggtggaaggagcggacgacggtggaggacatggacctggcggtgcgagcgagcctgagggggtggcggttcgtgtacgtggggcacgtcggggtgcggaacgagctgcccagcacgctgcgcgcgtaccggtaccagcagcaccggtggtcgtgcggccccgccaacctgttccgcaagattttcctcgaggccccaccgcccgcgtgtccccctggaagaagctccacctcctctacgatttcttcttcctccgcaagctcgtcgcccacctcctcaccttctccttctactgcgtcgtcatccccgcctgcgtcctcgccggctccgaccacgtccgcctccccaagtacgtcgccctctacgtccccgccgccatcaccctcctcaacgccgcctgcaccccgcgctcctgccatctcctcatcttctggatcctcttcgagaacgtcatgtccatgcaccggaccaaggccacgctcatcggcctgctcgaggccacccgcgccaacgagtgggtcgtcaccgacaagcgaggcaacgccaaccccaagcaccagcagccagctaataccaccaccaggcctgggaggaagaccaccaccagctccagccgcacaagcttcttcaataatgacgtccatgtcgccgagatcctcctgggggcctgcctgctctactgcgccctctacgacatcgcctacggccgcgacagcttctacatctacctgctcctccagtcggccgccgccttcatcgtcggcttcggctacgtcgggacctag

SEQ ID NO: 101163 - DNA, 1254 bp, Oryza sativa
  Clone ID: PAT_MRT4530_9880C.1
cctagaagctcttttaaattcattcagacccttgaaatttcattgtttgccaagatagccaaacttggcattacaaaagctttgcagcattagccaaacacagcatgacaaaagatccacaccatcagcctaaagcattacatcctttattctcttgaaattattctttacagcagtaaattatctcacaacctcgatgattttggagaagaaacacccgtattgaacttcttgatgtagttatagatgtgatcactgatttcctgtgctctctcctgctggatgaagtgcccagcacctttgattaccactacttcctcaagcataggaacatctttcttcaacctacccttgtgtatgtagcttttgactcctgggagatggtaagccaggtcaccatccccgacaataaactttgttggcactagaacttttgcacctgtccatggtgccatcagctcccaattcaggtcaaaacatcggtagtaattaataccaccagcgaagccagtttttgcatacacacttgctacataactgatatcttcctcagagagccaaggaggcaatgttacttccctgttgtttgcccgcatttttttaatggacatagcagaagatcctgttgtttgaacaatcaaggccaatttgaagaatctcttcaagtcaagactggccaattctttttcaactccaggttcctggaatcggcagacatagtaatcatcgccatacgcgccgcggaagtagtcgaggggcttctcggcggggcgcctcggcatgaacgcgacgctgaggttgacaagcgcgcgcacccggtcaggccgcagcaggcacaggttccacgacacgatggcgccccagtcatgccccaccacgaacacctgggggagctcgagggcgtcgaggagggcgacgaggtccccgacgaggtggaagatggtgtaggaggtgtgctccggcggcgcggtggtgccgccgtagccgcggaggtcgggcgcgacgcagcggtatccgcgcgcggccaggtgccccatctggtggcgccacgagtaccacagctccgggaacccgtgcacgaacagcaccgcgggagcagtgccgctgcccggccccgcctccgcgacgtgcatcgagatcccgttcgcctccaccgtccggtgccttaccgccgccgccgccgccatggtctcctctccactccgtcgcgcgacgcggcgacgacgtgcgcggacgcgtgggcggacgcgtggg

SEQ ID NO: 101164 - DNA, 368 bp, Oryza sativa
  Clone ID: PAT_MRT4530_98810C.1
accatgcataccatgcagactgttccacgctggcaacttaacgaacacaccctggggggacaaagctattggctccctcaagaaaaaaattaagggtgcggggaaccagcccatcgaatcccacggaagcccagggggggggagccaagcgacacgtgcctgcctgcctgcctgcctgccgccgccgcctacgccggggaggggcccggagctgatcgatccatgtcacgtgtcactggacgagacggggaccatagccacccgacggtattagcgaagcacctccggaacctttccatccggtccggggggaaaccgacgcccacctaaatgccgccgcgggggccctccgccaccgagatcgcccc

SEQ ID NO: 101165 - DNA, 2643 bp, Oryza sativa
  Clone ID: PAT_MRT4530_98811C.1
ttggactactactttattaagcccgtgggccgtgcggcccactgatccgcaccggcacggcggcatgcgagatgccgccgccttggagctccacgccgccgacgccgcggcggcggcgcggccggcgatggtggccgccagcgatcactacgcgcggctcctgcagctctgccagacggcggctaacccgggcgctggccgtgccatccacgcgcgcgccgtcaaggctggcctcctcgccagcgcctacctctgcaacaacctgctctcctactacggcgagaccgccggcggcgccggtgggttgcgggacgcgcgacgcctgttcgacgagatccccttggcgcggcggaacgtgttcacctggaactcgctcctgtcgatgttcgccaagtccgggcgcttggccgacgcccgcggcgtgttcgcggaaatgcctgagagggatgccgtctcctggacagtcatggtcgtcgggctcaaccgcgccggccggttcggggaggctatcaagaccctcttggacatgaccgctgatgggtttacgccgacgcagttcactctcacaaatgtgctgtcgtcgtgcgccgtgacacaggccggcgcagttgggaggaaggttcattccttcgtcgtcaagctcgggctcggtagttgcgtgccggtggcgaactcggtgctcaacatgtatggaaagtgtggggattctgagacggcgactactgtgtttgaaaggatgccggtgcggagcgtgtcaagctggaacgccatggtatctctgaacactcatctggggaggatggaccttgccgaatccttgttcgagagcatgccagaccggagcatcgtctcatggaatgccatgattgcagggtacaaccagaatgggcttgatgccaaggcactgaagttgttctcaagaatgcttcatgagtcttccatggcgccggatgaattcaccatcaccagtgtcctatcagcttgtgcaaacctcggaaatgtaaggattggaaagcaggtgcatgcatatatcttgagaactgaaatggcatacaatagccaggtcacaaatgctctcatttcaacatacgccaagtctggcagtgttgagaatgccaggagaatcatggatcagtcaatggaaaccgatctgaatgtgatatccttcactgccctcctggaaggctatgtcaagattggggatatggagagtgcaagggaaatgttcggtgttatgaataaccgagatgttgttgcctggactgcgatgattgtcggatatgagcagaatggccgcaacgatgaggctatagatctcttcagatcaatgatcacatgtggcccagaaccaaacagctatactctggctgctgttcttagtgtctgtgcaagcctggcatgccttgattacggcaagcagatccactgcagggctatcagatcattgctagagcaatctagttcagtcagcaacgccatcatcaccatgtacgccaggtcaggcagcttcccatgggccaggaggatgtttgatcaggtttgctggcgcaaggagacgatcacatggacatccatgatcgtggctctagcacagcatggccaaggagaggaagctgttggcctcttcgaagaaatgctccgcgctggcgtggaaccggatcgcattacctatgtcggcgtgttatcagcgtgctcgcatgccggttttgtcaatgaagggaagaggtactatgatcagataaagaatgagcaccagattgcaccagagatgagccattacgcctgcatggttgacctcctcgcccgcgccggcctgttctctgaagctcaggagttcatccgacgaatgcccgttgagccggacgcaatagcctggggatcactcctctcagcctgcagagtgcacaagaacgcagaattggctgagctcgcagcggagaagcttctgtcgatcgatcccaacaacagcggcgcctactccgccattgccaacgtgtattccgcctgcgggaggtggagcgacgcggcgaggatatggaaggcgaggaaggagaaggcggtgaggaaggagacggggttcagctggacgcacatccgcagcaagatccacgtcttcggcgccgacgacgtggtgcacccgcagagggacgccgtgtacgcgatggcggcgaggatgtgggaggagatcaagggggccgggttcgtgcccgacctgcagtccgtcctgcacgacgtcgacgacgagctcaaggaggagctgctgagccgccacagcgagaagctcgccatcgcgttcggcctcatcagcacgccggagaagacgacgctgcgggtcatgaagaacctgcgggtgtgcaacgactgccacgccgcgatcaaggccatctccaaggtcacggacagggagatcatcgtgcgggacgccacgaggtttcatcatttcagggatggcctctgctcgtgtaaagattactggtaggaaaacgttcatggtgattttggcgaggaagggggatatttgtttgttgtttcatgcagagatgtactccattgtaagcttgcaagaacagccaattccaatattcatgaatcacatgattaaaatacatggcaatttacattcatgccaaaaaaaaacaaaaa

SEQ ID NO: 101166 - DNA, 162 bp, Oryza sativa
  Clone ID: PAT_MRT4530_98812C.1
cctacagatggacatggcataatcacttcattataagtattcacaactgccatggatgccccaatgccttatgcatgtatcaattctctactagggatagtctttccatacctcacgcagaacaaaggcatacagacattagtggtttgataagcctcatgc

SEQ ID NO: 101167 - DNA, 753 bp, Oryza sativa
  Clone ID: PAT_MRT4530_98813C.1
atggagacgggttcttcaaaagaagatcacccgactgcagaagatcacccgagtgacaatcaaccggcgaccgacaatgtagaacccagcaacgagcccccgactgggaaccagtcggccgaaactggggttggtgctaatcaggagcccccgactggaaaccagtcgggtacagaaccaaacaaagatattcctgaaagaatccatctcaggaacgaggcgaagaccgcgactcttgagaatttagttcctcatcttggaacccttgagaccaccagaaaccagctgcacaaggctaaggagcttgccaggaaaactgagcatgatctgagggatcggatcgccgagcttcaagaatccaactttgaactgagcggttcgtcaaaagtgcaagccgccaagatatctgaactagaaaagcggatccaaactctggagaatgacaaggccaaattggcgaaacagagggattcggctctgaaagatgttgaagatcgcaaaatcaagtctcaggctcaattcgatgtcttggtcaataaaatcaaaaggcttgaaggggctagggatgaagtcgccaacgctgctaccccactcgtccaagccatgttcttcaataacaatggtccgagtacatttgatgcttccgaaatcttcgacaagctgagaatcgctccggatacatactttaagaatatcaaagaggccggaagtatgggagcaagcctggcgttggcaatgaccaagtctttataa

SEQ ID NO: 101168 - DNA, 2046 bp, Oryza sativa
  Clone ID: PAT_MRT4530_98814C.1
atggcggaagaaagagaaagcttcgagagtcagtgggcgtcctctgatgtaacggaggagaatctgaaagagatggtggcgcacggtgttcttccggcgaaagagatcattgggtggcgaccaacagtcggcgaagcattcccgacccccgacacgcatgaagtcgtgtttatcaggacacttggaactcactgccgatgggagatgaagtcgctcaagcactggataaagctaaaggaacaaggtctgcaaggagaacaaatcaccctgcattttatcaagagctggttagctccaattaaagagagatctcgtacagccttcgaatttgacggcaagcatgatccaaaccatgaagatccagattctcttgatttcaaggtcatgaaggagagaatgtacaagatcttctcaaatgctatcgtagtccgctactcacacttgctgccggtggtgccgtacaacgcattcaatcctcctccaccggagttcgctttgatgaagtcggatcctctaatcgctcagcgtcgatcgcctcgccgtcaaactggtcagggaagtggaggaccaaaaattcggtctgaaacccaaccaaacacctctaatctagctggccagtcagattcccgcaagaggaaattggttctgagtgacgacgaaggcgatgatgctggaaaacttggagataaaggggcgactggaaaactaccgaagcaagccaatccgaagaagaaaacatccagtcgtcctatgccgaaaattaggaagtcttccaggaagccatctgacatagatccttttgggaaagactctgatccgactaacatggagacgggttcctcaaaagaaaccgggccgactgcaaaaaatcatccgagtgacaatcagccggcaaccgacaatgtagaacccagcaacgaacccccgactggaaaccagtcggccgaagctggaaccagagttaaccaggagcccccgactggaaaccagtcggacacagggccaagccaagagatccctaaagttgaagctcaagcagacaaccctcccggaaaggatgccagcaatgacccaggatccagatctcctgtaaaggcacaagagtccactcgtccccgaccggaaatcatcacaggaccaatgattggtgatgaagaagaaattctccggatacgagcagctgaagattcgcgccctcccattctgggaattgtaataaataagcaaaaagaagatgaggaggtatgcctgctgaaaaaggcactcagtcaggctactcgcattgtgaacaggattcatctcaggaacgaagcaaaaaccgcaaccctggagaaattagttcctcatctcggaacccttgaggccaccagagatcaactacacgaagccaaagaacttgccaggaaaactgagcatgatctgagggatcgaattgctgagctccaggaatccaattttgaaccgagtggttcatcaaaaggcaatatagtgcaagccgccaagatatctcaactggagaagcagattcagactctggaaaatgacaaggcagaactagcaagacagagggactcggctttgaaagatgttgaagaccgcaagatcaagtcgcaggctcaattcgacgtcttagtcggcaaaatcaaaaggcttgaaggggccagggatgaagttgctaacgctgctaccctactcgtccaagccatgttcttcaataacaatggtccgagtatattcgatgcttccgaaattttcgataagctgagagttgctccggatacatatttcaagaatatcaaagaagctgggagtatgggagcgagcctggcgttggcaatgaccaagtccccatacccgaagatcgacattgacgccattgatggctttgcagacgggacgagcgaagaagctgctcttgacctcatcaatgatgcgcagaaagccgccgatgagatagcagttaatgtagttgagagattccaggacaccgatcttcgaccgactggtcctgataactctgatgatgaaaaaactgatacttattga

SEQ ID NO: 101169 - DNA, 204 bp, Oryza sativa
  Clone ID: PAT_MRT4530_98815C.1
aagctttggtcagggagtacaaatgatcagccaattgacaaggtgcatctgatgctcctagcttcgtctacctatacatttatttgttgctgctcccatcatcagatcagaccaccagctgtatgagtatatacacagtttgtatgctaaattctttctaaataaacatccttatgcaaatgtgttgataaaaaaaaaaagctt

SEQ ID NO: 101170 - DNA, 1674 bp, Oryza sativa
  Clone ID: PAT_MRT4530_98816C.1
atggcggaagagagagaaagcttcgagagtcagcgggcgccctccgatgtaacagaggagaacttgaaggagatggtggcgcacggtgttcttccggcgaaggagatctttggatggcgtccggcgttcggcgaagcattcccgacccccgacacacatgaagtcgtggggaaacaaatcacccggcacttcatcatgacccggcaggctccaatcaaggaaagatccagaacagcctttgagtttgacggcaagcatgaccccaatcgagagaacccagaatctcttgagtttaaaattatgcaggagagaatgtacaaaatcttctcgaatgccatcgtggtcagctattcacacttactaccagttgtgccgtacaatgccttcaaccctcctccaccggaatttgctttgatgaaatcggatcctccaattgctcaacgtcgatcacctcgccggcagactggtcaggcgagtagaggaccaaaaattcggtctgatactcaaccaaacacctcgaaatcagccagccagtcagactcccgcaagaggaaattggctctaagtgatgatgaggtcgatgatgctggaaaatctagcaataaagaggtgactggaaaacaaccaaggcaaaccaatccgaagaagaaaacatccagtcgtcccatgccgaaaatcaggaaatcttccaggaagccgtctgacatagatccttccggaaaagacttcgagctgactgacatggagacgggcccttcaaaagagaccgggccagctcagaggatcgcccgagagcccccgactgggaaccagtcgggtacagaaccaaatagagatattcctgaagtagaagctctaacgaacaaccctcctagaaaggatgccagtgctgatccagggtctagctctcctgttaaagtacaagagcctgctcgcccccgaccggaaattattacaggcccaatgatcggcgacgaagaagagaacctccggatacagtcagctgaggattctcgcccacccattttaatcaagtggtgggacgacgacatgcaacctcagggaattgtgataaacaagcaaaaggaagatgaggaaagaatccatctcaggaatgaggcgaagactgcgactcttgagaggttagttccccatcttggaacccttgaggccaccagaaaccagctgcacgaagctagggagcttgccaggaaacctgagcatgatctgagggatcggatcgccgagcttcaagactccaacttcgaactgagcggttcatcaaaagtgcaagccgccaagatatctgaactggaaaagcggatccaagctctggagaacgacaaggccgaattggtgagacagagggactcggctctgaaagatgttgaaggggctagggatgaagtcgccaacgctgctaccccactcgtccaagccatgttcttcaataacaatggtccgagtacatttgatgcttccgaaatcttcgacaagctgagaattgctccggatacatactttaagaatatcaaggaagctgggagtatgggggcaagcctagcattggcaatgaccaagtctttatacccgaagattgacattgacaccattgatggctttgcagatgggatgagcgaagaggccacccttgacctcatcaacgatgcgtag

SEQ ID NO: 101171 - DNA, 1710 bp, Oryza sativa
  Clone ID: PAT_MRT4530_98817C.1
atgcgtagttgggggagctggatttcaactgaggggaactctgagccaaaaatatttctctatgcccttcgaacctcaaacaaaggatggcatgcaaattggttctatgtacaaaaccccgagcctgcactccccgagtactcctgtcttcctccggtttatcacgacacttggaactcacttccaatgggagaggaagccgctcaggcgtttgccctgatggaccatatgctgaagctgaaggagcaaggtctgcaaggagaacagatcacccagcattttatcaagagccggctagctccaattaaagagagatcccgtacagcctttgagtttgacggcaagcatgacccgaaccgtgaagatccagactctcttgattttaaggtcatgaaggagaaaatgtacaaaatcttctcaaacgctatcgtggtcagttattcgcacttgctgccagtggtgccatacaacgccttcaatcctcctccaccggaatttgccttgatgaagtcggatcctccaattgctcaacgccgatcaccaagccggcagactggtcaggcgaacggaggacctaaaattcggtctgatactcaaccaaacacctcgaaatcaactagccagtcagactcccgcaagaggaaattggttctgagtgatgatgagggcgatgatgctgaaaaaactagcaacaaagagccgactggaaaacaaccaaggcaaactaacccgaagccatctgacatagatccttctggaaaagactccgagccgactgacatggagacaggcccttcaaaagaaaccgggccgaccaccgaagatcgcccgagtaataatcaaccagcaaccgacaacgtagagactagcgacaagcccccgactagaaatcagtctaccgaagctggaattggcgctaatcaggagcccccgactggaaatcaatcgggcacagagcaaaataatgatatcccggaggtggagacccaggctgatagccctcccaaggcgagcgctggcgccaattctggaactaactcccctgttagggtgcaaggacctgctcatccccgaccagaaatcataacaggcccgatggtcggcgacgaagaagaggtccttcggctacaatcggctgaagattctcgcccacccatattagtcaagtggtgggatgacaaaatgcagccccaggggatcccactttgctcaaatacggataaatttgcatctgagtggatcgtcaaaagaagcaatacagtgcaagctgccaagatatccgagctgaaaaagcggatccaagctctagagaaagacaaggccgaattggctagagagagggactcggctctgaaagatgttgaagatcgcaagatcaaatctcaggctcaattcgatgtcttggtcaacaaaattgagaggcttgagggggctagagatgaagtcgccaacggcgctacaccactcgtccaagccatgttcttcaataacaatggtccgagtacatttgatgcttccgaaatcttcgacaagctgagaattgctccggatacatattttaagaatatcaaggaagctggaagtatgggagcgagcttggcgttggcaatgaccaagtctttgtacccgaagattgacattgacgccattgatggctttgcagacgggacaagcgaagaagccgcccttgacctcatcaacgatgcgtag

SEQ ID NO: 101172 - DNA, 1608 bp, Oryza sativa
  Clone ID: PAT_MRT4530_98818C.1
atggtggcgcacgacgttctctcggcgaaagagatcattgggtggcgcccagcattcggcgaagcgttcccgacccccgacacacatgaagtcgtggtattttctcatttcttctatggcggattttctcttccaacctcaagattcttccggagaattctgaagttctatgggattagtttgcaccacttaaacccaaactccatagttcgcattgccaacttcatacacgcctgcgaagcttttttgggcattaggccacattttgccttgttctgccgcatcttcttcctcaagctccaactgaacaagagtaaaccatgtgttgttgggggggctggtttccaacttaggggaactttgagccaaaaatacttttccatgcccttcaaaacctcaaacaaaggctggcatgcgaattggttctatgtacaaaaccctgagcctgcactccccgagtactcctgtctccctccagtttatcaggacacttggaactcactgtcgattggagaggaagccgctcaggcgctcgacctgatggaccatatgctgaagctaaaggagcaaggtctgcaaggagaacagatcactcggcattttatcaagagccggctagctccaattaaagagagatctcgtacggccttcgaattttacggcaagcatgatccaaaccatgaagatccagactctcttgattttaaggtcatgaaggagagaatgtacaagatcttctcaaacactatcgtagttagctattcgcacttgctgccagtggtgccatacaacgctttcaatcctcctccaccggagttcgcgttgatgaagtcggatcctccaatcgctcagcgccgatcacctcaccagcagactggtcaggggagtggaggaccaaaaattcggaagacatctgacatagatccttctagaaaagactctgatccgactaacatggagacgggttcttcaaaagaaaccgagccgactacaaaagatcacccgagtgacaatcaaccggcaaccgacaatgtagaacccagcaacgaacccccgactggaaaccagtcggccgaagctggaattggagttaaccaggagcccccgactggaaaccagttgggcacagaaccaaaccaagagattcctgaagttgaaactcaagcgaactaccctcttggaaaggatgccagtaatgacccaggatccagctctcctgcaaaagcacaagagcctactcgtccccgaccggaaatcatcacagatcgcaagatcaagtctcaggcgcaatttgatgtcttggtcaataagatcaagaggcttgaaggggccagggatgaagtcgctaacgctgctaccccactcgtccaagccatgttctttaataacaatggtccgagtacattcgatgcttccgaaatctttgacaagctgagagttgctccggatacatattttaagaatatcaaggaggctggaagtatgggagcgagcctggcattggcgatgaccaaatctctatacccgaagatcgatattgacgccattgatggcttcgcagatggtacaagcgaagaagctgctctcgacctcatcaacgatgcgtag

SEQ ID NO: 101173 - DNA, 201 bp, Oryza sativa
  Clone ID: PAT_MRT4530_98819C.1
atgcggaggtcgcacggcggaggcggacgcaagagatccgtcccctcttcatcacacccggagaagaaagcgatcgaccgaatcaagcgagaagatgcaggccgtcgcgcgggccgcgtctcgctggtgcagccgctcgctgctttcccggccaccgacggcggcggcggcggcgggctagcgcggctactgcggtggtgg

SEQ ID NO: 101174 - DNA, 297 bp, Oryza sativa
  Clone ID: PAT_MRT4530_9881C.1
atggcgttggcgacctttgtcttctcggtggccggcgatggagatgagggcgacggagccctcagtttggtcggctctggagtgaggagtggagatggacgacgcggctggaagagtggagtggagaaggcgagctccgcgttggacacgtcgaggccacgcgtcgagcacgaccagagctcggtcggctctgattcccttcgctctctctctctgtctctgttttcttgtcggctgagggaggttaacaagtgtaaggacaagccaataaatccatgtggattttactggaggtag

SEQ ID NO: 101175 - DNA, 1740 bp, Oryza sativa
  Clone ID: PAT_MRT4530_98820C.1
atggtggcgcacggtgttcttccggcaaaggagatcattgggtggcgtccagcatgcggcgaagcattctcaacccgtgacacacacgaggtcgtggacacttggaactcacttccaatgggagaggaagctgctcaggtgcttgccctaatggaccatatgctgaagctgaaggagcaaggtctacacggagaacagatcacccggcattttatcaagagctggctagccccaatcaaagaaagatcttgcacggcctttgaatttgacggcaaacatgaccccaaccgagaagatccagactctctttattttaaggtcatgaaggaaagaatgtacaaaatcttctcaaatgctatcgtggtcagttattcgcattcgctaccagtggtgccatacaacgccttcaatcctcctccaccggaattcgctttgatgaagtcggatcctccaattgctcaacgccgatcaccccaccggcaaactggtcaggcgagtggaggaccaaaaattcggtctgatactcaaccaaacacctcgaaatcaactagccagtcagactctcgcaagaggaaattggttctgagtgatgatgagggcgatgatgctgagaagactggcaacaaagaagtgactggaaaacaaccaaggcaaactaatccgaagaagaaaacttccagccgtcctatgccaaaaatcagaaaatcttccaggaagttgtccgatatagatccttctggaaaggacgctgagccgactaatatgaagacgggtccttcaaaaggaaccgggccgactgcagaaaatcgcccgagtgacaaccagccggcaaccgacaatgtagaaatcaataacgagcccccgactggaaatcagtcggccgaagctagagtcaatgctgatcaggagcccccgactggaaatcagtcgggtacaaaaccaaataaagatattcctgaagtacaagctcaagctgatagccctcctaaaaaggatgctagtgccgatccagggtccaactctcctgttaaggtacaagggcctgcttgtccccgactggaaattatcacaggtccgatgatcggtgatgaggaagagattcttcggatacaatcagctgaggattctcgcccatccattttagtcaagtggtgggatgacgacatgcaacctcagggaattgtgataaataagcaaaaggaagatgaggaagtatgcctgctgaaaaaggcacaaggccaagctactcgcctcgtaaatagaatccatctcaggaacaaggcgaagactgcgacttttgagaagttagttccccatcttggaacccttgaggccaccagaaaccagctgcacgaagctaaagagcttaccaggaagactgagcatgatctgagagaccggatcgccgagctccaagattccaactttgaactgagcggttcatcaaaagaccgcaagatcaaatcccaagctcaattcgacgtcttagttaacaaaatcaagaagcttgaaggagccagagatggagtcgccaatgccgctacaccacttgtccaagccatgttcttcaatagcaatggtccgaaacgagacaagcgaagaggcgctctcgacctcatcaatgatgcgcagaaagctgccgataagatggccgttgatgtagttaagagattccaggacaacgatctccggccgactggatctaataattctgacgatgaaaagactgatactgattga

SEQ ID NO: 101176 - DNA, 1005 bp, Oryza sativa
  Clone ID: PAT_MRT4530_98821C.1
atgacagtagacttgcaaaatctttgtgaattgacaacactgttacttgatggggggctatcatctgggaacataacggagcttgttgagaagttgccacgatgttatttaagcccattgaaatacttgagtttgcaaggcaacaacatgactggaatgttgccaaatgagatatctcacttaaagagcataagctttctcaatcttaaaaacaacagcattagtggacctatagcagtaggagaattcccgttatgcctccaaagtatatcattactaactttcctagatctttcaaggaacaagttctatggagcattaccagtatggattggagacttggtgaacttgcaatatctgcagttaagttataacatgttctatggggatattccaaacagtattacaaatcttgacagcattcgattcttgaatttagcaggcaacaacatatcagggtcatcctcaacatttgataaaattaacatcaatgacaccaaaacgtcacatgatattaacggagcctgcaccggcagcttattcctcgtcgccgatgcactacatgagcatcatcatgggcggccaaatattgccggcgcgacctgcgtgccgcacgagagggacgcgctgctggccttcaaggaaggtgtcgtcggcgaccccgtgggccgcctcgcttcgtggcgtaccggagaagactgcttccgccattggagaggtgtcaggtgcagcaacctcaccggccatgtccttaagctccacctccgcaacacggatggtggagaggcagctatgtccggcaaggttagtagctccttgctctccttgcagcatctgaggcaccatgatcttagcatgaacaacctccaagctctcccgagatttctcaggatagccggagagggtcctatcccagagttccttcgcctgagatctgcaccgggtaggcgggtgatcaagtttttggggactgcttcccgcacgactgctctgttcgtccaccat

SEQ ID NO: 101177 - DNA, 2259 bp, Oryza sativa
  Clone ID: PAT_MRT4530_98822C.1
atggcggaggagagagaaagcttcgagagccaatgggcgccctccgatgtaacgaaggaaaacctgaaggagatggtggcgcacggtgttcttccagcgaaggagatcattggatggcgtccggcattcggcgaggcattcccgacccccgacactcatgaagccgtggtattttctcatttcttttatggcggattttctcttccaacatcaagctttttgggcattaggccacatttttccctattccgtcacatcttcttcctcaaaccccaaccgaacaaaagcaagccatgcgtagttgggggagctggattccaactgaggggaactctgagccaaaagtacttctccatgccgtttaaaacttcaaacaaaggctggcatgcaaattggttttatgtacaaaaccccgagcctgcattccccgagtactcctgtctccctccagtttatcaaggcacctggaattcacttccaatgggagaagaagccgcccaagtgctcgccctgatggatcgcatgctgaagctaaaggagcaaggtctacagggagaacaaatcactcggcacttcatcaagagccggttagccccgatcaaagaaagatctcgcacagcctttgaattcgacggcaaacatgaccctaactgtgaagatcctgaatctcttgaattcaaggtcatgaaggagaggatgtataaaatcttctcaaatgcaattgtagtcagctattcgcacttgctgcctgtggtgccatacaatggcttcaatccccctccaccggaattcgccttgatgaaatcagaccctccaattacccaacgccgatcacctcgccgacagactggtcaggcaagcggaggaccaaaaatcaggtctgaaactcaatcaaacatctcaagatcaaccatccaatcggactcgtgcaagaggaaattggtcctgagtgatgacgaaggcgatgatgctggaaaatccagcaataaagaggcgacaagaaaactgccaaagcaatccaaccctaagaagaaaacatccaatcgtccaatgccgaagatcaggaaatcttctaggaagccatctgacatagatccttctggaaaagattctaaaccaattgacatagagacgggtccttcaaaagagaccgagccaaccacagaagatcacccaagtgacaatcagccgacaaccgacaatgtaatacccagcgacgagcccccgactggaaaccagtcggccgaagctgaaatcgggaaccaaaccgagatgtccctgaagttgaaacccaagcggacagccctcttagaaaggataccagtaatgacccagggtccagctctcctattaaaacacaagagtctactcgtccccaaccgaaaatcatcacagactttattcgattgtttcacctttatgaatatacaagggtcaatgattggtgatgaagaagaggtcctccggatacgagcagctgaagattctcgccctcccattctgagaatccatctcaggaacgaagcgaaaactgcaactcttgagaggttagttccccaccttggaacccttgaagctaccagaaaccagctgcacgaagctagggagcttgctaggaaaactgaacatgatctgagagatcggatcgccgagctgcaagactccaacttcgaactgagtggctcctcaaaaggtaatatagtgcaagccgccaagatatctcaactgggaaagcagattcagactctggaaaatgacaaggctgaattggcaagacagagggactcggctttgaaagacgttgtagaccgcaaaatcaagtcgcaggctcaattcgatgtcttagtcaacaaaatcaagaggcttgacggggccagggataaagtcgccaacgctgctaccccactcgtccaagccatgttcttcaataacaatggtccgagtacattcgatgcttccgaaatcttcgacaagctgagagttgctccggatacatattttaagaatatcaaagaggctggaagtattggggcaagcctggcgttggcaatgaccaagtctttgtacccgaagatcgatattgacgccattgatggctttgcagataggacgagtgaagaagctgctcttgacctcatcaacgatgagcagaaagccgccgataagatagcaggttatgtagttgagagattccaggacaacgaccttcggccgactggatctgataactctgatgatgaaaaaactgataccgattga

SEQ ID NO: 101178 - DNA, 2268 bp, Oryza sativa
  Clone ID: PAT_MRT4530_98823C.1
atggtagaggagagagaaagcttcgagagccaatgggcgccctccgacgtcacggtggaaagcttgaaggaaatggtagcacatggtgttcttccagcgaaggagatcattggatggcgttcggcgtacgacgaagcattcccgaccccggacacacacgaggtcatggtgttctcctatttcttttacggtgggttctctcttccaacctcaagattcttccggtggattttggatttctatgggattagtttgcatcacctaaacccgaattccatagttcatattgccaacttcatacatgcctgcgaagcttttatgggcgtcaggccacattttgccctattctgctatatcttcttcctcaaaccccaaccgaacaagagcaagccatgcgtagttgggggtgctggatttcaactgaggggaactctgagccaaaagtatttgtccatgcccttcaaaacttcaaacaaaggctggcatgcaaattggttctatgtacaaaaccccgagcctgcactccccgagtactcctgtcttcctccagtttatcaggacacttggaactcacttctaatgggaaaggaagccgctcaggcgcttgccctgatggactgtatgctgaaactaaaggagcaagtcgtagttagctattcacacttgctgccagtggtgccatacaatgccttcaacccccctccagcggaattcgccttgatgaagttagaccctccaactgctcaacgccgctcaccccgtcgtcaaactggtcaagctggcggaggaccaaatatccggtctgattctcaacccagcaccactcaatcagccaaccaatcagacttctgcaagaggaaattggttctgagcgacgacaaaaatgatgactctgaaaaagttggcagcaagggggtgactggaaaaccaagaaggcaagctaacccaaagaagaaaacatccagtcgtcccatgccgaaaatcaggaagtcctccaagaagccatctgacatagatccttctggaaaagactctgagccgactgacatggagacgggcccttcaaaagaaaccgagccgaccgccgaagatcgcccgagtgataatcaaccagcaactgacaacgtagagaccagcgacaagcccccgactggaaatcagtcggccgaagcaggagttggtgctaatcaggagccctcgactggaaatcagtcgggtacagagcaaaataatgacatctcggaggtagagacccagcctgatagccctcccaaggcgagcgctggcgccaactctggaactaattcccctgttagggtgcaaggacctgctcgtccccgaccagaaatcataacagaggacaaggaagtatgtctgctgaaaaagacactcggccaagctactcgcctcgtaaatagaatccatctcaggaacgaggcgaagactgcgactcttgagaaattagttccccatcttggaacccttgaggccactagaaaccagctacacgaagctaaggagcttgctaggaagactgagcatgacctaagagaccgaatcgccgagctccaagactccaactttgaactgagcggatcgtcaaaagtgcaagctgccaagatatccgagctggaaaagcggatccaagctctggagaaagacaaggccgaattggcaagacagagggacttggctctgaaagatgttgaagtgcaagctgccaagatatccgagctggaaaagcggatccaagctctggagaaagacaatgccgaattggcaagacagagggacttggctctgaaagatgttgaagatcgcaagatcaaatctcaggctcaattcgatgtcttggtcaacaaaattaagaggcttgagggagctagagatgaagtcgccaacgccgctacaccactcgtccaagccatgttcttcaataacaatggtccgagtacattcgatgcttccgaaatcttcgacaagctgagaattgctctggatacatattttaagaatatcaaggaagctggaagtatgggagcgagcttagcgttggcaatgaccaagtctttgtacccgaagattgacattgacgccgttgatggctttgcagacgggacaagcgaagaagccgcccttgaccttatcaatgatgcgcagaaagccgccgataagatagtcgttgatgtagttgagagattccaggacaacgacctccggccgactggatctaataattccgatgatgaaaaaactgatactgattga

SEQ ID NO: 101179 - DNA, 2124 bp, Oryza sativa
  Clone ID: PAT_MRT4530_98824C.1
atggcatacacatccaacgctgcctataggaaaggagcaatctccaagggtacttgtgggaggctaattctggagaaaactgcatctgcaaaacacactattgcgacggcagcagttcctagccctcaatgccaaagtcggtgcggggatgttgacatacagtacccgtttggcattggagcgaattgctcactcgcagaattgttcaatgtcgaatgcaaggtccaacatggcatttctaagccatttatcggcaacgttgaggtactaaatatttcgttgagccgtagcacattgcgggtactcaatggcatctcaaccttttgctacaatgcctccggtcttatgggaggggttcattttcgtttcaatgcaaagaatacccccttccggttttcagatgtctacaacaagttcaccgtaattgggtgcaacacccttgcctatatcgccgatgatggtggcacgggttaccaaagtgggtgtttctcgcagtgtcgtgacctgtcagggctagtggatggctcttgttccggcatgggctgctgccagaccacgataccaagaggaatgtactactataatgttacttttgataagagattcaacacaagccagatctcgaggttcggtcggtgcagctatgccgtgctgatggaggcagcatcgttcaatttcagcacgacatacataaacaccaccaagtttaatggcacaaacggcgggcgggtacccatggtgatcgattgggctatcagagagaagtcatgcgatattgccaaacagaacatgacaagctatgcttgtcttagtagcaacagcgagtgtgtggcttccaccaatggacctgggtacgtctgcaactgctctcatggatacgaaggtaacccttatcttccagacccacatggatgccatggggttattataggcttcattgttctcatgatcattgccttctgcggacaattggtaattcaaaggagaaaactgaccaaaatcaagaaagaatattttcgccaacatgggggtatgattttgtttgagagtatgaaatcaaaaaaaggtcttgctttcacagtatttacagaagctgaactcatacatgccacaaacaattttgacaagagcagaataattggccaaggaggtcatggaacggtatataaagggacagtcaaggacaacatgctagtcgcaattaaaagatgtgcactagttgacgaaagacaaaagaaggagttcggccaagaaatgctcatcctatcccaaatcaatcacaagaacattataaaactcctaggttgttgccttgaggtcgaagttccgatgctagtctatgagttcgtcccgaatggaacattattcgagcttatccatggaaagaaccaagggttgcaaatctctttcagcaccctcttgaggattgctcatgaagcagctgaagggcttcacttcctacattcctatgcatctccaccaattctccatggtgatgtgaaaactgccaacatacttcttgatgagaactacatggccaaagtgacagacttcggagcatctatactagctccatccgacaaagagcagtttgtcacaatggttcaaggtacatgtggctatctcgatcccgaatacatgcaaacgtgccaattgaccgacaagagcgatgtgtatagcttcggtgttatccttctagagattctcacaggccaagtgccactgaagctcgaaggacctgcgatacaaagaagcttgtcatcagttttcctatctgccatgaaggggaacaatcttgactcggtgttggtgagcgacataaaaggccaagagagcatgccaggtcgactcggggggctccctgagctagccaagcaatgccttgatatgtgcggcgccaacaggccatcgatgaaagaaatcaccgacgagctgggccgattgaggaagctttcactgcatccttgggtacaagtcgatgcagagatggaaacagagaaccttcttggcggaccatctacaattaatagtggtcttgagattgaaacaagtagtaccggctatcttggggaggaacgtgagaacctaccgatgaacccaggaagtacgtattatgcgaggtga

SEQ ID NO: 101180 - DNA, 2064 bp, Oryza sativa
  Clone ID: PAT_MRT4530_98825C.1
atggcggaggagagagaaagcttcgagagccaatgggcgccctccgatgtaatagaggaaaacctgaaggaaatggtggcgcacggcgttcttccggcgaaggaaatcattgggtggcgtccagcattcgacgaagcgttcccgacccccgacacacatgaagttgtgatattttctcatttcttctatggcggattttctcttccaacctcaagattcttccggggaattctgaatttctatgggattagcccgcatcacttaaacctgaactccatagttcacattgccaactttattcacgtctgcgaaggttttttgggcattaggccacactttgccctattccgtcgcatcttcttcctcaagccccaaccaaacaaaagtaagccatgcgtagttgggggagctggattccaactaaggggaactctgagccaaaagtatttctccatgccgtttaaaacttcaaacaaaggctggcatgcgaattggttttatgtacaaaaccccgagcctgcactccccgagtactcctgtctccctccagtttatcaggacacctggaattcacttcaaatgggagaagaagccacccaagcgctcgccctgatggatcacatgctaaagctaaaggagcaaggtctgcaaggagaacaaatcacccggcacttcatcaagagccggctagctcctatcaaagaaagatctcgcacagcctttgaattcgacggcaaacatgaccctaaccatgaagatcccgaatctcttgaattcaaggtcatgaaggagaggatgtataaaatcttctccaatgcaattgtagtcagctattcgcacttgctgcctgtggtgccatacaatgccttcaatccccctccaccggaattcgccttgatgaaatcaaaccctccgattacccaacgccgatcacctcgccagcagactggtcaggcaagcggaggaccaaaaatccggtctgaaacccaatcaaacatctcaaaatcaaccatcctatcggactcgcgcaagaggaaattggtcctgagtgatgatgaaggcgatgatgctggaaaatccagcaataaaggggcaaccagaaaactgccaaggcaaaccaaccctaagaagaaaacatctagtcgtccaataccaaagatcaggaaatcttctaggaagccatctgacatagatccttctggaaaagattctgaaccaactgacatggagacgggtccttcaaaagagaccgagccgaccgcagaagatcacccaagtaataatcagccggatcccgacaatgtaaaacccagcgacgagcccctgactggaaaccagtcggccgaagctagaatcggggttaatcagagaatcgtgataaacaagcaaaaagaagatgaggaagtatgcctactgaaaaaggcactcagccaggctactcgcattgtaaacagaatccatctcaggaacgaagcgaaaactgcaactcttgagagaggcaatatagtgcaagctgccaagatatctcaactggaaaagcagatccaaactctggaaaatgacaaggctgaattggcaaggcagagggactcggctttgaaagacgttgaagaccgcaaaatcaagtcgcaggcccaattcgatgtcttagtcaacaaaatcaagaggcttgaaggagccagggatgaagtcgccaacgctgctaccccactcgtccaagccatgttcttcaataacaatggtccgagtacatttgatgcttccgaaatcttcgacaagctgagagttactctggatacatattttaagaatatcaaagaggctggaagtatgggggcaagcctggcgttggcaatgaccaagtccttgtacccgaagatcgacattgacgccattgatggctttgtagatgggacgagcgaagaagctgctcttgacctcatcaatgatgcgcagaaagccgctgataagatagcatttgatgtagttgaaagattccaggacaacgaccttcggccgactggatctgataactctgatgatgaaaaaactgataccgattga

SEQ ID NO: 101181 - DNA, 954 bp, Oryza sativa
  Clone ID: PAT_MRT4530_98826C.1
atggcgtcctccccgcgccattccacccaccaccccaccttgctcctccgccgccactaccccaacttctgcgccctcgcccccctccgcccgaccaggcaactccccagccttccccagcagcagctgcagcagaagcagcacgttggccatgatccgtcgccgtcggagcccaccaccgcggccgcctcgccggcgacggcggcggcggcgggggcgctgcgtgtggggatcgtcgggttcggcaacttcgggcagttcatcgcgggggggatccagcggcaggggcacgcggtgctggccacctccagatccgactactcgggctactgcgcccgccacgggatccgcttcttcgccaccgccgacgagctctgcgaggccgggcccgacgtcctgctcgtctgcagctccatcctctccaccgaggccgtcgtccgcgccatccccttccgcaagctccgccccggaaccctcgtcgccgacgtgctctccgtcaagcagttcccccgcaacctcctcctcgagatcctccctccggggttcgggattgtatgtacgcaccccatgtttgggccggagagtggaaagcatggctggagtgggctaccttttgtctatgacaaggtccgtgttgccaaggaaggggatcaggcggccaagtgcgaacagttcttgagcatctttgagcgggagggatgtaggatggtggagatgttgtgcgaagagcatgatcgctatgccgcgggaagtcagttcatcactcacactattgggaggattttgtcacagctaaaccttgagtccacaccaatcaacaccaagggttatgagacccttctgcaacttatagacaacctggacagggcatttgagaaggtgaagcagatgctctatggtaggctgcataatgtactaagaaagcagatagaagagagggtcccaatcccgtag

SEQ ID NO: 101182 - DNA, 431 bp, Oryza sativa
  Clone ID: PAT_MRT4530_98827C.1
tttttggtttttattacatgttttttttttattcttttgtttatttttaccttttttaaagcacggacgggggtagacatgcaaaaaactaaagggggcaaaacaaaaagtcaccgagctaaaaggccagcccaccaatccggtgcaacaagcaaagcggatagaacaggcgggcctcaaaaaaagagaagaaagggcccaataaaagtggccaaggggggggcgaaaaataggaacggccgtggagcccaaaggaaacctccatgcggcggagaccaagagccggactcaccgccccaccgctgcactcaggtacatggccccgggcccacggacggaagaccttggcgtggacggcggaccctaaagagcggtgggtgccaggccggaaggaactacgaggcgccagcggtgcagtagaattacttgct

SEQ ID NO: 101183 - DNA, 567 bp, Oryza sativa
  Clone ID: PAT_MRT4530_98828C.1
atggagtcggccttggcggcggcggaggccgaggcagaggcagaggcatacgcgggcggcgaggctgaggctgccgtgcacgcgcgctcgccgtcgccggagctccagcacggccacctcccatgcccgccgatgatcagtggagatgaagctgtagatgaccatgtccctgagctggcccttgacgacacagtagttgcacagcacggcctcctgctggaacccggccttctcgagcgcgcgccgcgacgccgcgttgtcgacgtcgacaagcgcctcggcaagaggatcagcggagatggagtcggcctcggcagtggtggcagaggcagacgcgcgtgcggcggccgcggcgacggcggaggcagacgcgtggcagcggagatggagtcggccttgacagcgccggcggaggccgaacggttggggaagggcgggggcggcgctgggcggggccggacgggcgccggcgccggccgtgggcagcggcggcggaaaccctctccccgtgtgcgactcgcaaggaggaggagacgggaaaagaatagcgaaccatttttttcgtaa

SEQ ID NO: 101184 - DNA, 716 bp, Oryza sativa
  unsure (1)..(716): unsure at all n locations
  Clone ID: PAT_MRT4530_98829C.1
ctganggttgggacttcgccatgtattttngaattaacgctttcaaaccatgcgtgaaacccaaggagtgnttgtccacgaatgagttggncgnagatctcgggaccanatcgtctnccaaatggcggntacctgggaaagcaaggggaggcattggnaccatgtgnatgactnggcctttagacatatatttgagtgaggtgtttcaggaagacatggatgnnatggcctcagggtttgcacttgcttgtttagtaggcagtttagaccnaacncgcaagtttgcacgntgtgggaactgctggaaagcaactgttgcaagggtgtgtgtgtccctgccatgaggaaaaccaagggacatgcaatggcaaatggcnatgcaaatgaataatggaggaaggaatgagacnnatgagaggagcttgccatgctatcatgtggtgagatatgcatgtggatgggcgttgggttaccgggctggtgtgatatgagctgcatgttgcctggaacaattgattgcgtgaatgaatgttgctgcttgctgtgttggttgcggttggcctgtgggatgccatggttgggattgtgaggccagcacattcgattgcacagatcgagcatcatttggtagaaaaggaaaaaggggtaaatttagatgaaaaaagatcaccatggaatgtgacgctgcattattagaaaaaaaaaaaaaaaaaaaa

SEQ ID NO: 101185 - DNA, 485 bp, Oryza sativa
  unsure (1)..(485): unsure at all n locations
  Clone ID: PAT_MRT4530_9882C.1
cattgcngangttgtcgcccngnagtcnccatccacctccccaagagattncncggtgccnccttcaagaagcgtgctcccaaggcgatcaaggagatcaaggacttcgctaccaaggccatgggaacttccgatgtccgtgtcgacccccagctcaacaagaaggtctgggagcagggtgtgaagggtgttccttaccgtatccgtgtgcgcatctcccggaggcgaaacgactctgaggatgccaaggagaagctgtacagctacgttcaggccgtcaacaccaagaaccccaagggcctgcataccgtcctggttgatgagtaaagaattgttatctgtggaacgacaaggcgaaaagggacaaaacaaacatagggtttctggcggcatctgggctttacggagtttttgattggcattagcttcagaccttcctcaacaatgagcaatgaggggttcgaccaaaaaaaaaaaaaaaaaaa

SEQ ID NO: 101186 - DNA, 378 bp, Oryza sativa
  Clone ID: PAT_MRT4530_98830C.1
atggggcttgtccctaagctcgaaaagatcatgtggaccttcaccgggatgaactcgtctttctctggcatcgacaatataatgcaaccttccgagatattgaaggagcttgagttcaacggcgagtctctccctaaccaggtgaaagaagccattgataagcataaagataaaattcattatacatactacaaatgggaaattcatgagaaaacacaagggaacgcggaagcaaactacacgaacatggaagctcttttaaaaatcagtcgattacatcaccatgatacaagggaagggaagaagtacagtgcagtcctattgtttgctttcctagtgctgatttcagctgatggcaaccagatttgttgtccttga

SEQ ID NO: 101187 - DNA, 510 bp, Oryza sativa
  Clone ID: PAT_MRT4530_98831C.1
acacccaagtaactgtcgatgaacacactgcagcccaaccaacagtgaccgaagaaatgctttgatggatgccggatcttgcttctagatggatgatgatcagcttcctgttggcaagctctcctggtgatcgttcttcttcagttcttgacctaccacccatgctggctagcattcctgtagtgctgatctcggagtcccctgctgaattttgcacctccggcgccgagaggccagttcactgtacatcccccctgagacaccatgtcggtatttgtttgattggatatgatttgattaagtacgatgatttttggttctgaaaatttgtatcatgattggttggagcgtgtgattaggatgcttatatttgcagcagaggtcgatcgtattttgttttgctgtgcacacaaatgttcgtcccaatgtcttgtcagatattttgtagcttttgattatcaagtactccgtatttatgtttcgtaatatgaaaccccaaaaaaaaaaaaa

SEQ ID NO: 101188 - DNA, 372 bp, Oryza sativa
  Clone ID: PAT_MRT4530_98832C.1
atggggatccagtgcttctctgacttcacagtgaagtcggaggatctcaatccgagggagagagggcacggggggaggggggagaccgcggcttcggggcatggtgtcgaaggcggttgcggagaggaagtcgatgacggcacggctcggcattggctcgggatgcggtacgtggccgtggaaaaaggtggcggcggcgcggttgtggggcgccacgatgtgcccctgggttcggcagtggtggcgcaatgcggcgcgatgatggcctggcggcaactggcggcttgggcgccgcagcacggcggcggtgctcgggaatgggcgagcagcggcggcgacatggaggagggagaagggcgggggatcgcctag

SEQ ID NO: 101189 - DNA, 2265 bp, Oryza sativa
  Clone ID: PAT_MRT4530_98833C.1
cactggtgccccgggctgcgcgtccttcccccctggccgactaccgcacccatccctcccgcccttcccggtcacggccgctgccgtccccctccccccccacgtcctctgcgcccccggcggccctccctcggcgcatttccactagattcagggcacggtcgagcgccccggcgtccctccctcttcctccccccccccgcccatccgggccaccagccccccgacgctggtcgcctccgccaacaaccagttggctagcctgaggcctctgatccccaaccgaagctccacgccgcaggcccgctcgacgttctcgggtttcagtgccgctcccacccggtcggcctagtagcaacagccgcagcagcagccatggccgacaagggactcttcgccaacgacggctccttcatggagcggttcaagcagatgcaggagaaggagaaggagaaggccgccgccgcctcgtcgtccgccgccgccgcggccaaggccaccaaccccaagccggttgtcgtcgccgccaacaccccgtcggcgagcaagaggccgctggagctcaaggggggcgaggtgaagaaggccggttcgatctcgtcgggcgccaagctcgcctttagcctcaagaagaataaggtcgccgtggcgccagtcaagtttgcggctgacgatgaggatgaggaagatgttggtgcggacagggaggagcctgtgaagcggcagaagtatgcgcaacctgaagctcctgcatcggtggctgccctgtcaggggtcgttggtaatcatttattcacatttgttcctgtaatcgcattcttttcctgtgacatagtatcaaatacttttgttatatgtttgttggttactatgggttatattatagtccatctccaactggattggaactttggatttaatcattggatgtattttgattataatgaaagcacaatcgaaatagtagccccatcaccaccaaatgatatgactgtgaagcaagttgctgacgaactagaaaattttgatgccattactcaagaagagcttgtgaaaagttcatggccacgtagtactcgatgctgcctacacaaaaatgctaccaaagaagctgcagagaaggctaagattcaggctgacaatatcggacacaaacttctgtctaagatgggatggagggaaggtgagggtcttggcagtgagagaagtggacgtgcagatcccattatggctggagacgtgaagaaagaccatcttggtgttggcgctgtccaacctggtgaggtcacatctgaagatgatatctatgagcaatacaagaagcgaatgatgcttggctaccgttataggccaaacccactgaacaatccaaggaaagcatactactgatataatgggaggtcatccaaggggcgatcagagaagccaagaagttcatttattcagcatataatctttgaatgccagaggcttcccggtgttctgcagtagctttggttttacgtagtgttacatctatgctactttcaacatgtcatttggtgtgtgtttccccttttgtttcacatggtgatgtattcatgttgctattgatgaataatgtatcttcatgattattcaacccatattgaacttatgtcaagtgagagaagtggaaatgcagatcccattatggctggagacgtgaagaaagaccatcttggtgttggcgctgtccaacctggtgaggtcacatctgaagatgatatctatgagcaatacaagaagcgaatgatgcttggctaccgttataggccaaacccactgaacaatccaaggaaagcatactactgatataatgggaggtcatccaaggggcgatgtaaggcacaattttgttacattttagctaacagaactaactactgcctagggatatcactaacagtattgaaagtttttgttcaccagcagagaagccaagaagttcatttattcagcatataatctttgaatgccagaggcttcccggtgttctgcagtagctttggttttacgtagtgttacatctatgctactttcaacatgtcatttggtgtgtgtttccccttttgtttcacatggtgatgtattcatgttgctattgatgaataatgtatcttcatgattattcaacccatattgaacttatgtcacgtgattgctaaaaaaaaaaaaatcaaatatgtggaaactgtaaagcatatgcttccgaaatactaatcgaaagttattctagttgttttg

SEQ ID NO: 101190 - DNA, 401 bp, Oryza sativa
  Clone ID: PAT_MRT4530_98834C.1
cttcagtcgggtcaaaaaatattttccacttattgggtttctaaacaagatccgatgatggaacagacggcactgctttagtgaactgaacttcattccgaattagcttattcttaaaagaccatgggtcccttaataaccggtgaaccaatattctctctgattctcttcttctgccccactatattcaccatggaaattaactttagtccactaataaatggttctggtcagaatccacttcacaggaaaaaaataggaaataatctttccaaggaatccattgtccaaataatacttcccaagagaatcatcttgatgccccagttcatggtatttacttaattaccactctgatactttacttacctcatctctccatactagatacccaaaaaaaa

SEQ ID NO: 101191 - DNA, 847 bp, Oryza sativa
  unsure (1)..(847): unsure at all n locations
  Clone ID: PAT_MRT4530_98835C.1
ctgtgaagtaagtttctgacaaattatcaaattttgttgccaaaaatggtagacagtttgagaatgtcacgcgtcaaaggaatactggagatacgccattcatgtttctgctggataagaactgttcaaactacaaatactatgagtntcggcttgctgaagaagaaatgttacttgctcagtcaaaggaggcccaggcattaaaacatgctagatcaagcactccaagcttcagagcaccaattgcccaacatagaagcttatttgaacaaaagacttattatcatacacctgctttagcttttgttggggcatatgaaggtagttctttccaaggaaattcatctggctatggtgagcctcccaaggatccagtagcattgatggaattctacatgaagaaagctgcacaggaagaacggaaaaggccaccgaaacaatcaaaagatgaaatgccaccacctccttctcttcaagctccttcttccaagaagggacatcacatgggcgacttcattcctcaagaagaacttgaaaagtttatggcacgttgtaacgatgctgctgcacaaaaagctaccaaagaagctgcagagaaggctaagattcaggctgacaatatcggacacaaacttctgtctaagatgggatggagggaagctgagggtcttggcagtgagagaagtggacgtgcagatcccattatggctggagacgtgaagaaagaccatcttggtgttggcgctgtccaacctggtgaggtcacatatgaagatgatatctatgagcaatacaagaagcgaatgatgcttgcctaccgttataggccaaacccactgaacaatcc

SEQ ID NO: 101192 - DNA, 855 bp, Oryza sativa
  Clone ID: PAT_MRT4530_98836C.1
atggaagcagacgcgagccatacacccaccacctcctcctccgtctccgtctccttctcctcctcgtcgctgtccacttcctcctccacctcctccctcgtcgacaatggcgcgcaagaccggcccaagagctccaagcccaaacacgccgccaagaagcgcaagagagcggccgcggaggaacctgccaatgccgcccacggcgcaggggaggataccagcagctgcagcaccgacgacaacgcggcggcgagcggcaaggcgcaggcgggcggcggcggcggcggcgtcgacagcagcagcacctgcaccgccgcctcggcgccgaggagcggcttcaagcacccgtcgtaccgcggcgtgcgccgccggagctgggggaagtgggtgtcggagatccgggagccccgcaagaagtcgcgcatctggctgggtaccttccccaccgcggagatggcggcgcgcgcccacgacgtggccgcgctcgccatcaagggccggaacgcgcacctcaacttcccggacagcgcccacgagctgccccgcccggagtccacctccccggcagacatccaggccgccgccgccaaggctgccgccgaggtgcggtgcgaggaggagtcgtcgccgtcgtcgtcgcccaccgccgagcaacccgaggaggaagccgcctgccctgacacggtgcacgccgacggcggccaggacaatgctctcttcgacctacccgaccttcttctcgacctacgggacgggctctggtggtcgccggtgtggccggcggcactggcggccgaggagtacgacggcggcgacgccgtcgtgctcaatgagccactcttgtgggccgagtag

SEQ ID NO: 101193 - DNA, 1248 bp, Oryza sativa
  Clone ID: PAT_MRT4530_98837C.1
ttcgccttgggggtttttttttttttttttttttttttttttttttttttttacgcacaactcatgtttatttagtaccattacattacagaaaaatgggaatccaatgatacattacatactcctagcaattacaataataatggtaatgatatgacgagcaataattcaaccaaaaatggacagaacattaagaaaagaacaccttttcaacaacaaaaaaaattaagagagaaaaaaaacaacagaaaaaattatggaaggcgcgtacaatacagagatctcgctcaaacttgtcatcaacctcatcgtcacagccccaaccagacgctcgccaaggcaagaaccaccccgacaccagcaccggccgtcaccctcgccgccgcgagagacggggtcgtcgcgtccggcgtcgcgtcggcggcctcgggcgcgtcggcgaccgacgtggccggcgtcttccccttcttcttcgtcgccggcgacagcggcgcgggcgcgggcgccggcgtgctgtagatggccatcgggagcagcaccttgtccacctggtacacgacgaggttgtcgccggtgtagagcgcgttgccgacggtggcgttgacgacgccggtggagatgttcacctgctgcccctccgccgtcacgttgagcgggtactgccccggcgagttgctgccggcctgcgtccggagcgggttgctgacggtgtcgaactgcgacatggggatcagcgtggacagcacgtggtactgcaccagcgagttcttctgctggtcggacagcgagttgagcgtgccggaggggagcgacgtgaacgcgttgtccgtcggcgcgaacaccgtcagcccgttgcgcgagctgttcagctggttgtcgatctgctccgccgcgccggtggaccgcatcagcctgatgagcgtgttgaactgcccggccttggcgagcacccccgtgatgttcgtcgtcttcgtcgacgccggcgcgggcgccgctggcgtcgccggtgccgccggtgtcgccggcgccggcgcggccggcgccgccgtcgggccctgagccgacgccgcgatggccatggacacaacaagacacagcacaagtctctgcatggcttgcatggtggatgctgtcacagtgtcaaaaaaaaaacttggtgattgctattggttgtgaacttgtgatgagctttctgcatgcaatgcaactcaactgatcaagaattcaagatcgatcctaacgcgtggg

SEQ ID NO: 101194 - DNA, 476 bp, Oryza sativa
  Clone ID: PAT_MRT4530_98838C.1
aaaagggaaacaactttttttttttgacatttcatcaaacatatcaccccccaccatttcccccctaccatgattgaagtttgccccgctgaccaaaacccccttttacaaaacctgggcccccttgaaacataccccccccaaaatattttattcaaaacaaaatgcttctttgccaccccccctttaataacaaatcctttttggaccattttcaaaaaaccaaagggccccaaatttgtccacctttccccccccctcgaacccccaaaaaaaccaaagccttaagaggacccccccccaaaaaaaatcatgttgcaaatttccccaaaaaatctctcctgccgtcttgtccaaaggccccccctttttcaaaaacccaagttggggatttcacccccaaattgtgcctatggaaaccccctttaaataaaatggcccaaaatggggggggatcctaatttatggccctttta

SEQ ID NO: 101195 - DNA, 225 bp, Oryza sativa
  Clone ID: PAT_MRT4530_98839C.1
atggcggcggcagctccccgcgcgcgcaaggcggacgacgacggcgcggtcgacggtggcgtcggcaacgcacgacgacaaggcagcctcggcagcagagggcaaccggcggcgggcccggcagggggcgacgacggcggagtggtggcgccggcggagctgtatctggggagtggccagtgggggcgaaagcaagatctaaccgagaaagtgagggcgaagtga

SEQ ID NO: 101196 - DNA, 1789 bp, Oryza sativa
  Clone ID: PAT_MRT4530_9883C.1
cgatccttggcgatcgatcgagctagctgctgcgaaaatggcggcctcctccttcctcgttgagtgcctgtcatggcttgtcgtcgtcctcttctccctgtacatcttccagcttctccgcgacgcccgccgccgcctccccccgggtccctggccgccgaagccgctcgtcggcgacctcctcgacctcggcgaggacggcaagcagcaccgcacgttcctccgcctcgccggccgctacggcggcctcatgtgcctccgcttcggcatggtgccccacgtgatcgtctccaccccggacgccctgcgcgcggtgttcgccgccgccggcgccggcggcggcggcggcggggaaggcaagaaggtggatggcatcgcgggcctcccgagcctcgacgtgctcagcgccatgggccaccgcgcgcacaccatcttcgcgctcccgagccaggacggcaagtggcgcgcgctccgcaagttcgccgccgccgagatgctcgcgccgcggcggatctcgtccgcggcggccggcgcgcagctgcagaccaagatcgtggaggcgctccgccgcgaggtgtccgggcacgcggcgcggggcgccgccgtggtgttcaggcacgcggtgctcgactccatcctgagcctcctcctcggcgtgctctactccaccgacctggagcgcgaggagcgcgccatgttcagggacctcattgaggagatcgtcgggatgctggggacggcgaacgtctccgacgtgttcccgccggtggccgcgctcgacctccagggcctccgccgcaggatgaccgacctcctcaccatcatgtaccgccacttcgacgaccaggtcgccctgcggcggcgcagccgggacgccggcgaggcgcgcaagaacgacgtgctcgacaccgtcctcgacaaggaggagagcgagtggaagcaggagggctccctgctaagccatgacgtcatgcgagttctcctctccgatttatacggcgctggagcaagcacgacagcagcgctaatcgagtggggaatggtggatctaatccagaacccagaggtgatgaccaaggtaagggaagagcttaccaatgttctcggggacaagctggtgatggacgaatccgacattgcccgcctcccctaccttcaagctgtcgtcaaggagacccttcgtctccgaacggtggtacccttggtaccccgcaaggctgaggtcgacatcgaggtgaacggctataggatccccaaggggaccaacgtgatcctcaacgcgtgggcgatcaaccggagtgccgacgcgtggtcggagccggacaagttcataccagagaggttcctcggtggcgagactaggggatatctgggccaagacttcgaaatgatccccttcggcctcggccggcgcatctgccccgggatgccgcttgctcagaagctcatacccctcatcatcggcacgctactccatcggttcgagtgggagcttccggcggatgcaaaggagggtgggatagacatgacggagaagtgtggggtggtgttatctctagttaaccccctcaaagccatacccaaggaaatatgagttatattcggttaatttcatccagtaatccattgtttgtaagtgtcatagtacatgagatctttagggactagggaacctatcatactgaaataaatttaaataagcctgataactctttgtatcccattctactacgagtgatgtaataacatccaaaaattttgaggctcaaaaaaaaaaaaaaaaaaaaaa

SEQ ID NO: 101197 - DNA, 423 bp, Oryza sativa
  Clone ID: PAT_MRT4530_98840C.1
atggaagaggaaggggatccgtcgtttggcttgccgccgcggcctcgcacatcgcgggagagggagggacgggccatgtgggcctggctgcaaatttggagtggggaggtgatgcggccgcggagcgagagcagcgcggcgaggatggcggtcccgcggctggctcgcgctggggatgtgaggagaggcgagcgcagcctgcggcgggcccgcgcctggcgcgcgcgcgggcgggtggggagggaagaaacagcgcgcgcgatggggagaggaagcgagcgcgtcgcgcgggctggtggggaggggagaagtcacacgcaatgggggagtggagcgcgcctggcgtcggcggcggccggaggatgcgctcggtggaggagggaggcaaaaggcgctgtgggatggaacacatcgaaccgttga

SEQ ID NO: 101198 - DNA, 420 bp, Oryza sativa
  Clone ID: PAT_MRT4530_98841C.1
gttgacggtccttatcgatcagtttcgaccgtcaatattaccaaaatagaggagaactagttatgcttgcaatgcatatatatgttagaataataatattccactagtattatgtttactaaccttttgcagagaatgatcattaaatggaggagaatcgacatcaattcagacaataaatcaattggacgatgtcgagaatcagatttatgcatgaatgggccaagaactcaaaattgacacgatgaattgggccaaaattcacaagtttgcataaaggagcaatggaggagaccgccagccaaagatgggccaggatggcctagcccatggttcggccgaacccatcctgacgccttggatgcagggttcggcgtggacgtccaggattgcttcccaatgacggttggagggcacttt

SEQ ID NO: 101199 - DNA, 1287 bp, Oryza sativa
  Clone ID: PAT_MRT4530_98842C.1
atggttcccgtgggatccatcgagtgcctgaggaagagatgcaggcagctacgcgtgctgatccatgtcaacgatcaccggaaggcagtcgtcgtcctgcacgccggcgaggacgggaagccggatcacgtcctggtgcagaacgtctctcccgaaggcgaggcttccgtgcaatcaacctaccgcatcgatgtgtcaggagaaaccccagagtcgcaagctgaaatgcttaacgactggtacacttcattccgaatggatactacaggagtcctctacgactccgaccagaatgaagagccacttctccttgtgcaaactgaccaaccagcagctattggcaagagaaagaagtttactttccctgatcagcgcaaacgagttaagacaatgacaaagaaggacttggaatcctacttccacatcacacaaaaaagtgctgctcatattggtctaagtattggcacaactgcactcaaaaacctctgcagggctaatgacttgcccagatggccatatagacagatcgctagtttggacaacaagttcaacaacaatttgaagaaacagatcactgggtggaatcttggcaaagcggttcagggtgttactaaagctttcaagctccgcaaggaaaaggaagaattttaccaaaaaataatgtcaagtatgccggagcaattgcaaagtatagacgagattgtgaatagcctaccagaagcagacgatgacatcgacattgaagacgatgaagacaatgatgatgtgatcgaggataacgatgatgacaacagtgatgagaactatacatcatcgaacgtcccgagcgatggtgttaccgccggcggtggcgccggatccgggaagctcccgatggtgcccctgggatccatcgagtgcctgaggaagagatgcaggcagctacgcgtgctgatccatgtcaacgatcaccggaagatggtcgtcgtcctgcacgccggcgaggacgggaagttggatcacatcctggtgcagaacaactcgcccgatgccgaggcttccgtgcaatcaacctaccgcatcaatgtgtcaggagaaaccccagagttgcaagctgaaatgcttaatgactggtacacttcgttccgaatggatacaacaggagtcctctacgactccgaccagaatggcatagacgagattgtgcatagcctaccggaagcggacgatggcatcgacattgaagacgacgaagacaacgatgaggtgatggaggataacgatgatgagaacagtgatgagaactaa

SEQ ID NO: 101200 - DNA, 1038 bp, Oryza sativa
  Clone ID: PAT_MRT4530_98843C.1
atggcaaccggcggatcgtcgtcgtcgtccaacgtcccgagcggtggtgctgccgccggcggcggcgccggatccggcaagctcccgatggttcccgtgggatccatcgagtgcctgaggaagagatgcaggcagctacgcgtgctgatccatgtcaacgatcaccggaaggcagtcgtcgtcctgcacgccggcgaggacgggaagccggatcacgtcctggtgcagaacgtctctcccgaaggcgaggcttccgtgcaatcaacctaccgcatcgatgtgtcaggagaaaccccagagtcgcaagctgaaatgcttaacgactggtacacttcattccgaatggatactacaggagtcctctacgactccgaccagaatgaaaaataccccaaagtcatatatggtgtgccgagaggacatcctgggggagatgtgccaagatctctggccattttaccacctgctcccaagaaaaatcaacatggcaaagctcctgcaacggaaagtaattcttccttggtagaagagccacttctccttgtgcaaactgaccaaccagcagctattggcaagagaaagaagtttactttccctgatcagcgcaaacgagttaagacaatgacaaagaaggacttggaatcctacttccacatcacacaaaaaagtgctgctcatattggtctaagtattggcacaactgcactcaaaaacctctgcagggctaatgacttgcccagatggccatatagacagatcgctagtttggacaacaagttcaacaacaatttgaagaaacagatcactgggtggaatcttggcaaagcggttcagggtgttactaaagctttcaagctccgcaaggaaaaggaagaattttaccaaaaaataatgtcaagtatgccggagcaattgcaaagtatagacgagattgtgaatagcctaccagaagcagacgatgacatcgacattgaagacgatgaagacaatgatgatgtgatcgaggataacgatgatgacaacagtgatgagaactag

SEQ ID NO: 101201 - DNA, 1139 bp, Oryza sativa
  Clone ID: PAT_MRT4530_98844C.1
ttggttttttgagtaaaggggggttaataaattttatttttttttcttttttttacaaggtccaaccctgactccataataaggccatgtgacataatataatagaaggggggcataccttcgacattaaaactacggaaaactttcaggggttcttagggaacagcagttcaacttgcaaactcaacatgaataccgctcctttcaagacattttcagccagaagtaaaatttaagaggggtaagcaacatcaccttcaaagtgagattaattgtaataaatggcagccagaggccaatcatatgcatggtgaattgaagtactacgttgacggtatgtaacgccagcttgatcaatttgccagctcaaaaaacgttcagatcgatgagctagaacactagaaggtaggcacgacgccgtagccggcgaagtcgagcatgatctgcggcggcggcgcggcggcgtcgtggtcgtcggcgcgcttggcgaagcggcccttgacgcgggggcgcgtctcggcgtaggccttgcgcgacgcgtaccggatcgtcttctcgaaccgccggttcttgcgcttctcccggtatcgcatcagccgcgccgctctcccctccgccgcgtacgccctcccggccgccgccgccgcgcagtcgctcatctccggcgccgccacgcccccacccatcgacgaacacatgctatggctaggggtcgaggcgtatggcaggtaggccgccttggactgcgcgaagtcgagctcgatgattccgccgccgccgccgccgcagatggcgtccggcaccagcccgacctccgacgacgagccgctgttgccgagggaagccgccgtgtaggagctgtacgacggtttgacggcggcgccgccgccaccggcgaagcccagctccatcgcgggaccggccgatccgttgtggttgggcaccacgctgtcggcgtgagggaagcgcgcgagctcgggggagccgccgaggtacgggtccatgaagtcggcgaacaggaagtccagcttcacctccttgccgccgtcgccgtcgtacacggtggtaaggggttctttgattgttaggttgttgtgttgttgttgtgggtgttgtttttctttgttaacaatggccat

SEQ ID NO: 101202 - DNA, 2217 bp, Oryza sativa
  Clone ID: PAT_MRT4530_98845C.1
atggcgtccaccaccaccaagaacgccctgctcctcctcctcctcctcctcctcctctttcctctcctccactcctccctcgcggacgtcgccgccgccgcgccgtcctccgcgtcggcggcggaggtggacgcgctgatggagctgaaggcggcgctggacccgtcgggccgcctgctgccgtcgtgggcgcgcggcggcgacccgtgcggccgcggcgactacttcgagggcgtctcctgcgacgcgcgcggcagggtggcggcggtgtcgctgcaggggaagggactcgccggcgccatctcgccggcggtggccatgctgccggggctcaccgggctgtacctgcactacaacgagctcgccggggccatccctcgccagctcggcgacctccccatgctcgccgagctctacctcggcgtcaacaacctctccggcaccattcccgtcgagctcggccgcctccctgctctccaagtactgcagctcgggtacaaccagctctcagggagcatccctactcagctgggccagctcaagaagctcactgtgcttgccctccagtccaaccagctcaccggcgcgatcccggcatctctcggggacttgccggagctcgcacggctggatttgagctcaaatcgcctcttcggatcgatcccttccaagctcgccgcaatccccaagcttgccacattggacctcaggaataacaccctttcaggaagtgttccttctggcctgaagaaactgaacgaggggtttcacttcgataacaattcagagctctgtggagctcactttgattctctgaaaccatgcgcaaacggcgatgaagacgataatgaagaaggcagtaaaatggctcgtaaacctgaatcaaccaatgtcaagccactgcaagctccacagactatgaatgtgaacagagactgcgacaatggcggctgctcaaggtcatcgtcgtcgtcgacgacgctctcttcaggggctattcttgctggaacaatcatcatcatcggcggagcggcggcgtgcgggatatcggtgatctcgtggcggcgccggcagaagcagaaggtcggcggcggcggcacggtggagagcttggaaggacgagctagtagtagcaatgcgtcgtcgtcgttgatcaacgtggagtactcgagcggctgggacacctcgtcggaggggtcgcagcaggggctccggctatcgccggagtggtcgccgagcgtgaggtacaacatggaggaggtggagtgcgcgacgcagtacttcgccggcgcgaacctgctcgggaggagcggcttcgcggcgacgtacaggggggccatgcgcgacggcgcggcggtcgccgtgaagagcatcggcaagagcagctgcaaggcggaggaggccgacttcctccgggggctccgggcgatcacgtcgctccgccatgacaacctcgtcgcgctccgcgggttctgccgctcccgcgcccgaggcgagtgcttcctcgtctacgagttcatggccaatggctccctctcccgctacctcgacgtcaaggacggcgacgtcgtgctcgactgggccacgcgtgtctccatcatcaaaggcatcgccaaaggaatcgagtatctgcacagcagcaaggcgaacaaggcggcgctggtgcaccagaacatctgcgcggacaagatcctgatggaccacctcttcgtcccccacctctccggcgccggcgagcacaagctgctcgccgacgacgtggtgttctcgacgctcaaggacagcgccgccatgggctacctggcgccggagtacacgacgacggggcggttcaccgaccggagcgacgtctacgccttcggggtggtggtgttccaggtgctgacggggaggaaggcggtgtcgtcggagctccgcctcctcggcggcggtggcggcgcggagtactccggcaagctggacgacctcgtcgacccgcgcctcggcggccggttctccaggcccgaggccgccaagctcgccggcatcgcgctgctctgcaccagcgagtcgccggcgcagcgccccgccatggccgccgttctgcagcagcttggcgccacccaggtgccggttgacgatctactgtgccacactgccgctgcaggggtagagggtagtgtgtttgatgatgagagaattgagaggtcagaggaggcgcttcagctctggcattaa

SEQ ID NO: 101203 - DNA, 1271 bp, Oryza sativa
  Clone ID: PAT_MRT4530_98846C.1
tacacgctctccctatcgtaaaacccgcgaaaaccacaaccgaaacgcaagggtcgatccatccacgcctatcgcgcgcgcgtgcatcgggtcgatcgatcgagatggcgccggtggccacgacgttcctcccgacggcgtcgaacgaggcgacgctgcggccgtcgttcgtgcgcgacgaggacgagcgccccagggtggcgtacaaccagttcagcgacgcggtcccggtgatctcgctccaggggatcgacgaagcggcgcgggcggagatccgtgcccgcgtggccggcgcgtgcgaggagtggggcatcttccaggtggtggaccacggcgtggacgcggggctcgtcgccgacatggcgcgcctcgcccgcgacttcttcgcgctgccgccggaggacaagctccggttcgacatgtccggcggcaagaagggcggattcatcgtctccagccacctccagggtgaagcggtgaaagactggcgggagatcgtgacctacttctcgtacccggtgaagtcccgcgactactcgcggtggcccgacaagccggcggggtggcgcgcagtggtggagcagtacagcgagcggctcatgggcctcgcctgcaagctgctgggcgtgctctccgaggccatgggcctcgacaccaacgcgctggccgatgcctgcgtcgacatggaccagaaggttgtcgtcaacttctaccccaagtgcccccagcccgacctcacccttggcctcaagcgccacaccgaccccggtaccatcacgctcctcctccaggacctcgtcggcggcctccaggccacccgcgacgccggcaagacgtggatcaccgtccagcccatccccggctccttcgtcgtcaacctcggtgaccatgctcacatcatgcatctcttaggcaatgtgaacttgcagtatctgagcaatgggaggttcaagaacgcggatcaccaggcggtggtgaactccgactgctgccggctgtcgatcgcgacgttccagaacccggcgccggacgcgatggtgtacccgctggcggtgcgcgacggggaggagcccatactggaggagccgatcacgttcgcggagatgtaccggcgcaagatggcacgcgacctcgagctcgccaagctcaagaagaaggccaaggagcagcggcagctgcagcaggcggcgctgccgccgccgccgccgacgcaggtcgccgcggagttggcagcacagaagcccaagtctctcgacgagattcttgcctag

SEQ ID NO: 101204 - DNA, 424 bp, Oryza sativa
  Clone ID: PAT_MRT4530_98847C.1
tcaactcgaaaatctttttcaaacgccccgtctcttcctttcaaatcgccagtcgcgttaaccgtcgcccgccgccggccccgtcgtctccgaggtcgtcgttgccgaacgccgcgccgtcgtcaagccgtcgtcgacgccgtcgccagccgttgtcggcaccgtcgccagatccgtcgccagccgaggtcgccgtcccgtcgtctccgaggtcgtcgtcgcctgccgtcgtcatcgccatgccccggcggattcgaccggtgcggcatgtagtagaggacgccgccatctcgctcctgccgttgtgttcgccgcccgcgccgattggccgccccacgtccacgcgagctcggcccaagcggcggcggcggcacctgctgcgagctgagcagagtgggttcggacgcgtgggcggacgcgtggg

SEQ ID NO: 101205 - DNA, 144 bp, Oryza sativa
  Clone ID: PAT_MRT4530_98848C.1
atggagcagaaaagggtggacgaggagagcgacggcgaaggcgacgtctacgacggggagcgagcggagtggcgagggaacttcgacagggtattgctatgggaactatcgaacattgatactagttcgataggccacctgtag

SEQ ID NO: 101206 - DNA, 303 bp, Oryza sativa
  Clone ID: PAT_MRT4530_98849C.1
atggcggcgcggggacgggcagacgggcggtcggcgctcatggctcttccgccccacatggacgccgcgatgcacgcgcacgcgcacgaggtgttcgtctcccgcgcccgaggcgagctcctcctcgtcggaacatgtgttcgcgtcgcgccgctcgctctgcctccactgccggccgtccgctccgcctctgcctcagtcgcccgcctcgccgcatgcgccgccccaccccctccccgcctcgccgccgcttctggccaccatcccgtccatgtctccgccgcgtcgtgcgtgccgccatga

SEQ ID NO: 101207 - DNA, 512 bp, Oryza sativa
  unsure (1)..(512): unsure at all n locations
  Clone ID: PAT_MRT4530_9884C.1
ggatgccgtcgcctacaactccatgatgtcaggctacattgacggtgggcgcaacaatgaggcgttaagcctcgtttggacgatgttggaggcaggcgtcaggcctagcggcttcaccttctccattattttgtcagctgttcgggttgctcgtcatggggtgcaggtccacgcagctgctgtccgccactgttttgcacatcagaattctgtagtcggcaatgcactcatcaatatgtatcggcgtgtcggcctcttggaatatgcagtgcaggtgttttggagtatgaatggacatgatattgtttcttggaattccgtcatgtcagtgtacagggatgatggccagagacgtcaggtttttgagtgtttccggatgattaggagccatggattatnttttgacgagtgcagtttgtccacagtgctcagtgcatgcatagatgctgaggattcgtctaagggtgaccagttgttgacccactgtgtcaaattggggctccttagaaatt

SEQ ID NO: 101208 - DNA, 1352 bp, Oryza sativa
  Clone ID: PAT_MRT4530_98850C.1
ttcggcacgcattctcggtgtctctcactcgctctgtacgtacgttgccgcctgcccatggcgtcgcggtcgctgttcgcgttgctggtagtggcggcggcgatgtgtgcgtcggtggcgtcggcattgcggagcagggcggcgaccgacccgaacatggaggtgaagttcgacttcacgccgtttctgatccagtacaggagtggcagggtgcagaggctgatggggacgacggtggtggcgccgtcgctggacgtgcgcaccggggtggtgtccaaggacgtggtcgtcgaccggagcacggggctcgcggtgcggctgtaccggccgaagcaccggggcgggaggctcccggtgctcatctacttccacggcggcgcgttcgtcgtcgagtcggcgttcgacccggtgtaccacaactacctcaacgcgctcgcggccaaggccggcgccatcgcggtgtcggtgaactaccgcctggcccccgagcacccgctccccgcggcgtacgacgacgcgtggacggtgctcaggtgggtggccgccgacatgcagcgcggcgcggactcgtggctcgcgaggcgcggggacgcgtcgcgcctgttcgtggccggggacagcgccggcggcaacatcgcgcacaacctcgcgatgcgcgcggggcagcacggcggtggcgcgacgatccgcggcgtggcgctgctggacccgtacttcctggggaaatacgtcgacccgacggcgcagcgggcgtggggtttcatctgcgcggggaggtacgggatggagcacccgtacgtgaacccgatggcgctgccggcggcgtcgtggaggcgcctcgccagctcccgcgtgctgatgacggtgtccgacctcgaccggctcggcccgtggcagcgcgcgtacgtggacgcgctccgtggcagcgggtggcccggggaggcgcggctgtacgtgacgcccggcgagggccactgctacttcctcaacaacctggagccgcccaaggcggccatgcatatggatgctgtcgtcgcattcattaatcgcgacacctagcaagcacatcactagcagcagctctgaattctgatccatcttcaacgtggcagctcagctacacacccgagtaaagccatactgtaatgagtactcctagtaaccacatatagcttatagtgttactaccatttttttctgtctttcttcatcgaggcagatcgacatccgtacgtgtgagtgtgatttcagtgtttcgactgagaattgcatatgtacacttcgttacgtacctccgtgaaacttggaaggggaaaacgcatgtaaattaaaacgtaaacaaaaaaaaaaaa

SEQ ID NO: 101209 - DNA, 171 bp, Oryza sativa
  Clone ID: PAT_MRT4530_98851C.1
atggagatgatatcacccatcaaagctgacgaagatgttggtggtggtaaaaacaatgacaccaatcaaagcaacaacggggatgtcaaggccgatgaagcaaaggtgctggtgatgatgtcagtgacaataatccatcaaactgttgagaagatatcaaagctcgagtag

SEQ ID NO: 101210 - DNA, 267 bp, Oryza sativa
  Clone ID: PAT_MRT4530_98852C.1
atgccaagcttagggacgccgcatccgaggggcactaaccatgatgagatcggagcaactcggcctttgcttcctcgacagtgccgcggtgagcttggcctcctcaatcttcatcaacaacgacagcaggaaggatggtgtatgcagcgtggatgcttcatggtgtgcagattctcagaagctgtggaccgtttagggcagcttctagcagaagcagcttttgggaaaagctacaactgggtgaagctcccccaaacagggctttaa

SEQ ID NO: 101211 - DNA, 1446 bp, Oryza sativa
  Clone ID: PAT_MRT4530_98853C.1
atggccggcggcggcggcaattcgctgccttcgccgtcgtgcggcgacgacaagaagcggcgggtgtgctactactacgacccggggatctccaccgtcgactacggcgagggccacgtcatggtgccgcaccgcgtcaccatggcgcacaacctcgtcgccgcctacggcatgctcggcgacatgcgccgcctccgcacggcgcccgccacggcggcggagctcgccgacttccacgacgagggctacctcgccctcctccaggacctcaccccggacggctgcggaggcgacgacggggtcggcgacatggcgcgcgccaggggcatctacgccgtcgagggcaagggcggcggccgcggcgtcgacaacccggtgttcgaccgcctctgggattactgcctccgctactccggcgggtcgctcgccgcggcgcgcacccttgggagcggcaccgccgacatcgccatcaactggtcgggcgggatgcaccacgcgtgccgcggcggcgcgaggggcttctgctacgtgaacgacatcgtgctcgccatccgcgagctgctcgcccacttccgccgcgtgctctacgtggacatcgacgtccaccacggcgacggcgtccaggccgccttcgaggcgtcgaaccgggtgatgacggtgtcgttccaccagcacggcggcggcttcttcccgggctccggcgccgtcgccgacgtcggcaagaagggccccggccgctactgcgcgctgaacgtgccggtgagcgtgggcatcggcgacgaggagtaccaccggctgttcgagccgatcatggcgagggtgatggaggtgttccagccggaggccgtcgtgctgcagtgcggcgccgactccctcgccggcgaccggctcggcgagctgaacctgaccacgcgcggccacgcccagtgcgtcagcttcatccgcagcttcaacctgccgctcctcctcctcggcggcggcggctacaccatcaaccacgtcgcctcctgctggtgcaatgagacggcggtggccatcggcaaggagatccccaacgacatacccaagcatggtttcgacgtgttctacaagaaccaggagtacaagctccactacaagttggagacgaagcacctgcaccgcaaccgcaacacggcgaactccatagacggcatcaggatggcggccatggagaacctctccaaactgaagctggaggcggcggcgagcgtgcagttcgaggagcgccgccaccggagcatcaacgtcggcgacctctactacgacccacgcgagcaggaagaggaagaggagagccccacggcgaggctgcaccggaagctctacttcgagcccaccggagatcaggagagcccctacactaagcacaggtgcaacgtgcagccaggggagtcgagtagtagaaagcagcgtaagctaaagtga

SEQ ID NO: 101212 - DNA, 415 bp, Oryza sativa
  Clone ID: PAT_MRT4530_98854C.1
ggaatcaaaaaaccggaagaaaagcaaaactttgctctgggaataaaaaagtcaagggcccaaaaccaaaaccagggggggccccctaaaaaaccccaaacggatctttaaaaggggaaaagtctaaaactggccccaagtccccaaaaacaacaacgggacaaagccccacaaaaacccaagggggcctgcaaagcaaagcagggtttttccggccaaccggccgggaacgggaacggtcaaaaaacgggccaagggggggggttcccgcccataaaaaaacccccgggggggggcggaacaaaatccccggggggggggcccccctttaccccgggggggggggaatcaaaatatcccgggaagtggtaattgacaagcccccccccttgcctttttaccccccccccccccc

SEQ ID NO: 101213 - DNA, 591 bp, Oryza sativa
  Clone ID: PAT_MRT4530_98855C.1
atggcacggcgacgacgaacggaggagggtgacggagacgaacgggtcgacgacgaggggatggctccaatgatcttcgggcttgacgaagaggcggacgctggaggacttggtgctgcggacttgacgacgatgatgacgggcaacacttcatctgggcaggaacggcgaccggaggaaggcgacagtgacggggtgacgttccaagggtcttcgcttgaagagaaggtgcagccgagggagagggcgacgaggcttccagcgagcttcgggcttagggaaggggatgccggggacaagcacagtgaggcgagaccgtcggcagcgacagcacgggctggcagcgcccagctcgacggggagggcttgccaaagctggaggataacgatgttttggacgtcggcgtccccggcgcaccagctggcctcgggcggaacggaggcgaggccggggaagaggaggtcgctgcgaagcggatggtggcgacgccgggctccgaggacgtcccgaccgccggcgaggggcggtcagagttgcgcaacggtagcgacgtgaaaagaaggcggcgcggcggccagggagagaggtag

SEQ ID NO: 101214 - DNA, 445 bp, Oryza sativa
  Clone ID: PAT_MRT4530_98856C.1
aacgttttggtttagtgttggtcatccgtttaattatcctccaactcactttggacaaatcggattgcattagttgcaattggttcttcttcagagaggctaattagtgtgacaaatcgatcccgattgctggtacacgagctgccatggaaggctgtatgccgagcgatgcaaactacgcgccgctcaccccggtgagcttcttggagcgcgccgccgtcgtgtacggtgaccgcacggccgtcgtctctggcggcagggagtactcgtggcgcgagacgcgggaacggtgcctcgctggggcgtccgcgctcgcgcgcctcggcgtcggccgccgggacgtggtcgccgtcatcgcagcgaacattccggcgatgtacgagctgcacttcagcgtgccgatggccggcggcgtgctctgcacgctgaacacccggcacgacgc

SEQ ID NO: 101215 - DNA, 1923 bp, Oryza sativa
  Clone ID: PAT_MRT4530_98857C.1
aaaaacggtgagggtatattcctcattttccccgaataagagggtatattcttttttatgattacttttaagtgcatcctacatgatgctgcacttgactcagttttaacacggaatttatgcaacatccgtgttggtcttcccaaatactgtatcatcagaaaatatcggagtagtcgtgcagggcgctgtcatcttggcagcaaaaccaatcgcagctagtacaatagtacaagactacaacttggatttgctttgcataggcaggcttcccatggccctggccttctcccggagcaagaacttctgcgtcttccccgtcgacgtcttgggcaggtcgccgaacaccaccgtcctcggcgccatgtaacgcggcagccgcgcacggcagaacgcgatgatctcgtgcgccgtcgcgcttgccccgtccttcagcgtgacgaacgcgcacgccgtctcgccccagtggtcgtccggcctcgccaccaccgccgcgtcgagcaccgcgtggtggccgaacagcaccgactccacctcgatcgagctgatgttctcgccgcccgatatgatgatgtccttggcgcgatccttgagctggatatacccgtcagggtggcgcacgccgaggtcgcccgtgcgcagccacccgccgcgcatggcctcctccgtggccgccgcgtccttgtagtacccgctcatgaccgtgttgccgcggagcatgacctcgccgacggcgcgcccgtcggacggcacgctcgccatggtcaccgggtccttgatgtcgacgtcctgcaacatctggtgctgcaccccctggagcgccttgatccgcgcgcgctcggcgagcggcagcgcgtcccactcgggtctccacacgcaccgcgtcgccggcccgtacgtctcggtgaggccgtacccgtgctggacgttgaaaccgagctcctccatcttggccagcacctgcggaggcggcggcgcgccgcccgtcgagatgagcaccctcctcggcagcggcctccgctccgacgccggcgcgttcacgatcatgttgagcaccgtgggcgcgccgcccatgttggtcacgccgtggcgcacgatctgctcgaagatgaccttgggcacgacgttcctgacgcagatgttcgtcccgccctgcgccgccgtggcccacgccatgcaccacccgttgcagtggaacatgggcacggtccagaggtacaccggcatggacgtcatgtcgttgcagagcagcgcggccagcgagttcaggtacgcgccgcggtggctgtagatgacgcccttcggcctcgacgtcgtccccgacgtgtagttgagcgatatcgggtcgcgctcgtcggccggccacctgatctcgaagccccgcggcgcgtccctcagaagcgcctcgtactctagcccgccaccgtcgctgctgctgctgtcgccggtgtcggagatcgcgatgacaaggggaaatttggctttagcatcggcgagcagcctcagggcgtcgtgggcgacggcgaggaactgcgattcgacgaggaaaaccttggcctccgaatgtctgagaaggacggacaccatggccgcgtcgtgccgggtgttcagcgtgcagagcacgccgccggccatcggcacgctgaagtgcagctcgtacatcgccggaatgttcgctgcgatgacggcgacctgaccagcaattaacccatgtcttgttgagagcacgtcccggcggccgacgccgaggcgcgcgagcgcggacgccccagcgaggcaccgttcccgcgtctcgcgccacgagtactccctgccgccagagacgacggccgtgcggtcaccgtacacgacggcggcgcgctccaagaagctcaccggggtgagcggcgcgtagtttgcatcgctcggcatacagccttccat

SEQ ID NO: 101216 - DNA, 826 bp, Oryza sativa
  Clone ID: PAT_MRT4530_98858C.1
atgccaaaccgtcgcgttgtgttcgacgtgcgataagtaattccttaaatctttacaaaaataattcggaaaaagttccacagacgagagttctatactagtcacagagttcattcatcgtacggttacagcttttggctttcgttgtgtgatctgaacttcattcttcaggtattcaggcctatcacagcaacacaaacaaaaagggggggcagccaacagtacagctagaatacacacttccagattccaattgctcatcactaatcgaaggggtctatccgtgggtcatgctcgcttgccattgccgttcctgtgcacaagcaagttgggcacatcacctgaaaatagcgaccataattcgatagcgggtacctttccagctcctgaacaattggggcacctttcggttgtagaccacatattatggccgttgtcacatgaaagtgaaaaactcttgctgttcaatagcattccacttgcagaacagcgagcgcatggcaagtatcctatgatgcagaatcaagttcagagttgtttcattgtcttcggtgactacatcaggaaaaagaaaggaattaatagagattactgggaaaacagtatggttcgacattgggatcgaggcggattcgataaagggatcgatttgaagagcagagtatgcgtcggctgcgaaggcatcggctggagtgtgcattggttgagatggatcggacagaggataaaagatacagccgatagaggtaatgcaatcgattccgatgaagatggtttcaaggccgtttctagaattgttcaaagtgctttacagggattgccatga

SEQ ID NO: 101217 - DNA, 441 bp, Oryza sativa
  Clone ID: PAT_MRT4530_98859C.1
agcgacggagagagggccatggcgtccaatgaggacgttgccgcaccgacatgtgcgggcgcagcgtctgcggcaaaagaacggtactgcaaactaacagcggggcctatattcgacactagttggctgtggcagtactggttaaaccgatctgttatactggctacgatggcatcccttatgaccttttaattaagcatcgcaaccgggtgcgagtgcaagaaccagagggccacctgataccgtgcacatctactacatatctacgcatgacatcatcgatgcgcgcaagcatatggaggctgaccatgtggacatgaccgatgtccggggggaatatgaacaagacaacgactcttgcggtgtcgttggcgccgacgctaacggtcggtactagctgacgccgacgtgtttactaacgagttagccagatactcagga

SEQ ID NO: 101218 - DNA, 316 bp, Oryza sativa
  unsure (1)..(316): unsure at all n locations
  Clone ID: PAT_MRT4530_9885C.1
ggaaagtattaacccaccaggcttgcactgcctttcgttttacagggttacagaggaagagtcatacagaaaaatttggcattggtgcgataatacatagcaaattcatccagtttgtgaagagcgtataacaattcttttgtggggatttataaatggatcttggttctatatctgggcattctaagggtctggaaatacttggacgcaatatttctgtgcacagantccctattacacaatttacttattttctcaccaattcagagaatttggatttttccccctgaaatggttctaacaatgcctgggtaaa

SEQ ID NO: 101219 - DNA, 840 bp, Oryza sativa
  Clone ID: PAT_MRT4530_98860C.1
atgggagcaacggttgctggcaaaccacggcacaataaagcaaacggagggcaccgggaggtagagaaggcgacggcgattcttaccaacacttacgcgacgacggacagcgaaggagatggccggcgacgagctccgaagggcgacgaggtactgtccacgatgatgatggctttccggcgacgagcggcggcaacggaggggtggaaggccttcacctcgcagctgcgaacccaaaggaggcggcggcgaagcttggcgacgacggaaggagtagcagggcctcgccggagatcaaaacgccgcggcgagcttgttcttaacggcgacgaagggcttcctgtggtcttcagctttggggagatggctgccgggcttcctcttgaccttgcggagccgagagaggtggcgacgctgacctgcgacggccgaggcgacggcgcacggcggctggaccggcggccggaggtggagagaaggggagcgcagggagggcgtttccggcgacggcggaagacgggacttgaggggatgggtgtggtgtctagattattgggtatcattatttggggttatatgctgcggataagaggtgagccgctgatggtgacagctcagtacgggggtggcttctcgaagtaccataagggcatcggaaagatgaaaactctcccgacaaagaaaccagccataccagtgccaccgaccttctatactatggctgacaagacccttcatgaattcgctgctccctctgctgacaacgtggccaatgggccacagatcaacatgggagacgtggatttcaatttgaagtccagcctcatcacgatggcgtag

SEQ ID NO: 101220 - DNA, 101 bp, Oryza sativa
  Clone ID: PAT_MRT4530_98861C.1
gggcgtgcgagccgacgccatggcgcgggcagtggtgcttctgggatactcggcgaggaacacccacgacgatatctgcttacacgagcaatgactgacat

SEQ ID NO: 101221 - DNA, 434 bp, Oryza sativa
  Clone ID: PAT_MRT4530_98862C.1
ggttggaacccttttagggggcggcccttttttttttggtttatgaaaagatcagggttaaattcaaatataggagcactcgtgactacaacttgtagataggagaaaggatacatgacatggcaaacaaagacatgcacacgaaactgtactaccatacaccaactggctcatccaaatatggcatacaagcatgtacacgaacaatacctgaggatcaatccagagactaggacatgacaactgcattgcccaaacactttatacacagctgcggcgaactgggctctgcaaagattacctatctatgtccaactaaacgaacacacttccatggaatgtaccattcacactatcctggcgaaaatatacgttcttatgactcgcacgaccataagatcgacctcaattttttatagatgaagcccatgatt

SEQ ID NO: 101222 - DNA, 394 bp, Oryza sativa
  unsure (1)..(394): unsure at all n locations
  Clone ID: PAT_MRT4530_98863C.1
ctggacgccttcgcccgttctccgagaacccgcttcgctccggcctccttcgttcgcccggcgttcgtggaacctcgacccccgtccaccggtggcgccgccggctcttcccgccctcgctgcacgcgtcgccggagccggttgcccacccgggacccctcgcccggctgtgagcttccagctaaccgctcacctggcaactgcatatgcctgtacccttaagaatttgagattcagatgaaattccaagaacatcggccatctttttaccaaggtccctagattttcaaatttaaattaggtttttagaggaaatttaaattaagtttcctctactgcaacgaagaaaaccaanccccaatatgaatatgaattaactaaaaaaaaaaaaaaa

SEQ ID NO: 101223 - DNA, 357 bp, Oryza sativa
  Clone ID: PAT_MRT4530_98864C.1
atgggtgcgactggcagaaccatgcacccacagcccaccatggctgacgtcatcaggtgggcggcaccgacaggcgggtcccactggcccggcaaggcatcaagccaggcccggcaaggcggcatgcgaccgccggcgacgccgagcggcggcgcgggcggcgggcggcggcgtgagcaacgacgactgaaagcgacggcgcacggggaaaaagggaaggaaaggaaggggagggagacctcaccggaggggcggcaacggccggcggcgggaaacgagggaggcggcgaagaccggcgatgccgaggtgtggacgagcgacggctgacacttaaggaaagagaggagaggaattag

SEQ ID NO: 101224 - DNA, 1128 bp, Oryza sativa
  Clone ID: PAT_MRT4530_98865C.1
atggtgaccccgttgtcggtgttgctcgctgctgctgctggtggtggtttcgatcgccgtgatcggagcagggttgtcggcggcggcggcggcggccgagagggttgggagatggacgaggtgctggcgcagatcagcgaggggttccggctcgccggcgagctgatgtcggagctcgcggcgacccagaacgacccggactacctggccgcgcgctgccacgccattgccggcgcgtacgccgccgcggcgcgcgtgctgcagggggcgcgccacggcggcggcggcgtgggcgcggcgtcaacgtcgttcggcggcgagggatacctccatcaccagcatcgccagcagaggacctcctccgcattccgaattgcttgccaagtcatggcgcttccgctttgcacacaagttacacgagggtttacacacaactacgagtactctacgaggagggagagcggggagaaggtgacggtgatggtggcggcacagcggacggggaacacggagcagccgccggatgacgggtacacgtggcgcaagtacggccagaaggacatcctcggctccagatatcccaggagctactaccggtgcactcacaagaactactacgggtgcgaggcgaagaagaaggtgcagcggctggacgacgaccccttcacctacgaggtcacctactgcggcaaccacacctgcctcacctccaccacgccgctgctcacactccccgccgccgccgccacttcggtgacaaactctccgaccgccgccgccgtgctcggccaggacttcgtcatggcgcccgccgccgatcagcagccgccccagcaccagcaggcgcagccgccgctgtccacgtccatccacctcggcatcggatggccgatgacgccggccagcctcgccggcgccgtaggcgagggaagcactagcactaccgccaccgcgccgcaggtgacgacaatgggcgccacggcggccggcggcggcggtgcagcagctagggacgcggaccattacccggtggcggacctcgccgacgtcatgttcaactccggcggcagcggcagcagcagcatcatggacggcattttttcttctcacgatcgacgtgataactga

SEQ ID NO: 101225 - DNA, 154 bp, Oryza sativa
  Clone ID: PAT_MRT4530_98866C.1
gatcttagatccagcaactgagattcatcccatgatccaccccatctctcttgagtgccccatgtctcaccaccgtgaaaagacatgccaacccgtcgagaacagggagatggactgtgttgtcctccgcccagggttcagccttgtcgagaag

SEQ ID NO: 101226 - DNA, 1297 bp, Oryza sativa
  Clone ID: PAT_MRT4530_98867C.1
cccgggcgcccggccttcggcaccccccgcgtgcccaaacattctgcatttctttccgcctctctctctcgacccgcggcagcagagcaccaagtattttgtgggggatacgagcggcaaaacaggtgaaagtaactgcaggccttgccgcgtggtggtgtagccgcgtaggggtggtataaagccaaagccgttgtgcgcaagcatcccctcgacttctgcacccaagtaaaccacttcagtttcagagttttcgagcgagcacgttttcgtagcttccgtcgatcgaattcatggccgttcggtgttgctcttccatggcgagcgccagcgttgtcctcttcttcgtcgtcgtcggcatgtcggcgtcgatggtctccggctgcgacaggtgcgtgcgccggtccaaggccggattccgcgactcgtcgatcgcgctgaacgccggttcttgcgggtacggctccctcgccgcgtccttcaacggcggccacctcgccgccgcgagcccggcgctgttcaggggcggtgtcggctgcggcgcctgcttccaggtgcggtgcaaggacggcaagctgtgcagcacggcgggcgccaaggtggtcgtgacggacgaggcgcggtcgacgaaccgcaccgacctcgtgctgagcgccgccgcgtacgccgccatggcccgccccggcatggccgcgcagctcagaacacgccgcgccgttgacgtcgagtacaagagggtaccgtgcgagtacgcagctggtcgcaacctgtcgatacgcgtggaggagaagagccgtccgccgcgcgagctgtccatcaggttcctctaccagggtggccaaaccgacatcgtcgccgtcgacgtcgccacggtcgggtcgtcgaactggaagttcatgacgcgggactacgggccggcgtggagcacggcgcaggcgccggcggggccgctgcagttcagggtggtggtcaccggcgggtacgacgggaagtgggtgtgggccgacggcgaggtcctgccgcggcggtggacggccggacgggtgtacgacgccggcgtgcagatcgccgacgtcgcgcaggaagggtgctacccgtgcgacacgcaggagtggaagtgacacacaccgcattaacatgtacagtttttttgctttcctttcttttttctctcccctttttgggacgcattgagcagctagccatccatcgaattaagagccacagcccacaagaacaacttgctttccgttgcaaaaaaaaaaaaaaaaaaaactagttctctccctcgtgaaaa

SEQ ID NO: 101227 - DNA, 337 bp, Oryza sativa
  Clone ID: PAT_MRT4530_98868C.1
tcgtcgtggttgtcggagaggggacattgagcgcgcatcagtgagccttcaggcgtgctgcaacgtggacagacacactggcgtttgcggagcctgatactgcatatcggcagctggttactagctttatgcatgtagctagttatcggctgctgatgtgcgtgattagactactaattcaccagtggggacgttcatgtggaagaacgtctgaaggataaacgacgaactctcatggtcttctgttcaaaaaacaaaaaagacacatgggtcgaccggtgtataggatacaagctcatgtacgcgtgcaagctatgcctatagtgagttatagtag

SEQ ID NO: 101228 - DNA, 798 bp, Oryza sativa
  unsure (1)..(798): unsure at all n locations
  Clone ID: PAT_MRT4530_98869C.1
cacccactcacgtactctactcacacgtaacctctcccctccattttttatcgatccatccatcgctcgctcgctcgaacgacgccgcggcgcgatcaagatcgcacccacttcacctcgatccgccactccggagaagaagcggcgcggcgcaccgatcgatgcatccgctggtgggggcgctggtggcgggggcgcgggagcggtggtggtgccgcggggaaggcggcgcggcggtgcggcacgcggtggcgtgggcgggggcgctggcgctggccgtgtccgtggcgtcgttcgcgccggaggccgcgttcgtgtgggcgcttaccggcggcggaggaggcggggggagtggggagttgtgcgcggcgggcgcggtgcgggtgccgctcgacggcgggggggacttcgtgtgcgtgccggcgaggatggcggtgcggtccggcgccgacatgatcgtgcccccggcgttcgccggcctcgccgtcggcgcctccgcctgcttcgtccgcgccctcgccatcggccgccgcctcgacgactactagcgctcccctcccctcccctccccgctcttttccccgtcgcctcccctttcccctcctctctcccctttgccccccgttttcctctttctccttctctccccctccnnnnnnnnnnnnnnnnnnnnnnnnnnnnnnnnnnnnnnnnnnnnnnnnnnnnnnnnnnnnnnnnnnnnnnnnnnnnnnnnnnnnnnnnnnnnnnnnnnnnnnnnnnnnnnnnnnnnnnnnnnnnnnnnnnnnnnnnnnnnnnnnn

SEQ ID NO: 101229 - DNA, 898 bp, Oryza sativa
  Clone ID: PAT_MRT4530_9886C.1
gcacgagggtggcattgtatggactatggagaagcaaagcttacgtcccggaataaagaagcgcatctcgatctcggccatctcgggcggcatcacccagacaaagatttcgcaccgcgtatgcatccctttctccttcattaatatacgcctcaactcacttcctacgcctccctttcctctcccccctcctctccattcccatggcgtccatggcgtcgtcgtgctgagttcgtcagagctacctgctcctgctcctgctcggtcctcactgcgctgtctctgagtagatttgcttgcgttcttttgagatggaagtgttcgacgaggcggcggtggtggtggctgcgccgcctcctccgcagccggaatgcggggcggcggcggcggtggtgggcggcgagcccgggtggtcctcgccgtccccggccgcgtcgccggagttcgagttctggatggtggggaagaacccctcctcgttccagtcccccgctctgctcaccgccgacgagctcttctccgacggcattgtgctcccgctccgcaccctccagcaggtgccctccggtgaaggcgacggtgaaggtgaggagggcgagggcgagggcgatgccgccgccgtggagtcctctgatttgccggaggcggcggcgcagcgggtcgcggagtccgggggccccgcgccgtacgccggacctcccggcggtgacgttcaagtggaaggacctcttcaaggcgaccggcggcggggagtccaaggaccggaagaaggtggagcgccgcgtcagcagcgtcggcggcaacggcgagctcatcaacatcaacatatggcccttctcccggagccgatcggccggccactccgccgccggcagccggcaccgcggcggcgggagcg

SEQ ID NO: 101230 - DNA, 2758 bp, Oryza sativa
  Clone ID: PAT_MRT4530_98870C.1
atgtcggcggttgtgtcaagtccaacctcgaggcttcccctaccttgtcattcgccacctagcgccaggaggtcggtccggcggtggtggtggcggtgtcaccagctcacacgcaaggaggaaggctcaaaaataatactttgcaggctcaaaaatgacacacgatcaagaaatcttctctccgatgacaaaatagcgaagccaaccttgagagcggcatttgaaaacacgccaccgggagagtggcaaatagtccaaaaccccacaacccaacaaagctctcatcctgaaaccgccgatcccctatccgcctcacgccgccgcatacccactcggtcgctccccctcaaccgccgccgcccccatccacgccaacgccgtcgccgccgccgccgccgcatcccctccaacgccatcgctccacgccgcagccgcatccccgatccacgtcgcatccctgatccacgccgcaacagccgcatcatcggcctaccctccatcgacggccccgcagccccgtcggcgccgtcgctgcgtcgctccatcgtcgtcccgacctcgaaggtgaacctgcttcgagtccctcacgccgccaccgatcccaggactcgtcaaccctgcaagccatccatcctgcctgtgaacaagaaatatacagtacactctgggaggttgacagccatccgattcaaatcgaacggacgataccgaccgtacacctctacagagctcgccctctactacgccccttctccgactccggcgagcccagatctcagcaggtcgccgcagacctctccgtcggcggcgagagggtttcgatccacccgcagcgccatggccgagctcgcggcgggaggcgaccagcgcgccgcgctgctcgcggcggccaccctcttcccgccgccgcccgacggcgcgaggttctcgtacgggacggcggggttccgcgcggagggggccgccatgggccccgcggtgtgccgcgccggggtggtggcggcgctgcggtcggccaagctgggcggcgccgccgtgggggtggtcatcacagcctcgcacaacccggtccgcgacaacggcgtcaagatcgtcgacgcggacggcgggatgctgtcgcaggactgggagccgttcgccgacgcactcgccaatgcccccaaccccgacgccctcctccagatagtgcttcagtttgcaaaagatgaggatattaaacttggtggaagccactcggcacaagtgctgctggcaagagacacgaggccaactggagagtacctccttgatgtggcggtgaagggagtaaatgcggtaataggtgcagtagcagttgacatggggatcctcaccactccacagctgcattggatggtccgaagtaaaaacaaaggactgaagtcttctgagacggattatttttcacaagttattgattcattcaggtgtttattggagttagtcccaaaagataaagaagctgatgtgataaacaatagactaattgtggatggagctaatggcattggtgggttgaaacttgaagaaataaaggcaaaaatctctggattagacattcatgtgaggaattcagggaagggagaagggatacttaatgagagttgtggtgcagactttgttcagaaggagaaagttgttcctcttggctttggtcctgaagatgtcggtttcaggtgtgcaagttttgatggcgacgctgaccggcttgtttatttccgtatcgtatcctctagtgacactaggattgatctcgttgatggtgacaagatattatcactattcgtgctgtttattagagagcaattagatattatcaatggaaaagacaataaaggaaatgaagtacttcctacacgttttggtgtaattcaaacagcttatgcaaatggtgcatcaacagattttctcaagaacattggtctcgaagttgtattcactccaactggagtgaaatatcttcacaaggaagccctaaaatatgatatcggtatctactttgaagccaatggacatgggacagtgctattctcagatcattttgtctcacaactggaatctttgaccagttcttcacaacaccaagctgctatgagattgttggccacaagtcagctaattaatcaggcagttggagatgctttaagtggaatgcttttggtggaggctgttttgcaatacaagggctggtcgtttcagaattggtgtgacctgtacactgatctgcccagtagacaattgaaggttaaagttcaagatcgaaattctattgttacaacagatgcagaaagaagggtttgccagcctaatgggctgcaggaactgatagatggggagatatcaaattactctcatgggcgatgtttcgtgcggccatctggtaccgaggatgtggtgcgtgtatatgcagaggcatcttcagaggaagcagctgattgccttgcaaaacgagtggcgcagcatgttgagcgcattcttggataatttgccttccctttttttatctcttcattttccagaagtttaaagtgttcactttagctcaattgcctgacacatttgaagaatatcaaaatccatttgtttgtaatgcaacactacatgtttattcgaaattttcagattgtacatactgtgtgtagagccatcagttattgtaccaaaaaaatagtatgaacagattgagttccaacgcttctttttttaagaaaggaagttgtccgtgcagaaaaaaaaaaaa

SEQ ID NO: 101231 - DNA, 588 bp, Oryza sativa
  Clone ID: PAT_MRT4530_98871C.1
atggtggcagtcgccgggatgctcctcgaggagccgtcgacacatgccaccctgctgggacacactgaaggtccccagagcagccgcggacaccgtcgaggtgctcgtacaccgtcgtcaagtccagctgtgattctttcacttcatcacggcggagttgtcatgtcgactgatctgttggcgctgatcgcaagcctccgtcaagatcgatgccactcgtcctcaggactgatgcaatctgttcgagctgcggccgaggtcgtcgtgctgtctgtccacgatgccttctctttgtcacgtcggagcgtcaaagttcagtgcccctacatcatcgttgagccgttcgtgatgccgtctggccatcccttcgtcacgtcggagcgccactgcttggttcccgtgcatcgtcatcaagctgaggtcgtcgtttcgtccatccacaatgtctttctctccgccgcgccaaggctacgagatgccatccggccgcgatgcccttcacctcgtcaagttggagtcgtcgttctgtcatcacgccaagatgagataccgcctgtccgtgatgctctccctcttcgtggagattaa

SEQ ID NO: 101232 - DNA, 478 bp, Oryza sativa
  Clone ID: PAT_MRT4530_98872C.1
ccgaagtaaaaacaaaggactgaagtcttctgagacggattatttttcacaagttattgattcattcaggttcttctgaatttaattctctgctactgtaagtaataaatatgtggcatctatttgtttgcataatttaactatattgcaataggtgtttattggagttagtcccaaaagataaagaagctgatgtgataaacaatagactaattgtggatggagctaatggcattggtgggttgaaacttgaagaaataaaggcaaaaatctctggattagacattcatgtgaggaattcagggaagggagaagggatacttaatgagagttgtggtgcagactttgttcagaaggagaaagttgttcctcttggctttggtcctgaagatgttggttacaggtttgccaggtttgatggctacacttacctgcttggttatttccgtatcgtattccttagcgacactatgtttgt

SEQ ID NO: 101233 - DNA, 708 bp, Oryza sativa
  Clone ID: PAT_MRT4530_98873C.1
atggcattcaacctcatgttaaaaatccttcaaatttcccatgaatcaagccattccataggattcaacgaaggtgtgacggattacctggcaaatataagggttcattttttaagatcacatcatagtactgttgggaaggtgtcgaaaatggaggaaaaatctagtgctatgtccaacattgcgcccgtcgcacctactcgtattactagatatgataaggatgacaagcataaaccagttatagtttgtgctctggctgctttacctattccttcacaaccacctaaggcttcacaagaacgtaaacggcaacgtcgtacattttggacaaaatgtgcaacctgcaaggagaagaacaaattccccataacaaatcttgcatgtcaagttgtttgccctgcttgcacagaaacattcacagcaattgaggtagctagaccaaggaatacatctctctactgtaaagaaaaattggagtctagttcgtctgttgcggctaattcctccttgcagtctactgctgtaactcctattgctgatgtggcctatcacccttccaatatacaagggaagcgtaaagatggagaagtgaagattagtgaggcattccctaagcctgctgttgagaaacttttgcaagcaaggatgaaggagatcttagaaaagaagctcaacgataggcaagcaaaagatgaaggacagtaa

SEQ ID NO: 101234 - DNA, 239 bp, Oryza sativa
  Clone ID: PAT_MRT4530_98874C.1
ctcaccttccatttttttttttatttaaagcaacccaaattgaggggaccatccacggacaaaaaacaccccaccctggagggtgggaaaaagggtcttcacacgacggaaaaccccgggacaccaaaaacccccgggctggaaaaaaaaatgcacccccccgcatagtaaaggaaaactgcccccggagggccccaccaaaaaataccccaacttccctcgggaaaccccccccaacc

SEQ ID NO: 101235 - DNA, 1248 bp, Oryza sativa
  Clone ID: PAT_MRT4530_98875C.1
tttttttttacatgcatcattcatgtgcagagcaaacatctcaaacaattatattcataatatattgtgcagtttcccacgcatgtttacaggacataacaatccagatgaactacggatacatgtttccttttttttttttttctaaatcaattgcaccatgaccagcatctctgcatcacaaactcccatgctttttaattaccccccaatctcaaaaggagtagtcaggcttgaagaaatctctcatgaactttggcctctccttccctttgctgccatccttactctgaccagtgttatcaggtgtgtcattctcctctgctgctaattcatcttcttgctcctcttcaaaggcaggatgtgtgaagatgttgcccaggagctgtgtccctctgagggcattggtgagagggagatgcccctctggcgtgtcatcattcagctcccagatgaactcatcagggaaggccctgtagttgaactgctccacctcggtgtcaagcttcttcatccacccaaccctgatgaagaagcgggtgaagtcgcgccgcgacttctcccacagccgccgctgcacgctgtacccgaaccggccaccgctgtgctcctgccagagcgcgtcgatggcccggaggtcatcggcggagatgaactgcacctccgagaagaagacgtaccctcggcgccgagctggctcgcccgcgagctcgatgaggagcgcgcgggtggtctcgtcggcctgccggtaatccctctcggcgagctgggcgcccaggagctccagcgaaggcggtggcggagacgaggctgttaccggagcaggggtcaccggtgagttgggggttgatgctgtggtggtcactgatgatgatgaggaggaggtggtgttggagaagagcttgaatgaaatgctgctgttgctgtttgttgtgagcttgagaattatagaaggggaggagccctcatggataccattgctaaggaaagaatggtggtggtgaagaagaaaggattggagggaagcatttgccatggatggcaggaagagagctaggaggcagctcttgccgcacgcgtggagggaaagaagggggggaaaggggaaggggggaaagggggatatggataagggagtggatgggatcaagttcagtgggaggattgtcttgtgtgtacctgtacttgggtgtggtgtggagccctgacccggttgagggggcctttgcccctcccgctgtgctgtca

SEQ ID NO: 101236 - DNA, 159 bp, Oryza sativa
  Clone ID: PAT_MRT4530_98876C.1
gaaaaacagacaaatgactgtaacatacgcaaacggacattagcccaatgataccctgtgactttggagaagagcagatctagggtacaaagcaggagtcactctcgacgcgaggatgacttcgtagctattgtgcatgtcaaccacgagtcactctca

SEQ ID NO: 101237 - DNA, 249 bp, Oryza sativa
  unsure (1)..(249): unsure at all n locations
  Clone ID: PAT_MRT4530_98877C.1
ttgaatttttttaactaaaactcatataaatatatgataatattacnccaaaaaatcactgattcttaacaaactctttgcanctacanacactttaattcataccatactattactgattaacaaanccanatttttttccannatacagggtttaaccctatatcattattcaccttttttaaaatcctcaanctncccaatcttattacccaacaccataatcccctnaaaaacctcanttctcca

SEQ ID NO: 101238 - DNA, 292 bp, Oryza sativa
  Clone ID: PAT_MRT4530_98878C.1
gaagtacagaacgtatgcctctgaatcccatctcatatgttacatgatcttatttgccatagactacatatacatatatcaataattatgatgatatgctccccctaattaacagtagtcctattacacaggaaatgcttcggtgtacttcgtttcaccgaattataggagcctatcatgcatgcatgcgccgccatgtagacggcggagacgacagatcagacaggagaaaagagaagaaattaatgccgggggaaaatggagaaagaaagaataggacagactaatcatt

SEQ ID NO: 101239 - DNA, 910 bp, Oryza sativa
  Clone ID: PAT_MRT4530_98879C.1
aggttaagaaaaatctacaagccgtggattacatggtggagatgatttatggaggggggaaaaatgaacaaaagaagcatgtgtatttatatatgtattctcaacaggggaacaacaaaaatgaagcctccctgtggatcctcctatctacaagtgcgatcttgtccagcttcgccttgcaccactgcagctgctcgctggtgatcctcggcatccgcaggacccgtgccacgagccgcatgtcgacctgcgagaagaagaggctctggttcaaggtgtcctccttgggcttcttgaacttcttcactatgcagttgccggtcctcaggagatccttcagcctcttctctttcttctgtaacgtggagtcgatgtgcatcataagatcatggtctaaagggtcctggagctcaacatgagtgctcgacaagcccttgagcaccgacgtcgtctcgactctgtcggacctgatgaactcccaaaagacgcgcatgcattcctccatgatctcctccagctcctcgctcgttatgacatagttccccttacgctgatcctccatcctgtccttcaagctgtcctcttttattactggtacttgcaagagatttcgaagaacacatcggttattgatgtagtttggcaacctagggcccttgaaggactcatcctccacaaacctctgcacaactacctgaaattgttggaattcccctgccacctggttgtactgatggctgtggtaaggatcggattccggcaggtcatgggcctgctcatactgccaccgaaggaactcccatgataggcacatttggccgacgtaaactgtctccaagtcataccggagctccttgagaaacctttctgacgggtcctcgggtgattttcgacgtgacgacccggccgg

SEQ ID NO: 101240 - DNA, 436 bp, Oryza sativa
  Clone ID: PAT_MRT4530_9887C.1
cgcaaatccaagcagcgaagatagggagtcgttaccggcgagaggaatcgcgggcggatggatccccagctcggcgccgggcggccagatgggggagccgccgggaggaggtggcctaccgcctcggagggaagcgagccgtcgttggttggtccggttcgaggcggcggaaggcggcggcggcggcggcgagcgaaggcggggggtttctcgtgttgtgtggcggggagcgaatggaggtgtgtgtgtgcgtgtgtggggtgcgtcgccgagaagaaacgcggaagcagtcgtgtcatgtgcaccccaccacgaggagcgagggggcaggggcaaaggcaaaaatccaatcatgacgcgcatcggctttgatcgtgcggcttgggatcaacttgggcctcccgagtctatggtggtgggcccaccagacagatga

SEQ ID NO: 101241 - DNA, 381 bp, Oryza sativa
  Clone ID: PAT_MRT4530_98880C.1
atggaccacggccatgttaaccttcttgggaagaatgatagatccagcggatgtggaatccaatgtggatgcctcccagggtttcgtggtgttccagaggtgaaggttgcaatgggctcaccacaagaacacttcagctgtggtggacaaaggccgcccgacgaatgcgagagtgaacggggtggagtatttgagtggacggaggaagaagatccagcttgtttcgccatggatcttgagagattgaggcagagtgacctgactttggggatggatggagagaattgtcacgtcctgataaattcatcccgaaataaaaatcatcttctaaaaggaataatagaattaattaaaattcgaaaagaaattggcaaacactaa

SEQ ID NO: 101242 - DNA, 386 bp, Oryza sativa
  Clone ID: PAT_MRT4530_98881C.1
ggggaaagaactttatgttaacaagaagaccatcataatcaagctacagtgcaagaaaacaggtggaacactcttaaatacatcaccacaattcacgaaaaacaagttacaagggaggggatagaaaggaccatgatcggtgcgccactacagaacggccacattttctttcctgtggaaaaatcctatactgtactgagaacacaaacaccggaggacacaagtcttattcaaactttggaaaaactacaaggctaaggctgatcaaggacatcacattcggggggctgtcccttaaaggggggcgatgaacataaaggggccggcatgagggacctcaaaacaaccacacaaacagggacctccaaacaaccgcgcacacgggg

SEQ ID NO: 101243 - DNA, 1306 bp, Oryza sativa
  Clone ID: PAT_MRT4530_98882C.1
gaactagtggatccccgtggctgcaggagaaaatcagccctctcccgacttctggaccccggggctggaggctagaggcaaggaaggaggcagcagcagagcagagcagccatggcggcagctgctcttctctcccctcctccctctccctctccctcccccaccccgtcctcgctccaccccaggcaagccctccgcttcgcggttggcacaggaggaggagggcgcgcgcgcgccacgtcgacggggacgagacgccgcgcggcgctcgtcccgtgctcctccagcgtgagcgcgcgcggccccgcttcgggaggcgacgggttggccctggagaggaggcgcctgctgctgtccggcctcgtgtcttcgttcgtgctcgtcctcccggtttcagattcgcatgctgttgccgagatggatgaagatgtgaaaatggctacgctagttgacccgatcaatgcatattcttttctttacccagttgaattgccaggaaagaaattcacattcaaatgggtagaatccagaaaaccagaacgatattcctctgctgcaccactatctcctgatgcacggcaacgtattgtatcggagcgagttgacatgatacataacgttgtcatctcagtctcgattgggccgccaaattcacgttttccgccttccaaggacaagagcaagtgggatccaaaagatgttgctgattggattttggctgaaaaatcttcactgaaggtgacgacaggccaacgcatgacagagagttctgtccttgatgcacactcttcagatgtcgatggagaaccatactggtactatgagtatctagttcggaaatctcctacacaatctgcaccagaaccaaatctgtttcgccataacgtagcctgcactgctgaacgagatggttacttgtactccttgaatgcttcaacactcagcaagcagtgggaatctatggggccttctttacagaaaacagtggcatcctttcacctcctaccccctacagaaaattatgttcctccataccaggatccatggagattttggtgacattgcaattcgtttcctccttttactgtttcacgttttaggtgatcttggaacatcaggttttagaacatatgtttcctgtaatggatgcttcagtgatgtctgcactttcagttctacaaatggaagcctagttcagttgtgccaatgaagcctagggacatagtttgcttttggcagtcatctcaattttccttctgattattcaaatacccaaagtatcttttaaatgcaaaaaaaaaaaaaa

SEQ ID NO: 101244 - DNA, 1149 bp, Oryza sativa
  Clone ID: PAT_MRT4530_98883C.1
gaaaatgcaatgatttacactcctgaatctccactctaccaagttgatgactgtgagaggaaacaaaacgacctacaatcgagcagatcgcagtgctcagcgaatagtctatcgaattcagtcctaaatataaataaaggagcccccgggccgccggccaactggcagaggaaggatggcatgtttccacaatgcacgccaaagcatgatctcagatgcttcagcaacttctcaaccaaatttatgaagagaagtgctctatctgacatagtctcccgaggaagcatgagcaggaaattcaaggctttctcacagagtgatgagtggagcgatgtcagctcacgctgggggaaggaaagccaggtagactttgctctcgggtgtgagaaggcggtatcgaatttgccgctttcagatggcctatttagcccccgcccaacccgcccggagacgagacgccaccggagttccccccaccaccgctcgccgccttctccgcctcgcctcgccgccgcgtcgaccgccatggctgagactgttgtgctcagggttgggatgtcctgtgaaggttgtgttggagctgttaagcgggtactgggaaagatgcaaggagtggagtcctttgacgtagacatcaaggagcagaaggtcactgtcaagggaaatgttacaccagatgccgttcttcagaccgtttcaaagacgggcaagaagacctcgttctgggatgctgagcctgcacctgttgaagctactgctgcttcatcttaaaatgtcattttatctcctgtgatatgtaaaggttgatgtaacaatttcccagtggaactgtcttgtgagatcacaaagttgtctgttcttatgatcataacttgaagctatttcaaataatatcagacagctagttacacatatgtacatctttgtatttctctatcctaccagtattggactattggtatgatcaatttggtaaaaatacatgggtcatcacattgtttcagtggcatataaaaaagaataaatccaagacttccaaattaaacaaaaaaaaaaaaaaaaaaggggcggccgcgccccgtggggagcgagccgctctcgacaacttccatgagagcctgcagatgccgcggggagcagcgacctggc

SEQ ID NO: 101245 - DNA, 158 bp, Oryza sativa
  unsure (1)..(158): unsure at all n locations
  Clone ID: PAT_MRT4530_98884C.1
gcggtcccccacntctcgccactctccgaacgtccntgagcgtggagagagcgcctacgtacacagcgcagagccgctcgctacaccggccgcgtctgacagtctggagtgcggaccctcactaaagaccttccggaaggcagcgaggcaagagaggt

SEQ ID NO: 101246 - DNA, 1888 bp, Oryza sativa
  unsure (1)..(1888): unsure at all n locations
  Clone ID: PAT_MRT4530_98885C.1
atggcggcggggctactgctgaagctggtcgggttctgcttctgggccgtcttctggctcggcggcgccgccaccgtcagcaccaacgccggcggcgaggcggcggcggcggcggtggtggtggacgcgcggtccgccattgctgtgacggacgaggacttcgtgtgcgcgacgctggattggtggccgccggacaagtgcgactacggcacctgcagctggggactcgccaccctcctcaacatggatctttcaaacaaaatcctgttgaatgccgtcaaagcattctcacctctgaagcttaggctgggaggatccttgcaggatgtgttgatatacgacaccggcgatcctcggcagccgtgcactccgttcacgaagaactcatcggccatgttcggtttcactcaaggttgcctgccgttgcatagatgggacgagctcaatgcattcttccaaaaatcaggagcaaaaattatctttgggctgaatgctctgaatggtagggttccaatgtctgatgattctttaggagggccatggaattacaccaatgcggcttccttcattcgctacactgtcagcaagggctatgacatccatggatgggaactcggaaatgaactcagtggcagtggagttggagctcgagttgatgcagaccaatatgcacaagatgttctagctctgaaacaaatcattgacaactcctaccaaggccatgcatcaaagccactggtgatcgcaccgggaggtttctttgatgcagcctggttcactgagcttatcagcagaacaaagccaaaccagatggatgtgatgactcaccacatctacaatctaggccctggcgtcgacacgcacctgattgataaaattcttgacccgtcttacctcgacggcgaggccggcacattcagcagtctccaggggatactgaagtctgcagggacgtccaccgtcgcgtgggtcggcgaggctggaggcgcttacaacagtggtcaccaccttgtaactgatgcttttgtgttcagcttctggtacttggatcagctaggaatgtcatctaagtatgacacaaagacctactgcagacagaccttgattggagggaactatggtctgctcaacacaacaacgtttgaaccaaaccctgattactacagtgctttactatggaaccgcctcatgggaaccaaggttctctcggcaacattcaacggcaccaacaagatccgcgcttacgcacattgcgcaagagattcacgtgggatcactctactcctgatcaacctcagtggcaacaacacaaaccatatctacgtgacgagcgaaggcgtgcaaccttacagcacaaagaaggagggccgcagaaggttcggacgcatccccgggctcggcgaagaagctcagctcatcagagaagagtaccatctcacccccaaagatgggagcctgcagagccagcatgtgctgctgaatggcaatgtgttggcacctgatgccaatggagagatccctaagctggagcctgtgcaggtggagggaacacagcccataacagtggctccttactccattgtgtttgctcatattcccagattctatgctcctgcctgtaggtagatattgttgattgttgattggtttttgtgtgaatttgggatgatgtttattatcttcatagatttagagtaattgtgggtgagaggccaagcatgctcacctgctgcnnaaatgaagtaaactgtaaggctgaaagctctgtgatttgccattcttttaggtggaaaaagggttaaggaaatgtatgaaccaaaggatgtgaattgaaaagaagaaataatagtaagttcccatttgatcccaaaaaaaaaaaaaaaaaaaa

SEQ ID NO: 101247 - DNA, 345 bp, Oryza sativa
  Clone ID: PAT_MRT4530_98886C.1
gggaggcaaggcaaggcatacagtagtaaatagttggacattctacatcaagatgttccatccttggattggaggtgtcaaacgaaaacgaaagctgattaaacaacagcatctcaaagcctactagagggtactaactgaatatatgatcaatccaaccaagctatccaaagacgcaacagaaacagaatagggaagttggccaggtccttatgtggctgggcacgagtcatcatcattgtcatggagataattgtcatcacagtatatgctttctgccatctcccaaatctgcaggatgttatcctcgggcacgctggccatgacccatttctgggtgggggt

SEQ ID NO: 101248 - DNA, 283 bp, Oryza sativa
  Clone ID: PAT_MRT4530_98887C.1
tttgtctttcgtgagagcaaagctaaaggtaagggagctgatgaatactggcttatttggcgttatgaaggtgaggatacactattcgatctcatgcaaagcaaggagttcccttacaatgttgagactaagattctaggagatgttcaagacctgccaaagggaatagcaagagagaataagattattcaaacaggaatgagacaactcttatttgctcttgatggccctcaatcaacagggattgttcacagagaccttaaaccccaaaatgtgaattttt

SEQ ID NO: 101249 - DNA, 363 bp, Oryza sativa
  unsure (1)..(363): unsure at all n locations
  Clone ID: PAT_MRT4530_98888C.1
ctccctctctcttttcgtgagcagggaagagcatcccctctctcttttcgtgagcagggaagagggggggggggggggggnccaccccttcccaccccctgcgaaaccaagccatcctgggacaccatcgacacccaaaactgctcctaccagataccactcaatacttcgaccacaaactttagtggcgaccctgccataaaaaatgctagcaaacctcatcaaaaaagatggttccacacacaacgcatcccctggtagctcatcaagcccttgaaaaaaacttaaagcggaccccactataaacgctaccacttctgcacaccacgagctgcaagcccaccaccctccttctgacataca

SEQ ID NO: 101250 - DNA, 732 bp, Oryza sativa
  unsure (1)..(732): unsure at all n locations
  Clone ID: PAT_MRT4530_98889C.1
cttgcgcctaatttttctctgctcttgtctgacagcagccatgcttctttcttagaagagctatactattcattactctcgtagcaccggggaatgaacctattaaaattgtgtatccgttatcagtcaattcttgctcatgtttggctataccgcagttttctcattgtgtagtgaaatcatttgtgcttaacttatcattccattcttctattctatgtagaaatataaaatgaaacaacaaaagaattagagcctcccaaannaaaaaaaaaaaaaaaaaaaaaaaaaaaaaaaaaaaaaaaaaaaaaaaaaaannaaaaaaaaaaaaaaaaanaaaaaaaaaaaaaaaaaaaaaaaaaaacccaaaaaaaaaaaaaagggggggccgttttagggggcccagtttttcgtcccgggggtgggggggtttatttttttttttggggccccctaatttcacttccggggcccggtttttaaaacgggggggggggaaaaccctgggggttccccattttaatcgctttggggcaattcccctttttcccgggggggggtttgggaaaaaggccccccccgttcccctttccaaaacttttgccccctttggggggaagggggccccccctttgtcgggccctttaaccggggggggggggggggttcccccccggtgggcccttttttttgccggggcctttggcccggtctttttgcttttttcccttt

SEQ ID NO: 101251 - DNA, 1703 bp, Oryza sativa
  Clone ID: PAT_MRT4530_9888C.1
ctctctcccgggaaaagacttcttctctcgacgttgttgttgtcgatgttgttgcactcgcgcgcggcggcgctgtgccagagatgaggaggatgttgcgttgcttcttcggcggcggtggcgacgagacgggaggtgacgaggagaagaaggcgtcggcggcggcggtggtgaagaacaagaaggcggtgaggcggatgcggagcgcgacggggcggctccggtcgctgtcgctggaggacctgtcgcggacgctggcgcagtccgggctgcaggccttcacgctggcggagctcaaggccgccacgcgcagcttctccggcagcaacttcatcggcgagggcggattcggccccgtctacaagggcttcatcgacgccaagctccgccccggcctcctccaaccccagcacgtcgccgtcaagtacctcgacggcgaaggcgaccagggccaccgcgaatggctggcggaggtggtgtacctggggatgttgagccatccgcatctggtgaagctcatcggctactgctgccaagacgaccaccggatgctcgtctacgagtacatggccaggggcagcctcgagcaccacctcttcaagaatttgctgtcgagcttgccgtgggcgacgcggctgaagatcgcggtgggcgcggccaaggggctcgcgttcctgcacgacgccgacactccggtgatctaccgagacttcaaggcatccaacatcctgctcgactcggattacacggcgaagctctcggacttcgggctggccaaggagggcccgcagggggacgcgacacacgtcacgacccgcgtcatggggacccacgggtacgcggcgccggagtacatcctgacggggcacctgacggcgaagagcgacgtgtacagcttcggggtggtgctgctggagctgctgacggggcggcggagcgtggacaagcggcggcgcgggcgggagcagaacctcgtggactgggcgcggccgtacctccggcggccggagcggctgcaccgggtgatggaccccagcctggagggcggctactcggacaaggcggcggggaaggccgccatggtggcgtaccactgcctccacagcgtgcccaagtcccgcccgcacatgcgcgacgtcgtcgccgcgctcgagccgctgctgcagacgtcctgcggcgacgtgctcgccgggcccttcgtctacaccgtcccgtccgctgccgccgttgttgttgctgccaaggacgacgggaagaaggcggccgcggccgcgggtgaggacggcgaggaggaggtggcggcggcggccaaggcgaagaggaggtacgtggcgtcggcggtgcacgcggagggcgcgatgcggaagggggagcaccggtacgcgagctccgtgtccggctcgccgaggcagagcagggacaggggcggctagctcaagatttcaacggtggatgcaaagtgcgaccgcggcagggcgtgaatttgcctgttactgcgtgtgtgtgcgcgtgtgagcgtgtattgttcgagatcgtttcaagtgtacataatagtggtaacatatttctacggtggatgcaaagtgcaggaggtgcagtaacatgttcgttgattctttttcttggtgatgctattttcgatcccaagagcaaaaaatgtaatattgccttttgttttctaaaaaaaaaaaaaaaaaaacaga

SEQ ID NO: 101252 - DNA, 123 bp, Oryza sativa
  Clone ID: PAT_MRT4530_98890C.1
atggagtacatatgtagacaggaggtttctattgatataccagcttcatcttttgcactaatgggaaaggccagcaaaagctcgttgtcacagtcaagagcaaaatgggagctcatgatgtaa

SEQ ID NO: 101253 - DNA, 729 bp, Oryza sativa
  Clone ID: PAT_MRT4530_98891C.1
atgggcaacgccgtcggcgcggcggcgaacggcgtcgccgccttcttcggcaacaccttgttcgcgccattccgatccctcttagacgtctcctgcgatggcgtttgcgcgggaacatgggacgcgttctgcttcatcgaccatctctgcgcgctcagcctcggcaaactcatcctgttccttgtcctctcctacctcatgctgctggtgatgtggaagctcggcggcaagtgcgtgctcaagagcgcctgcaagacggccatggcggcgtgctcctgctgctgccacgccatggcggccgcgccgtgctacctctggcgcgcgctgcggagcaccaggcgcgtgcgccgcgggcgccgccgccgccgcgacgacgacgtggaggaaggaagaggaggaggaggaggatggggcggctcgtcgtcggggttcggctggagctccaatgaggaggaggaggaggaggaggaggaggaggggggctcctcctccaccggaggcggggagtacggtggcggccgccggcgccacgggaggagtggcggcggcggcgcgaggaagcaagagcggatgcggcggtctctgcggctgaggccggcgagcttcaaggagaaggcggtggccacggcggcgaggaggagcaggagcagccatggccatggggagagcggcggcggcggcggaggccggcgtctccggcgtgtcgggtcgtcgtcgaggagaatgtga

SEQ ID NO: 101254 - DNA, 286 bp, Oryza sativa
  Clone ID: PAT_MRT4530_98892C.1
cggacgcgtgcgctagccgatccttctactatgtcgactgcagcgcctacgaccagcgcatggctgcgttcaggcgtctccctaggtatgtcatggtgagtcagatgtcgtccgccctcatgaggcgtctcgtgagatcgagctgatagccgaccgatcgtatgagagagtggacgctgttgccactggctgccctcacctgcggtcgctgtggctgtactactgacagaacatcaccgactgatcaatgtactcgttgacagcgaacagccgatggacgacgagc

SEQ ID NO: 101255 - DNA, 299 bp, Oryza sativa
  Clone ID: PAT_MRT4530_98893C.1
ggggaaactaaacatttgactgttattagcttttgcaccaattagttataccagttaactgaactttttttttaaactgccaaaaacaaatgtaggatggtacaaacatgcatgaaccatcggattcacacaaagcaattttcaaaaccttggactacatatatacgggtgggccaaaacgcagttgtttggcttttattaaatttttttcaaaatacacatcacataaaatatacattcctttctatactggccaaaaatgaactaacctgcatcaaaaaagaggcttaaacacgaaa

SEQ ID NO: 101256 - DNA, 303 bp, Oryza sativa
  Clone ID: PAT_MRT4530_98894C.1
gagggtccacaaatcaggtgtaaccatcctggaaaccgcattaactgccacaaccaccaataggacccacctgtcacccaccctgccgaagctggagacctgctgggctagcccaggttcagccaaaccctggctacgtcggctcaggtcagccctccacgtggacgctccaaattgattcccaatgacggttccgggggaaaatggacaattcgcatagctacaaccatcataactgccctataacaggaggagttcattcactatctcaacacactcaagcaagctcaagatttctcttca

SEQ ID NO: 101257 - DNA, 1142 bp, Oryza sativa
  Clone ID: PAT_MRT4530_98895C.1
atgcactgctacgacgtttgcatggacgggtgggcgattaggttttcggggagcacaaggcgcaactactcactgttcgtcaacgtctacttcgtcttcaccaacatgtcgaacactggagacaacggcaacactagagacaaggagaaggaggcttctgtcaacaccaacggtgacaatactatctcaaactccagcggagaaccattcttggggagtaaattgcacccacggttcaacaacttggcagaaattattatatttcggttgatatttgagaagggtgacaagaaacaagtgaagctaaaggttcggggtgcaagcgagactgaggtcaagaatgtacttcgtcaagaattcaaagaatctatcgagtatagaaactacagcaaaaatccagagagcagcagtttgaaggtggaggtgcgagggactgtggatgtggggaagctgtacgaacgcctcaagaagatggcatccagtgtcaagattgaatcggttattccggatgatgtaaaggaagaaatagagagatacaagaaagaccttgaaagaatgaagagacagaaggaagatctagacataaaactaagggaaaaaagggaagaaaaaaaggttctccaggccgacaaaacagctgccgaggaagagcagaaaagattgaagagagacaaagaaaatctcaatttaaaggtagacacaaagaggaaagagaacaggcgtctcgaggaggagaacaagaaattgcagcgaaaaattaaggatctcgagcaaaagcacaagggagggacatcaattgagtatcacggcgtggaggtgcatcagaagatgaatcatatgcatcaggaggtacacatgcatgaagtcgttcgcaagcttaagatatcggacaacgatcatggaaacgctaatgggagggggcatggacaactcctgcagcagcttggccacggaagaaattgatccgcttataaatattaccaaagctagatatatgtgtgtgctttgtgggtgccaacctattttggtgtatggtttatttgcttgtgtttctcggttgtgagttttttctcttccataacatgtctaataataaaacaataacaagaaagctgcattattaggaaaaaaaaaaaaaaaaa

SEQ ID NO: 101258 - DNA, 752 bp, Oryza sativa
  Clone ID: PAT_MRT4530_98896C.1
cgtcgatggagcggaccgtccgcaccctcgaccgccagatctcgcagttcgtggcgatggacaggctgatatgggcggactccgcggacgccgacgcgttccttgaggcggtcgacgacctcatcggcaccgtgcaggagctggaagccgcggggaccaaccgcggcctgttcgaccgcgcggaggagctgctcagcaggtgcatggcgcgcctggaggaggagttccgggcgctcatcgagcgccccgacgacgcggtccccgcggcgcccggtgggttccggtcggacgggagcgacgacgaggaggacttcggcggcggggacggctacggcgacgagccgatcccaatcgccaagccggtgacggactacgacgtggtgatcgacgcgctctcgccggggtcggtggcgaatgtgcaccagatcgcgcggaggatggtggatgccggcttcggccgcgagtgcgccgaggtctatgccgccgcgcgtcgcggcttcgtcgacgagagcgttgctcgcctcggcgtccgcccacgaactgctgaagaggtccatgcctcctcctgggaggagctcgaattcgacatcgcccgctggatcccggccttcaacatggtgttccgtattctgattcccagtgagcgccggctatgtgaccgcgtcttcgacggcctcgccccctttggggaccttgcctttgtcgccggcgtgcgcacacaagccttgcagctcatatcattcgggcgatgc

SEQ ID NO: 101259 - DNA, 551 bp, Oryza sativa
  Clone ID: PAT_MRT4530_98897C.1
ttttgtgctagatatgtgtggatgaagtgtgatttgagctaactcccctcatgggagcacacacaatcattctcattcagtcactgttgcttaagtgtatttctttcgttctttcttatgggagtgagtgccccaaaagtgagtgaatgtagggaatcaaaccaagtagaggtactgtgctcttcaggtttgggaagaaaaatgggaacggcaagggaccatgtgtgcaggcattggaaaagggtgccccccattctgatctgatcagatatatattcagatcagcagagcccctgataaaagtcatggaggaacagttatccacatctaaagctatagctgtgtattaatgtgtatctgcagtctacaccagccttatgaaacatgcatgcatgcatgcatgcctttgagatttgattttttacttctcagattcttttgtacaaatgcaaaaagaaaatgatcctttggaatctagcatttgttacatatttacaatataaagtgctatacttgtttacttttcattctaaaaaaaaaaaaaaaaaaaa

SEQ ID NO: 101260 - DNA, 423 bp, Oryza sativa
  Clone ID: PAT_MRT4530_98898C.1
atgcagccccgcatcgggtgccaagttccgccggaacgtaaaaacaaaagtagaaaaggaagggagcaggagaggagggcagccacgaccgctcaggaagaggtggagtggagcttgataggggaagggggtgtggaagaaaacaccgagagggtggtgacctcgcaagatccactagtgcataaggcatcgtctactccgccccgtcgatcttcctcccatggtgagccggcatggagagttggaggtcgaggtttgtcaaggcgaggatgggtcctttcgacaacgacgcaaggagaaccaattggtgctaagctcgaccccaagcagccacagcgtggaagcaggacgcaactgtctagatggcaagtggaggcgagcctctatgccaggccttccacctcatcggcggacaatcattga

SEQ ID NO: 101261 - DNA, 327 bp, Oryza sativa
  Clone ID: PAT_MRT4530_98899C.1
atggcagccacgaaggcgccacgttggcgccacctcggcgtggattgggtcgggctgaccccggtcagccgcctccctccactcccgctcgcgcgcgcgcggtccaccgcgagccgagaggctgcgcgtgggcccgccgcacccgcgtccaccgcgcaccgcgcccctccccctaaccctagcgtcccgctcgcatgcaccccgccatcggtgagccgagccgctgacaagcgggcccgccccggatcccgcgtggtggaccgcggttttgactgtttgcgtatagccgcggttaccggattttcgtcgatcagggatttctcgtag

SEQ ID NO: 101262 - DNA, 291 bp, Oryza sativa
  Clone ID: PAT_MRT4530_9889C.1
atgaaggcaagaccatccgtggacaacataaaactagaaggaagcacatctgagcagacactgaacataccaaatccccaacatatcataatactgccattcaagccttattacaggcatctgagtttgggctccaaaaaagaacaaaaaggttcgagtatttgctgcaactcatatagaactaatgaagactggaaggagaaaatgctggagtccagagatgaagttctcagattgcttaacaaggattaccatgccaacccccataggaggccaccagttcataactaa

SEQ ID NO: 101263 - DNA, 285 bp, Oryza sativa
  Clone ID: PAT_MRT4530_988C.1
atgcgggatactaaggctagagttgatgcacgtgatccggatagtgagaaagggactcgtcccatgcgctactgccgccggcgacagccaccgcgtcgcgccccagccggctcgccgctgacagccaccatgatcaagcgccgccacactcgcatgctatcacgtatggggagagaggaaggggaagcagcacagagcactggagcagcaacatcagctctgcagttgctgtgtgtctctgagatagttgaacgagtgttggtgattcttcagagttcaggctag

SEQ ID NO: 101264 - DNA, 277 bp, Oryza sativa
  Clone ID: PAT_MRT4530_98900C.1
tggggtttttttactcagctgagccactgtacagcttacacacctactcttagagagcaatcacattcacacgccacacttgtgcttactgaagggcatccgtacaaaccaaccagtacagtcatcatacacagggaactgtatccttatattaggggggagctgtgaagcttattatatcctacagaaacttgtcctgtgaaaaatctacaactggaattcctagtatattacagttttgtgccctcagtagtgattaggtttgctccaaggtcgt

SEQ ID NO: 101265 - DNA, 241 bp, Oryza sativa
  Clone ID: PAT_MRT4530_98901C.1
gtgccgccgcgccgctgccttcgtgccgccgggccgccctcggtgccgccgcaccacgccgtgtgccgcgtcggagcccgagggagttgcggatccaagcgaaggtcgagatccgcaagactttgagcaaggcaagtcattactattctttgaacatgttgatcccaattgcgaaattattttgtttacaaataaaattgcatgcaatgatgaacatcctacttgtgattatgccatgcct

SEQ ID NO: 101266 - DNA, 485 bp, Oryza sativa
  Clone ID: PAT_MRT4530_98902C.1
accgcgcgtgcgtccacgcgtacgacgaagtgcattgctcgcgattcctatacccgttgctgctcttgctccccctgctaggggatcgtcggagaggactccggcggaggaaaagacaaaaagagagggctacctcgtcgccttagttaaaacgaagccatggagcacaacgagactggatgccagcagccactatgcccgatcctttgcatcaatatctggggtttctttgactgagcggtaccataaacatgtgctcaaggtgcctcaaggagatgatagtgaagcaggagcaggccaagctgtgctcctgctctatacgacagcattggcaatgggggcgatccctggaaggaaccagtgtattgctggtcacgctgaagtatctgttgctcatgtcaaggagaagactcttgttgcacagcctgctgatattgctggacctagtgaggtggtcgccgtgaaccccacggggagggaaggac

SEQ ID NO: 101267 - DNA, 387 bp, Oryza sativa
  Clone ID: PAT_MRT4530_98903C.1
caacaacctgctcggccagtacgagctgaccggcatcccggcggtgccgtacggccttgctcctgatcatcgcgaccacgctcatcgacacgaccggcatcctggaccacttggcggacgacaagacgaccgggaagaagaacaagatcaccatcaccaacgacaaggggcagctgatcaaggaagagatcgagcggatggtgcaagaggcccagaagtacaaagccgactacgagcacgtgcagagccaagcgaatgctggcaaactgctgaaggcagataggcacggcatacgacagctgatgcacgtgctcggagctcaaccacatggttggaggcatatacagggagctcggcgccaccgatgttggccaccctatggtcgag

SEQ ID NO: 101268 - DNA, 260 bp, Oryza sativa
  Clone ID: PAT_MRT4530_98904C.1
cctacctctccggcgttcgctccatgtttttttcgctacggcggtcattgtattgggaaccggaacaatccatgacgcgcgtcgtactctagccagcacctttattagattgctgcaacagtgagagaattgcggatcccaatcataccgtaggatgtttatgcacatatggggcttggtggcagcaagtttgtgcctatgtctacctttgaacatattataccattgatcaccattggagctctatcaaataaattcat

SEQ ID NO: 101269 - DNA, 408 bp, Oryza sativa
  Clone ID: PAT_MRT4530_98905C.1
atgtctcaagcttatccgcggcctgaaggttttccttctcaagagatgcatcgtgcaagaactgggttatgtcttgatgataaacaagaacaacgttctgagggccagagggacaaggttaggcttgatcgaagcaactggaatgaggattcgacagttgagtcgggttccgactccacgtgcagacgttcctcatgggtaatctcgacctccaggacgacttcgctgcggcagaaagaatcgctctctaagatgagatctaggagttctcttccttcggcggttctcttgtgtgcgaacgatcctgcggcggaaatacagagatttgcggcagactccttgtctaacccgtaccgaaaatgttataacaacacatggtctggtaaagacaagtctgggccagattga

SEQ ID NO: 101270 - DNA, 1096 bp, Oryza sativa
  Clone ID: PAT_MRT4530_98906C.1
ggtcgatgcgcgtgccggcgcccgtgcgcgacgagttcgtcgtcgacgaggagccggaggacgtcgccctctgcctcgtgatgctgtcgcgcgacaccggccggccatggaactcgagaccaagcgacgagtactcatctctcatgtacaacagcagctaccaccaccaccacgacgccgtctccgacgacgatttggagttgtccctctcctccccgtacgcggacaccgagatcaggaccaagaagaggaggaagacgacgggtgcggcgagcaccgccggcggcgagaagcggggccggtacgagtgccacggctgcggccgggctttcctgtcctaccaagctctcggcggccaccgcgctagccacaaacgtataaacagcaattgcagccttgtcaaacctccggccgatcagccggagccgagcatcgaaacatcgttcagctctgcctcgacgtcggtgtcaccagctgacaccatgatcagcgcggccaccatctcgaagacggtgaagaaagcaactaaattcgtgtgcccaatctgctccaaggagttcggctccggtcaggctctcggcgggcacaagcggtcgcactcgatcgcaggcgagctctacgagcgcggccacgccgacggcattgtcaagctggagcaacctttgctcgccgacaggtttcttgatctcaatctgccagctccaggaggagatgatggctgaagcttaattaggaggagatgatggctgaagcttaattttggttcctccaagttttgacattttttggggagagcatgggtatgtacagattcagattcaattcattcttttggagtttcagcttagttgatcatgagggattaaataattatattgttaggtctttagttaattactccagatttttcgaccagttttgttttgaatttagtgctttttgttagctctgttctgtttttgctccacattgggaggaaaataagaacatcatatgatctcaattgagaactggtacaatgaaatgcttccagaaaagatttcagttgaaaaaaaaaaaaaaagggcggccactcgcgatctagacggacgcgtgg

SEQ ID NO: 101271 - DNA, 575 bp, Oryza sativa
  unsure (1)..(575): unsure at all n locations
  Clone ID: PAT_MRT4530_98907C.1
ttttttttantttttttttttttttttttgatacaagaccagcattctctccagaaacatccattgaatcaatgtaaacattttagccacatacaacaagggagtcaaagctgttgttctgtacaagggagcctaataagctgaagccagcaggtcgaaccgcccagcaaggttaacctcctgttctacacattatcgggccaaaattccctgaagaaagccatttcaaattccctctcttgtaaccgcttctcttcttcttgcatcttccgtatcctcttcgcggccaacttggccttcttcttcggtgcttccagcttgggttttttagggtctttttcaccatcctcgtcaacctttggctttagctttggttccttggaacccaaaccacgcttgttattcttcacacgactttctacaggctccaatcttcccttctcttgcgcgccgaggccggtgccctccttccagcccgatttcttcagcagctggaacccgacgttggaggagccgatcgccgccatcgccgcctcctctcctctcccctcctcgccgccgcgccgcctcccctc

SEQ ID NO: 101272 - DNA, 1614 bp, Oryza sativa
  Clone ID: PAT_MRT4530_98908C.1
atggagcaacccacaattcaaaccctttctgctccttgggctgatctttgtgagccgtcctgttcttcaaaaccaatcctttcggatggctacgaaatcggtcctggctttatagccatgatttgagagcaaaccttctctggtagtattggtgaaaacccgtacttccatcttcgggactttgagctagtgtgttcatgtctatccatcataggcatgacacatggaactctcaagtggaagttgtttcctttttctcatagagataaagcgaagcaatggtacattatttctgtcaataatgtgaatggtacattaaattccacggtgaatgggaggagctaaagtgcaaattctgccttgctttctttccattaacccgtgtaattaatcttcgattagacatcctctctttccgacagaatgagaaggaatctctcggtttagcctgggccagattctcattgttaactcaatctggcccagacttgtctttaccagaccatgtgttgttataacattttcggtacgggttagacaaggagtctgccgcaaatctctgtatttccgccgcaggatcgttcgcacacaagagaaccgccgaaggaagagaactcctagatctcatcttagagagcgattctttctgccgcagcgaagtcgtcctggaggtcgagattacccatgaggaacgtctgcacgtggagtcggaacccgactcaactgtcgaatcctcattccagttgctggagccggaagaagaagaaattcatcctccgaaaattccattctaattcagggataatctttatgaagatcatggaaacaccctgaattattccagcaatacaaaggctcatcccaagcatgagccgttcgagggggtgatgtttgtatcttcgtttgtttcttctgaacctattgtccgtcttcatgaaactgaacgacccttatcaccttcgatcaagcctaaccttgtccctctggccctcagaacgttgttcttgtttatcatcaagacataacccagttcttgcacgatgcatctcttgagaaggaaaaccttcaggccgcggataagcttgagacatcgactctggaggacgagagaaaacattccacatatgagcatgagagtttctctttcaaaatcccccaggattcatgctcacataaagaatccccagagtcctgtttggttagtaccacttccctgtgcgaggaccactccacctttcggtcctcatttctaacgtgtttagaaggatggttgtggatgcttatatttatcataaatactacaaatatcgtatttgtggcactaatcttgcagcataatgtccccatggtcaagcttgtgaccataaacaaagcactgtggggaggtaacccggattgctatgttgacacttgcacatttgctcgaaaagagatgcatcctacgcattgtgccaacggatcatgccttcaagaaacaaggttcttgcacacgagctaataaaatgacaatcaaggagcagtgtacaataacttcaaacacttatatcacgctccttggtccagtattttaaggagaaaacagactcgtcatgcgacaaaatgaacctttgcaca

SEQ ID NO: 101273 - DNA, 2214 bp, Oryza sativa
  Clone ID: PAT_MRT4530_98909C.1
atggagattgagcatctcggcgcccgcgcggccgccgccgccggcgaggatgaccagtcgccggtggagcaggtccggctgaccgtgccgacgaccgacgacccgtctctgccggtatggacgttccggatgtggaccatcgggctcctctcctgcgccatgctctcctacatcaaccagttcttctcctaccgctctgagcccatcgtcatcacccagatcactgtccaggtggcggcgctgccaatagggcacttcttggcacgcgtgctgccgaagaggaagttcacggtgttcgggcgggagtgctcgctgaaccctgggccattcaacgtgaaggagcacgtcctgatatccatcttcgccaacgccggcgccgcgttcggcaacggcggcgcctacgccatcgacatcatcaacatcatcaaggcgttctaccaccgcagcatctcctttcccaccagcctcctcctcgtcatcaccacccaggtgttgggctacggatgggcagggctgatgaggaagtacgtggtggagccggcgcacatgtggtggccgcagagtctcgtgcaggtttccctcctgagggcgttgcacgagaaggagaacctgcggatgacgcgggccaagttcttcctgatcgcgctgatctgcagcgcggcgtggtacgtggtgccgggctacctgttcccgaccgtgggcgcggtgtcgtggctgtgctgggcgttcccgaggtcggtgacgatgcagcagatcgggtccggcatgagcggcctcggcgtcggcgccttcacgctcgactgggccaccgtcgtctccttcctgggcagcccgctcgtgtacccgttcttcgccatcgtcaacgtctgggtcggcttcgtgctcctcgtctacgtcatgctgcccatcgcctactgggtgctcaacctgtaccaggccagcacgttcccctttttctccgcgagcctgttcgaccacaccggcgaggagtacaggatctcggagatcgtcaacgacaggttcgagctcgacacggacgcctacgcgcggcaggggaagatccacctcagcctcttcttcgccacctcctacggcctcggcttcgccaccatcgccgccaccctgtcccacgtcacgctcttctatggaacggagatgtatcgcaggttccggcaggcggccagggagaacccggacgtgcacacgaggctgatgaggaggtacgatgacatccccaactggtggttctacggcatgctcgcgttggccatggtggcggcgctgttgctctgcaccgtgttcaaggacgaggtgcagctgccgtggtgggcgctactctgcgccgtggccgtggccgccttcttcacgctccccatcagtgttatcaccgccaccacaaacacgaccccagggttgaacatcatcacggagtatgtgatggggctgatcatgccggggaagccgatagccaacgtgtgcttcaaggtgtatggttacatcagcatgaaccaggccgtctccttcctcactgacttcaaactcggccactacatgaagattcctccaagatccatgtttctagtccagttcatcgggacgatcgtggcggggacggtgaacatgtcggtggcgtggtggctgctgtcgacggtgccgcacatctgcgacaagaagcacctcccggaggggagcccgtggacgtgcccgggctcccgcgtgttcttcgacgcgtcggtgatctggggactggtcgggcctcgccggatcttcggcccgctcggctactacggcgcgctcaactggttcttcctcggcgggctggcagggccggcggtggtgtggctgctggcgagggcgctgccgcggcacgccggctggatcaggctcatccacctccccgtgctcctcggcgccaccgccaacatgccgccggcgtcgacgctcaactacacggcgtggtgctccgtcggcgccgtgttcaactacctggtgttccgccgccgcaaggcgtggtggcagcggtacaactacgtgctgtcggcggcgatggacgccggcgtggccatcatgggcgtgctcatctacttctgcctgtccagccgcggcatcaccccagactggtggggcaacagcgacatcaacatcgaccactgcgacctctccacctgccccaccgccaagggcgtcattgtggagggatgtcccgtcttctga

SEQ ID NO: 101274 - DNA, 667 bp, Oryza sativa
  Clone ID: PAT_MRT4530_9890C.1
cactttgccacgcccagaaatttaacccaaatttccagactattttgcgtattaaatccctgtccaggaccagccagggtacacaaaacgacaagtaatatacagttccaaacatcggaaagaggccgtgacaggacccttcgcataatcccctctaaccaagcacaccacacctcaggtttcacccccactcctcgcaaggcagcgggcagtcccctctcgtgcctaggtgaatccggaagccgcataggccgtcgcagggcccatccaaactccatcacgcccacccttgcaatagagcatttgcaatataggatcaacatgttcaagtgacaagcatgacttgccttgctctgctgctggaggaacctcggcgactatttcgaagtacaccgaagcgtcgggggaaccggaatctagcgacatacaaggcaaacattgcaaacaggctataagactacttaaatcatttattgcgcaataaatcccagggctgacgtcatcaaggcggggcgcggcgccggcaagcggccaccggtcagcgactcaagggggagggcggttcaccgtggaccgggaccacgcgggtggtccaccgccagtccacggaaccgacggtccagattggccgggtggccgatcggacggcgcgggcggggctaggcat

SEQ ID NO: 101275 - DNA, 2119 bp, Oryza sativa
  Clone ID: PAT_MRT4530_98910C.1
ttttttttttttttttaattttgttgacattcccaaaatctttcatttttagtatttggcatggttgagttcgactatatacagtactcacctaaaaatccatctcccaacgggctcaaacgataatacgatatactacgagggcccacccgtaaaagtgaccaacacttgatccgggccgcacaccgccgatccaacggctcacgagcgccgccccaaaccccggagcggcggcggcggcggcggcggcgccgcccatcccctccccgccggccgccggcggcgatgcacatgcacacggtgttcatagcacacacatggaaatggaaaaaatctcagggaagacgaaaggttcagcggtgagtgagacgcgcggcgttttcatgcgagtaacatcgaacaatcccgcgaggcggcggtgggcggcggaggctcacttcacttcctcctctcgccgccgatcgagaggcgctcgaagcaccggatagcggtgccccccttcgctgccggcggcgacctgtcgtccgcggcggccgagtggtggtggtggtggtggtgcctctgggcggcggcgggggacgggcggttgctgccgctgccgctcgacacccaccggccggcccggttctgctcgccgacgtcgcctttcgaggatgtcccccggctagaccgggtggcggcggcggcggtggtgggcattttcgccgagctcctgttcctggatatggttcgtgttctctccgaatcaacaacagcttctgtagatgaaccaaaggaatccgcgaggcttttgtgcctggaattgtctccgaggcgaccggaacccgggtttcttctggcgaaggcctcaacagcaccggtaaatctaatgtggatctcttgtcatacttcacgagtaaatacatcccgaaagagtttcttcaaataagagtaatctggtttatcttcgaatcgcagggaacgacagtagtggaaatatgaggtgaactctgatggataagatttgcacagaacctctgctggggtgagcattttcttttcactgattctgtcatatttttgtttctttgtaccagctttaagaccctgccatggaagacttcctcttaaaaaatataggagaagatagccaacagactccagatcatctctcctgctttgctctattccaagatgagtattcacactagcataacgtgccgttcctgtcagattcttgttctccctgtagggaatgtgtttatgggtctggagatccttgtatttcttagcaagcccataatcaattatgtacacctggttcgctttccggcctaagccgataaggaaattgtctggcttgatatcacggtgaataaatcccttggaatgcatgtattccactcggtttattatttgatcagcaagcataaggacggttttgagagagaatttcctgttgcagctgttgaacaagtcctccaaacttgggccaagaagatcaatcaccataacattgtgctccccagcgacaccgtaccacttcatatgtgggataccatttccgccttgcatttgcatataaactttggattcgtaatgcagctgtggatgttttgatctcacagattccagctttattcccacttcctccccattatgtatattaacaccgagatatagctccccaaatgacccactcccaatcttcctcccgagcttatacttccctccgaccacttgctccatggtcaccacaccctgatcgctgccgacccggtaaaacggcgaatatcaaagcaagaatgcgcttctctgttgcatataaccacagaattcttcttttggtctaaagagttagctagctgccaattgctgaagcagcatcaccctcttagatgaagaacctgccagcatggtcgagcagaaacaccaggcaaaaaaaaaagccaccgaaatcggaggatgatcgaatcagcgcaggatcggagctaacccaggaaagcaaaagagaaagaggaagaagtcgcgccaccccccggccgccgagctacgcagcggatgcgatgccgcggcaggagcagcggatgcgatgccgcgccaggatcgcagggaggaggaagggtgggtgggggaaggg

SEQ ID NO: 101276 - DNA, 482 bp, Oryza sativa
  Clone ID: PAT_MRT4530_98911C.1
gaacaccgaacaagcaactaatgattttattatatccaaggaaagggggagtttaaacaaacaacttacgggataaacaccgaagccaccgattttactggcggcaccctccaacaagactggatcaaacacaacaggaaaaggaccccaaaaccccactcttataacaggcagactgaagagcccacactgaatggcttcaatagcacacaaagagagaagatcgcctagtccttgtctccgatgccaccccccatgaaaacctgacaaccggccaccccagatctgacttgcatccttaccttagaaaacgatagaactgccatggtgatgacactgaaaccctcctaatgcccttatccttattaggacccttaccggccggacgtgccaatccaggtgagcttcccccagtaggaccctacacccctgcaccgggttgttggttgtacaaggccatgcccaactgaataaccaccttg

SEQ ID NO: 101277 - DNA, 522 bp, Oryza sativa
  Clone ID: PAT_MRT4530_98912C.1
atggactacatcaggaggtatacagagaagcgcaacaccatcccacacgttaaggattcggaagtcatcgcagtgtttcatcagggcgccaagaatgaagacttcatcaaatggtgggcccgaaagaccccgacaagtgtgcgtgatatgtttaatcgggccaacaaggatgctaactctgaggcagcggttacggcccaccttggcaagcatgctgctcctaactcctccagaagagactaccccaagtcctccaagaacaatggagtaaaacggaagggtgaagaaactgtcaacatcgtcaagcgcggcaattacaacaaccaccagcctcgaccgcccaaggctgatgacttcaatagaatcatggacgacccatgcctctatcacctgaggtcgaatcacttggcgaaagacgactacctccttgacgcctactcaggatatcatcaaattgctctaaatccaaatgactgcttaagaccttgttcatcactccgtttgacgcttactgttacataa

SEQ ID NO: 101278 - DNA, 735 bp, Oryza sativa
  unsure (1)..(735): unsure at all n locations
  Clone ID: PAT_MRT4530_98913C.1
ccacgccgtccgaaaacgaaataaaagacctaaaaaaaaaaaaactcacgagaggcgcatcggcggcggcgccgccacagggccaccggccgccgtcgccggcgatctgcagggtcaagcactcaagcccccgcagcctgcttcccgccggaggtcctataaaagttggatgccaatgccaatggagcatctatgagctaagagtgttcagaagggaagccctggtttggatcaatctcctgaacagattctcagctccgctctctaggccaacgatgcccaactctaatgcctgcaattgcacctcctcgcatgaaactttggccttctggaacgatttggagataagagaccacttgcttggattgcaggtggagatttgcttcgacaggagctctagggcagatttcaggaccgaggcagtgatccctctcgctgttgtcaacagactgacaagccttccatcctcatcagaggtagacttgttgctggccttcttcaggtgatgcttagccttcttcaccaggcggatgtatgactgagccttcacttgaacaactgcatggtctcccctgttgagaaccatctgcagctcttggatggtcatcttcaggtcagcgaacatctcttgcatggcgctgcanagatccagcacctncagagaccgctccatctcttccttcagcttcttgccatgtggcttggntgctatgcaagcttatggacctcgttgat

SEQ ID NO: 101279 - DNA, 107 bp, Oryza sativa
  Clone ID: PAT_MRT4530_98914C.1
ctaaagagggtcattttctcttgacttggtcgaaaaagtacagaggagtcgctgtccagtggtctggcttagcgccgcggtggattatcgatgttcttcccttttga

SEQ ID NO: 101280 - DNA, 471 bp, Oryza sativa
  Clone ID: PAT_MRT4530_98915C.1
cccccaaaaacatcgaacttaatatgattataaaaacacaggccataataaattaacagttttttaagggggcactatcaccggaaaaaaaaaggcccctccgaaacataaaaacgcaggcccaaaaaaaaaccagggggaagaaaacttcccctactgactttttaaaaaaaaaaaaaaaaaatgtttttgggcccccttccaacatttaaagaatatcagaggcgagggggatcacactactgattaaatacttacaaggggtttgtacagagttttggggggccaaaaccacctgtactttaaaattgccatgagggttgtaaatcaaaaaaaaacaggccagtctgacaataatgtggtctggaaaaactccattttttttccaaaaacagggaatgcttaatttttttcaatccactaaaaaatccacccaggggggaatagatgggagccctgcattcctatcca

SEQ ID NO: 101281 - DNA, 364 bp, Oryza sativa
  unsure (1)..(364): unsure at all n locations
  Clone ID: PAT_MRT4530_98916C.1
gctaaatacaaataatccattgggcactgggcgcatttaggagggggtgtgctatacctttngttacatgcagtgagccccagtgcaagatagcaatacatgtatttaattaggtggttatggcaaaaaacacaaccatttttactcacatcctttctctaacaacccacgggtaactccttatttaatgctgcggatttttttttatgggtctttgcctccaccttttatttaaaacctgacaacaactctttttggtatccttttgtaagcaccccttattttttagggcgtgaaaaaagtattttaagtgcccttttgaaaccttcaccgatgtttctttaggatccctgggggggggggt

SEQ ID NO: 101282 - DNA, 313 bp, Oryza sativa
  Clone ID: PAT_MRT4530_98917C.1
ttcttcgcttcgccgctgctgctgctgggggctctcttgggatgagagccccctcctctccatggcctcctccctgctcctgactggcgctaccttcggcgccaccaccaagcacatcgccgtcctccacccgcccgtcgcatccgcctgcaggccccacccgcccaggctgatcaggtgcggcgccgccgccgtcccggacgacaagctcttccgttggttctacctggggcaggccgccgccgggtcgccgggggggcccgcggacacggccaatgatggatgggcccctttccttgacgagatcaggggc

SEQ ID NO: 101283 - DNA, 1058 bp, Oryza sativa
  unsure (1)..(1058): unsure at all n locations
  Clone ID: PAT_MRT4530_98918C.1
ccccccngggggnttgncaagnggaaattcccgggccaccgaaaaggntggtttaacttngttccattggggtttccncaaaaatntttcccgtttngttttaacttccccccctctgggaanccttaaaaactttgggaantggttccccctttttccctttggccgnttttcccggggaanaaaaaatttnatccacaaagggccangtgggggaanaacctttcccccctttttggaacttttccncgaaattggccattttccnaannaaaaaggttttanttcactttgggggcccnagggccccnccccccacgggaatggtttgaattgcttcccaccccanttggttngccatttgccnnaaaagacctccccggggttgggggtggaattcgacttggcaaccccggttttccgcccacctttggccttggccgcctggttttcattggggttttttccacncccccccncggtttttccncaagccttttaattnnggttccnaaanaaaaggtttttgggggggggggggttttccccnttccccaaattcccnaannggaanagccccnnaattcaaaaatttaaanttgttttttcccccnnggaatngtttnggaaaaaaattngaatttttgttncccnatttnccnaacccnccttccccgaaaaaaccttggttattnattattcaaatttnaataaaanttttggttccattggttccctccccccaatntggaaaaaattagngggtcccctggcccccnccccttttttttgccttggggggccattcccctgggnaaccnccccnngtttttttaaaaccaaaaaaattcttaattcctttcccccnaaangggccttattatttnaaattnaaatttccaancccgtttnttttggccnttttccnnngggcntttctttgccccttggggggtttttaaaaaaaaaaaaaaaaaaaaaaaaaaaaaaaaaaaaaaacttcccaaaanngggggggggggccccnggggttnccccccnattttccccccccccaa

SEQ ID NO: 101284 - DNA, 1426 bp, Oryza sativa
  Clone ID: PAT_MRT4530_98919C.1
actcccggtcgccaaccttctctctcccgatctgcgccgccgccgcagccgccgccatcccaccgccggactccggcgaagcaggcccccccccggagccaccccacagcgcattccacctcccctcccctccttccttccccgtcgcgcgcgcgcgcgaagctggtctctaggaggggggcgactttagcctgcctctccccccacacccaatcctcgactcggatcaagctgaagtgtgctagatgatgaagaggaggtgcctcaagcagaccacgatattgtagcttatggttccttgatgagcagtgaaaatgctgctggctgtggaaggagggggctttttctcgtcgtcggcttcagggtacagccatggccttgcccttctgcttcttgggaggaaagatgaagagaagcctgtcaaggtatccccgtggaatcagtaccgactagtcgaccgggaagctgagcaggtgtatcatctggcttccaggaaagaccaagctcctggtaaatgtgccccgtttatctgctttggccgtgcagctgctgggcttgagggggcgtctcctccaaaactgagttcaggcaatacatcagggagttcgtcagaagagtcgtctgcttcagcaaacgaaggaactaatggttcgttaactggaaatgagaaaaaaggttgccttaagagcaactcaagaagggattccttagagcactgtatagtggtaagtgaaggtgaagagccacgagagtcactggaagaggtccaaaccttgaaatctggcatggaacgaagaaaagttcaatggactgatacgtgtggaaaagagctttttgagataagggaatttgaagctagtgatgaaggtttgtcagacgatgatacggaaaatgagggtttcaggaaatgtgagtgtgtgattcagtaggtttaatgcctgtacattgcggcaatggaatcgatgcttctcgtgtagctgaagttttgctggctagatatgcttgcgctggtgatttctcatcgatcagggtaagatacctgtggattcaagacaaggagtcatggttgatcttatgccttttgctgaattatttgctggtgacatggtggttgtgtttagctaatctgcacacgttagggttacagttttgattccccactgtaccatatcaagatcttaactgctcaatttcttgttttcgcctttctttcccttcactttggtgctctcaagttccaatgtactatttccgtacaagtctgtccagttagtgttgtaagggatgttggatctctactatattgttttgcttctctcctcacatgttaattgatggatttgttgacattttttgttcaagttgttatgttaatgccttgatggctgagtgatgcccttgtaaagaaaaaaaaaaaaaaaaaaaa

SEQ ID NO: 101285 - DNA, 2425 bp, Oryza sativa
  Clone ID: PAT_MRT4530_9891C.1
ttagacgatgtcggtgtcaagcacgtcgactaaccgcgccgttaagttaggctggcgggtgcgacacataggccacgaagcagcggttgtttcggcgaaacatcgaatatctgagggtccacaactggttttcaacgaggtggttagtatagggatggcacataggacgttagggtgtataggatcgacgatgtcggtgtcaagcgcgtcgactaaccgcgccgttaagttaagctggcgggcgcgacacataggccacgaagcagcggttgcttcggcgaaacgtcgaatatctgagggtccacaacattggccacgaagcagcggttgtttcggcgaaacgtcgaatatctgagggtccacaactggttctcaacgaggtggttagtatagggatggcacataggacgttagggtgtataggatcgacgatgtcggtgtcaagcgcgtcgactaaccgcgccgttaagttaagctggcgggcgcgacactgtggaatgcagatggagaattcataggccacgaagcagcggttgcttcggcgaaacgtcgaatatctgagggtccacaagatgtcggtgtcaagcgcgtcgactaaccgcgccgttaaggaaggctggcgggcgcgacactggaatgcagatggagaattctggcgacgaccacaggcgcttgacggcaggcacgagctaaacaccaaagccttcatcttccaggaactcctcttctgggtttgggaaaaattgagcaagactgagtacaaccaccatactcaacaagacacacccacaagtgccacaagacacatctttctcacgtgtaaccacgtgccacataccaccacggtatacggacggaagacgtgacatagtttccaacccatcctagccatagacaagagtaccgacccaaccccacctacggccggaacctccgggacaggtaggcaggactgagcccctagcagcaggacaccggccctgtgccatgacatctcgactaccgggccgcagctcgtgtagccttcatttgccctagagatgtccatcgacccccgacttcgtccatctccatccgtgtacttttgtttataaccagactaagccacaaactaagccttacccactagacatgtggaagtacggtagtgctttgcaacagaggcccgagcttaatccttatagtacccgaggtacgactaacaaaacccaaccacgcacctcgagcccagcctaaaaccattttgggggttttgaatagagggggagagagagaacggccttccgaaccttcggcgacgaccgcaaaccacgcttcgagaacctccggaacgacgaagactacgcgaagcacacaagcaaagctacaagcctataaagaagcgataacaatacataaaaagaaaaccgagtacacagagacggtccatgggtcgacggaagcagatcccgtgtgtcaaccgaggctagtggccgacaaacggactccactagacaccacacgggctgcacacgtggaaaccacgtggctaacgagcgggcacactaacacggtcaccacacacacaagcgaacgactaccgacaccagtacacgggcgagacgcggccggcacgaggcttgacgacgcggagccgaggacgaagacgacgacgggggctgcagcgaccttgacgaaacactgaggatggacgaggacggctcgacgtagggacgaacgccacaacgacccggaacaacgagaggacgacgacgacgacgaccggggccggcgaggaggcgacgagggcagccggcagcagctgcacggaggtgaggacggcgtgggacacgccgcagcgatgcccacgacggtggcagcgcagccagacgacgagccgggcgagcgatgggacgtcgacgacgagaacgaacggagacgacgacgatggaccgcggagggcgagccgacgagccggggaggaggaaggggcggccgaagggatgccggcgacgaagagaatggagaggccggcgcgggcgacggcggtctccggacgaatcagagagcaggtcggggtagaggtcgacgcggcgacgccgaaggaggagacggcgcgaccggcccgcacctgagcagcgcggcaggggcggctggaggtggtacagtggacgacggcgggaacgcgcctccggcggtcaccgcacgaaacggagggcaggccggtggagaggaggcggctgcgacgctggaggaggcgacggcacggccggccggcgtgctaatgcggtggcaggggcggctgaagacggccggcggcacgggagagaggggacgacggcggggagttttagggaatgatttttatttcggaatgaatttatcaggacgtgacacaaatcgtcaccaaattcgatcaaaacatctaataaactacaagggagga

SEQ ID NO: 101286 - DNA, 738 bp, Oryza sativa
  Clone ID: PAT_MRT4530_98920C.1
ctagtggatccccgggctgcaggctcaacggagcgagcgcgtgggtcgggatgtcggcggcggtgagtgccctccgccgcgccctgtcgtcgtcgtcgtccgcggccaagaccagcagcagcctgcgccgcctcctccccgccgcgccacttcgccgcggggtcctctcgtcgcagccccggccgtcgcgccgcaaggacagcatcgagctctctcggagtgaggaggggaggaggctcgccggccgtttcgacgagattgaggatgccgtgcacgccattcttatcagggacatcgaatcctaccgggccagcaccatggccgaccaaggcttcgtcgagagaaggctcacctctctggggttcaccaagggatataccagggaccaagctctttggctttccaagctcgtgcttgcattcttttcttcgtgggtcgtagggactggattcgccaaaatcgacgacagcctccatcaggggtaatgattatcactggagtggagcgttacacatgcatgaattttgtcacccaacctcacagcgatcatactgaagattgtgccgcgaaaaataaatgtgaacgttttatgattctcttctctcaagaacattgggtcgtatcatctgataatttcctcacacagtatgctatcagagtgaacaaatacatgagaattgtgcatctgtatggttttgagcttaaactttattagaaaggctgtaaaaaaaaaaaaaa

SEQ ID NO: 101287 - DNA, 341 bp, Oryza sativa
  Clone ID: PAT_MRT4530_98921C.1
gggagggggaaaacctttaaaaacccttggagcatttggtgggggaaacagatgttcacaaggggaaacagggctcccgaaacgggaaaaacaaaaacccgggggaagggccccagggaacaaaactggggggcaaaggggtcacattattatgagggggcccagtttggaacaaggcctaaaaggttttactggggatttgggggcctggagttgggaaaaaaaacccttgaaccccattccaggaggtttttggggggggcgcccttgggcgggaacccctaaatgaagcacaggggggccttttcccccaggggcatcccgaacggctccggagggtc

SEQ ID NO: 101288 - DNA, 267 bp, Oryza sativa
  Clone ID: PAT_MRT4530_98922C.1
atggcttcggccttcagccacctcccccctaaagctacaatagcgacgatgcaagaccctagtgaagtgcctagaagaattgttatggaaaatcctgttaatatgggaggggaacaacatgctgaaaagaataatatgcagcatgagaataacgtacttcttcagaatttaggggaacaacatgctgaaaagaatgctcctggccaagtccaagaagaacatgctgaaaagaatgctcctggccaagtccaagaagaaatgcagtaa

SEQ ID NO: 101289 - DNA, 948 bp, Oryza sativa
  Clone ID: PAT_MRT4530_98923C.1
gcgagagacagccaccgccaccggagcagctgcgttttcagctacttttccgtgccgttttctgttggggggatcgcgttcgccgacgagatgagcagcagcaggctcggcgggggagatcgggcggggatgtacgaggagggggaggacgacgagctgttcggggagtcgtcgtcggtgtccggcggcgagtcggacgacgatggggaaggggaggaccagttctcggagggcggcgcggcggcggcggcggcgttggaccagatggagcaccgccggttcgcgccgcagccgctgcggcggttgaactcggacagcatctacgacatgtcgtccatgacggagcagctcccagccaagaaagggttgtccaggtactacgaggggaagtcccagtcgttcgcgtgcatgtcggaggtgaggtgcctggaggatctgcgcaagaaggagaagccatacaagtcgaagatcaagtcgtgcaacagctacgccgcgctgggagggatcgccaagacgcagtcgtcgagttcttgcgcgaatctgagcatgatgggggcgggcggattcagggctcccccgatccctgtaaacaagaacggctaccatcagtagtagcgactctgtagcgtagccgcgcggtagattttgttcttgaggtcttttctcccctacctctatttttggggattttgttcgcaggcgcattagcctgtgaatgaatgagcttaattacgaggcgtttcgtgatctgcagcagtcatagtaaggagggttgttcttgttgatgtttgaaaaacgatcgttttgtgtactgtaaatacggagcagaggttaaaagtacattcggatgtgctttccttcgtcaggtttttttccctttcgatggtcgatgtgaacagacgagggcatttaaagtcaaatcatatccagtgaacgaacggttttcag

SEQ ID NO: 101290 - DNA, 576 bp, Oryza sativa
  Clone ID: PAT_MRT4530_98924C.1
gctgcaggaatcggcacgagggaacaaaacctcaagccaaagcctgcacacattacataagctccggcatcatctccatcatctgatagtcctcttcctcctcagttcatccttgcctgttgcctactccctcctcaatcctgcagaagtttctgaagagatcaattaccaagaaactgagaggaaacacacagattatctgcacacagatcatcaccatacttgcatctgtcgttgagagaagatgatcccgttcacaaagcagagaagcaccaagatgaaacgtgccctgcactaagctatgctgttcggcaggagctcggtgaggccagtgatggaagcacgccgccgcacgccaagattctgcaaggcggactcggagtcggagcagaggaagctacggcgtgtcaggctccccttctggtcgtgcccgccgaatcggccgtcgggcacctgacctgacctgacctctcttcctcttcctttgcatcttccacttcctcttcctcttttctcggtgtctgaatctttcctgagttgttgaacagcctgaggaagacacgggctacgatcctt

SEQ ID NO: 101291 - DNA, 649 bp, Oryza sativa
  Clone ID: PAT_MRT4530_98925C.1
aaaaaaacattcatcacatcaggcaaggtattttgtcttacaattgcatttctcttcccaagtttgttttcatacacacacatcacatcactaccaaacaggaactttacacattctactgtactattctacaacacatcgctccctgggccgcacaataagcggcctcagcagcgcggcgattagcaactaccaaaatgcacgctttctttctttttctttttttttgggtctctcaatcaagataagtggagtagtagaataggagtaacaaattacagcagcaacaggagggaagaagacacaacagaatacatgtccagtgaatggcagacaggctactactccttgttccgtgtagctcggtctttcttgtggccgccaaggattcgcgagatctgcagacctctgctgaaggcctggttgaagagcattctggtctggaactcggatacaaacgggaaccaagcgaggaacgcgatcggggtgaagagcaggagccccatgatgatctcatatcccctcgcaagcgccttgatcgatccccacaacccgatgcgcacaattactggcttgatagcttgcgcaaccaacagcagaccccagccagttggcatgaaggcaagaatgcaaacaaagatgtcctgga

SEQ ID NO: 101292 - DNA, 255 bp, Oryza sativa
  Clone ID: PAT_MRT4530_98927C.1
atggatctcaccgccgccttccaccaaccctcaccggacaagatcaagagccaagaatcggggttcgacgccgacgccgcgctccctcctggccgacgacctcaccgcgcggctgcgggcagggcagaggctgggcgaggaggccccgcacaagcgcagcggccgcgaccgctacgtgtgctccgggacagcgtgcaaccgccgcagcaggccctcaagcacggcgccaaggcctactacgacggcccggcctag

SEQ ID NO: 101293 - DNA, 287 bp, Oryza sativa
  Clone ID: PAT_MRT4530_98928C.1
gttcaacgctacgaaactatcattcttcatctatcaatcttgatacacaacacacagtaggctggaatagaaccgaaaagtccacacctgagacagacaccccgcattcaacgcactcacttgtgaccccaagggggtctcttatacccccactgttacaacgaataacccacctgttctttcccacaaaaccctatgataccggagaagctgcaagctaacataacttcaactcgtgcctgaaaatccggaaacctgaggggcccccccccaaccgtctatttcgc

SEQ ID NO: 101294 - DNA, 406 bp, Oryza sativa
  Clone ID: PAT_MRT4530_98929C.1
ctcctttcaccgttctggaacatcaacgctcacagcatcgtgtatattactcaaggccgagcccaagttcaagttgtcaacaacaatggaaagacggtgttcaacggagagcttcgtcgtggacagctcttatgacccacactatgtgtgaagaggccaaggaagaggctacatgtcagaaacctactttggagcaattgagaaagtcatttcggttccactgtgtctagcaatgatatgattagagagagctaagctagctacaagatagtgggctcatcctcatacagactacaaagtatatgggcgatctttagtgcatgcgtaagatactaataatattaataatgcagcatgcttgctgtattctgaaaagttctataaatcagttgatgctaggcatcct

SEQ ID NO: 101295 - DNA, 673 bp, Oryza sativa
  Clone ID: PAT_MRT4530_9892C.1
ctaggagtcgcaccaatcgaaaaggcggaagtgaaatacatgtacgaactcggtaaaccgcttgtcaagcctgagctgctgcagtcccgggagtattgcgcccggaggcttgaggcagattgaatcgcccacgtggcctggcaccctcggggacgtcgggcccgagggtgaggtgtccgccctcctcctgatttccccgagggggggtcgggttgcccctgccccggccccgagggccgaggtgccccgaccccttgtggggtttgcacgcatttattgcggtctggtcaagcgtgtcacgctgcatgcagcgcaatgcagcgcgctcttttatccggtctcttagagatggcacgttagccctggttagatgaataccaggcttcatcccaaccattacaggcaagatgcgatctgtgaccggtctgacactggtcgcgtcagcaacagacagccacgatcccacgttgcgcctgtctccgccgggagtggaggtaggtgtggggcttcccagcggcccgaacctgtatacatcgtccgtgtctcgcgtttcttcctggcacgcgatctttccacatacagagagagcttgagatctcaccctaagcccccggccgaactggcaaaggggggcctgcgcggtctcccggtgaggagccacgagctccgtcat

SEQ ID NO: 101296 - DNA, 168 bp, Oryza sativa
  Clone ID: PAT_MRT4530_98930C.1
gcatcaacgatgtgtcgcacagaaaaaagaaggagaggcccagggcacgcctgcctgggcatcatgccaagagacgccaagcccggtcttggccgggctggcaacgacggtgttttgagcgtcgctttccctcatgagggcattgacgtgatgccccattgcctctaa

SEQ ID NO: 101297 - DNA, 1964 bp, Oryza sativa
  Clone ID: PAT_MRT4530_98931C.1
gaaatcaaacatgaaactgttattctcctcccaacacaatcaacagtgttcgaactaagtatcgctgaaacagcaagactattcaccggccaaaattatactctatgtaagctccatcacactacaatgcactccacagtctgtatgagcacaaagccaccccatcgaagtatacatatgtgcagcaaccagtgagacttgtcccttggtgttcaatttcaatcgcacattcacacccagttgttgggcaacgagaaattatggaacctgaaggatgtatcccctgccgtgtccctcccctgcaggtctcctctccgcaccggcggcggctcggtgcacgcgaacgagtcctgcctcaccagctcgacgccgaacgagtcctgccgcaccagctcgacgccatacgagccctgccgccgcagctcgcctatggcgaacgagtcctgccgtggcagctcgccgccgccgaacgagtcctgccgcacaaggccggcggcgaactccgggtacggcgccggctgaggcggcaggcggggctcgtgcgggcgagccggcgcgtcggccgacttgccttcccacatgagcaggtggagcaggatcgggcgcagggcgtgccggtgcagcgacagcttctggctgagcgagacggtgtcgaagcaccggatggcgcccgacgtggacaccatccacgggaggaccttttgcccggacaccctggagatcaccagcagcttcgacgcgcgcttcgcctcccggtagaggtcgcgcagccccgacctcgtcgacggcgccaggaagccgctgtcgtcctccatgacggacgagatgtagatgaatccctcctcggtgcggctaatggcgaagccgagcttggtgtcgccggcctcgagggtgatctccactggcatctcaccggcggcggcggtgtaccagacgcgcaccgccttcaccacgccgatgtccacgccgtggtagtcctcgaacccgtaaaggctggcgttggcgaggttcgggaggtcggccagtgaccccgagttgaccgtcgcggaggccgtctcgccggagatcttggtgaggagggcctcggtctggacgttgaggaaggagatgggcacaccggacgactgcgaggagaggatccaggcgttggcgcgggcgagggtgtcctcgacggagttgtagcgggaggcggcgcggtcgagcgccgtggggaggacgagcatggagaggaagctgctggagttagggatcgggagcgcctccctcatcttcttctcccacgggtaggccacgtagccgtcctgcagctgcgccttgctcagggcacacaccaccctcgaactcctcgacccagctgccctccaccccccaacaccaacaacaatgttatcaccagctcttgcaatcctgactctgtcatacatcaaacctaggatattctgatcatatccccagactcgaatggcgatgcactcgctctccatgcggtcgacgaagccgacggcgtagtttgggtcacggatcgagcggagcacgtactggcggctgcggcccacgacggccatcatcgcgccgccgcccccgaccgcggcctcctgcggcacgatgcaggcctgcatcctcgccgtcgtggtcgtcgccgcccccgccgcgggggagggcagcagctccccgctggtggtcaccagctgctgcgcgtgcgcgggccgccgcacgcgcacctcgacggacgtgtccccgcgcttgtacgccgagtggaggagcctctgcacggcggcgcgcccgcccttgaacggcgcggcgtgcgccgcggggcccccgcgtccgccgaccccgatgaggatctcctccaccacgtcgcccgtctgcaccgtctcgctgctcccgggcccccactcctccgccctcgacccgcccgccacgcactctatcgccaccaccccctgcctcctcccgtgctccat

SEQ ID NO: 101298 - DNA, 489 bp, Oryza sativa
  Clone ID: PAT_MRT4530_98932C.1
atgccgaggacgacgtcaccagttcgccgctgcgatgcccgaggtggtggtggcgcggccgacggcgcacgggtagaggaagggccaaccggggaaattccggcgaagtggatggagaggccggcacggcacggcggtgttccggcgaaaccgaggagtggccggggaaggagacgatgccgcggtatcgaaggaggagacgaaggcgtcgatcggcgtatcggtgatgaacaggagccggccggagacggtgtagtggtggcgacgccactgaacgccggcgagaacgcgcctccggtgctctccgcgctaaacggaggacggcccgggggagaggaggcggctgcgaggctgctggtggcgacggcgcgaccggatggcgctccggcgaggtgggagaggcggctggaggcggccggcggcacaggagagagaggaggacggcggggagaggtggtgaggccacgggagagcgcgggagggggctaa

SEQ ID NO: 101299 - DNA, 516 bp, Oryza sativa
  Clone ID: PAT_MRT4530_98933C.1
atgaacaccggcggggttcgggtggaggggaggcgagaccgagggcgaccttgccgctgcgatgccggcggcggtggtggcgcggccgacggcgcacgggtggagaaagggccgaccggggaaattccggtgaggcggatggagaggccggcgcggcacggcggtgttccggcgaaaccgaggagtggccggggaaggagacgatgccgcggtatcgaaggaggagacggcggcgtcgatcggcgtaccggcgacgaacaggagccggccggagacggtgtagtggcggcgacgccactgaacaccggcgggaacgcgtctccggtgctctccgcgctaaacggaggatggcccgggggagaggaggcggctgcgaggctgctggtggcgacggcgcgaccggacggcgctccggcgaggagggagaggcggctggaggcggccggtggcatgggagaaagaggaggatggtggggagaggtggtgaggccacgggagagtgcgggagggggctaa

SEQ ID NO: 101300 - DNA, 447 bp, Oryza sativa
  Clone ID: PAT_MRT4530_98934C.1
tcatggggattgatttggggagtcaatctcccgcgactttgggaagtcgatcttaaacgactctacatattcgcaaaccctgggaaaatggcgaaacttaagcagagcttcagccttctcttgctcatcgaacccatcgcagtatgggccacaatatattttctcatattttgaagcaccctcgttggatctgtgaagagcctctgcatttttcttgaatatcttgaaccggtgagtcatctcagcaaggtcacgcttcttatcgtaagccttgcaccagcgctcatacatggcccctatggcttcatcagactcaaaatccttgtccgtaaaatcgtcagcagactcatcaaaattcgtcaaaaaggcacctggctcatgaccatcatctgttacaacgcacactttttctagtctaaagaaaactatcctgcctaatatgcccat

SEQ ID NO: 101301 - DNA, 2535 bp, Oryza sativa
  unsure (1)..(2535): unsure at all n locations
  Clone ID: PAT_MRT4530_98935C.1
ttttttttttttttttttttataacaanaagaccatcattacctcctagcaatagcctacagatggtctaaaattacgtttatttcagaatcgacaataaatgtatttaattcatatcagtatcttgccagataagattgctccagcaacaaatgcctattacttgtctgatctattccaagaactggccaccctacaaagtgcaaaggtactggatcatggaaatgaagtgtgcaaggatatgaacacactgaaaaagcaatgtatgtacatcacttcttggtacatataatctgatggagaaaaacgaagggatccttgtatagtattacaatattgtaataaccaaggggacaatctaaactcaaaaggcaccaatcagtccatgtgatgactcagcagttcggacacatagcatcccttgtagcaaaagcatacctgtcaccaaatttagtcaaatgggagctactatcttctcctagaatggttggcaggccctagtgaaccttcaaatagatcagacagctgattctccaagtcctctggggtgtatttgatgtatctacctgaattccttccgctatccactagactaccatatcttcccagaaaagcacggtatgctggtatcacattttcagagatagatatcttgagctcttcacgaagctgaggatctggtaccttccagagcgtttgactcctgtatatctcatcaaaggccaagttgaagttcttgaatttctccttgatcctagagctattcccactaccacttccacttccgcttctgccgccgtgtgcatcatccttgagaaaagacaaaaccttagtccatgatatcctaaggtagttctttgaattttgccgaatcttcccacggcgcctccgtatccagtgatcacctaaaatcctcccaagttcagagtccttcaccttttggacaatatagagtatattattcatggaaaatatgcattgcagtgcaccatcctcgtacagttttgatttttcctccaaatttgcctccagataagatatcagcttcactaaatgtcgtccaagtggggacaagctctccaaatactcctcctcatcatcaccacctctatgcgtatcactatgatcaacatctccagcagaatcgtcacccaagagtttgtcaagcgtatcactgtaaacaaccaacaaccgaagatagttcatcacgtaacgtgtcattgggtggatctcaccagccatcataggccgccgtgatgactcctgctgaagaactttcccaaactcgagaagtgtgcccttcactgcgtccccaagcctttcaagaaccccctccaaatcacagattacatcattcccagaattcccaaagaacagctccttcagttcagggatcacctcagcaagtgcctcatacatgtcaagaatccgggagagcttctccggcgagcgagagcacaccgccacagcatcaccaaagttaagaatctgcattatgcaacccttggtagattcaacaaaacactcatcacgcagctcatcagacacggcgagcacctgatcacagatccggcgctcaccggtcagcagggaacgcacgaccgtcttgaccccatgcacccatttcttcatcttgtcattcagaagcttccactccatgcgctgcacttcatcgatgctgaggcgttcgaccccgagcaccgcgaggcactcgtcgagcaggtcacgtcggacgccacagtagacctgctcgagctcactggcataccccgcgcggtccatcctttgagcgatggagcgcagatcgtcaatggcctcagggcgcaccaggtcgaacacctggtcgtcgaaggggttccccacgaggctggcgctgcgagcggtgtccgggccgccctccaggctgtgcggggtgatgggatcgaactcggaggaggtgtcgaggtcgtccatggactcgagggagaggcggcgcagcgagcagaagagcccgctcgcgtccagcggcaccgcgtggcggaccatgaggtggcggagctcctcctccatccgcgccatcgcgagctgcaccacgacgcccgccgcctcggcctcggcgtcggcggcggcggcccccaccccggagagcagctggtcgacggcgacgtcgaccgcctcgaggtagtcggcgacgtccccctcggggccctcgaacaccagcagctccgaggtcgcgtcccactgccggatgagcctctccgcggcctcgaacgccccccgcggcggcggaggcggaggcggggtgggcccggcgcccgacgacggcaagggcgaggggaagaggtcggcggtgatggaggagaagcggtggtcgaagccggagaggatgcggatcatgtcgtccgcggcgttcttcgacgtggccagcgacttcacgatgtgctgcgccgccgcgagcaccttgtcgttccccactcctcccgccgcggcggggggttcctccgccacctccagctcctccggctggggatggggcggcgcgggcggcgccgacat

SEQ ID NO: 101302 - DNA, 444 bp, Oryza sativa
  Clone ID: PAT_MRT4530_98936C.1
tgtcagtggaacaagcaccgaagaacgactatcgatagaagttgatgatgaggcgcagcttggtgattgtgatggtggcctgcagctgcgccacagccatagccagaggaggaggaggaggaggtctgaagctcaacttctactcggagtcggagaggtgcccgagggcggaggaggtggtgagggaggaggtgcggaggctgtacgaggagcacggcaacacggcggtgtcgtggttgagggcactcttccacgactgcatggtctactcctgcgacgcctccctgctgctccacaccaccaccaccacaggcgtctccgagcagtcctcccaccgctgcttcggcatgcgcaacttcaagtacatcaccgccatcaaggccgtcgtcgtgcgtgagcgccctgcctccgtcttctgcgccgtcctccttgccctggccgtcc

SEQ ID NO: 101303 - DNA, 300 bp, Oryza sativa
  Clone ID: PAT_MRT4530_98937C.1
tcggaccctcagaacatcatcgacgacacctgcatgcgagcgtccgtgcccactgtcaagttagtcatctagaacggcgccaaggtcatactcgccagccatgtgggccgcccgaagggtgacactcgcaagaacagcttgaagcctatggttccacgcttgactgagctactgggagtcgatgttgagaaggccaatgattgcattgcggaggaagttgataaactggctgctgctgtgccggatggaggtggtctactcctagagaatgtgagattctacaaggaggaagaaaatgat

SEQ ID NO: 101304 - DNA, 537 bp, Oryza sativa
  Clone ID: PAT_MRT4530_98938C.1
gtggatcccgggctgagggagagagagaactagtctcgagtttttttttttttttttggaggagaaatggctggttatgaaattaaacacttaagaagatacagaaaaaaatggtgatatgtctgcagctgtacacagcatatgacaagactagaaaaactactactacgtaatactatgtttgctctatgcactgagctacattttttgtcactgtgtatctgcaatctaccttgactgtcttctatatcttcagtcggagcctatactgtccaggcaggaaactacctctctgatagttggccgcatgcaaggattacagttgacgcatttgcaagcaacctcaagcaccttcagcatctgttcttcataccctgtgccatggagtgttggatcaaggacctcaagaaggtttcccttggacctcatttctagcacccatggaacaagttcttttgatgtagagaggattgaaacagggcgtcttccagtgagtagctcaagcaggaccactccaaaactgtacacatcggctct

SEQ ID NO: 101305 - DNA, 214 bp, Oryza sativa
  Clone ID: PAT_MRT4530_98939C.1
gcgacttatcttacaccacggctattccccctccctacgcccgccttctacccgtccggcgccgcgatgcgaattatccgccccattccgcgtctttcccgacgctctaacgccgccacctctcctgtcccgatgcaccggctgatctcttctccctctttcatggcatctgcagcggctagctggtggtcaccattgcttgctcgtggaggac

SEQ ID NO: 101306 - DNA, 1891 bp, Oryza sativa
  unsure (1)..(1891): unsure at all n locations
  Clone ID: PAT_MRT4530_9893C.1
tctcttggctgccgtgcagcgactcctgcgggcgttcgcctccggtggcgcggcggctgctgcggcggctgcgaggaggcgcatgtccacggcggtggcgccggagcagacgcctgcggccgtggtgttcccgttcgcggcggctgcggatgagggcgaggcagcgggtggcggatgagaggaacgtgcagtgggtgttcctcgggtgccccggcgtgggcaaggggacttatgccagccgtctctcccgcctactcggcgttccccacatagccaccggggatctagtccgcgacgagctcgcttactccggccccctatctgtgctgcttgctgaaattgttaatcaggggaaattagtttctgatgaaattatcatcaatctgtgatctaaacgtcttaagaaaggagatgagcatggggaatcgatactgattctggatgtttttccacgtactgtgccgcaagaggcctgggcccggacgcgcgcctgcggcgtgactctgctctagcacctcaccaagcagaaagctagagagctagcaatggcgcccaccgtgatggcctcgtcggccacctccgttgctcccttccaggggctcaaatccaccgccgggctccccgtcagccgccgctccaacagcgccggcctcggcagcgtcagcaacggtggaaggatcagctgtatgcaggtgtggccgattgaaggcatcaagaagtttgagaccctgtcgtacctgccaccgctcacggtcgaggacctcttgaagcagatcgagtacctgctccggtccaaatgggtgccttgcctcgagtttagtaaggtcgggttcgtctaccgtgagaaccacaggtctcctgggtactatgatggcaggtactggaccatgtggaagctgcctatgttcggatgcactgatgccacccaggtgctcaaggagctcgaggaggccaagaaggcatatccagatgcatttgttcgcatcatcggcttcgacaacgtcaggcaggtgcagttgattagcttcatcgcctacaagcccccgggttgcgaggagtccggcggaaactaagctagttggcaagccagcaagctcactcgtgagctctatacagaggagactcgattgatctattcggttttggcagctttgaacgttcgaatcgggccaccttgcattggtttcccctttcccagtttgttgcttcagttttttttttttcatcttgtttgtgtcaacatcagctgtgtatgtatgtacatatgtatgtatcaacataggttgaagagcatgcatatgtgaatgctagcaccaggctaatcatatgcacatacacatcgtaataaatatattgtacaaatcgtcaaaaacgatacttatatgtaatactatactcagaccaaacttgatacctctggtttccatttcaattttgaataatggaaaaaagagcaaaaacttattccataatgtgtgcgtttgtagaagtaaagtttgaccaaaagtgattcattttcgccggtgttttgatgagccggtacactgtaactgtcatgttgagatgttaatcttaatttcttgttttgatttagcctgctgagaacaggacttcatcaggatatgatgcgagagctatattcatgatagatacattggtcattatgactatatagtagtaatgcattttcactgtactgttgtcttttaaaaaaaaaaaaaaaaaaaaactgctccctgcccaaatggggtgccctcgcctttgaggtttattaagggttggtgttttgccctatcctttggaaaccttcgttgtttttttgtatatttggggattgnnanattttctagtgacaaagttggatacccccccctccccccctgtttttttt

SEQ ID NO: 101307 - DNA, 314 bp, Oryza sativa
  Clone ID: PAT_MRT4530_98940C.1
aagctttttttttttcgttaaaatgtgtttattcgccttgcggaagttttcgtaaatgaatttccttctccatcatcaacttcatgatatcgtgcaactcagaaactgtcatcaacggccgtaagtgccgatatgcatccagccacagatttttagcccagggcacattccttattgatcgataaaagattcctttcgccaaatccgcatttcctttagaagtttcataatccatatagtatctccacaaggctatgcacgtcctactttctggattgtccaatgctttttcaaagagagttctaattctattt

SEQ ID NO: 101308 - DNA, 1188 bp, Oryza sativa
  Clone ID: PAT_MRT4530_98941C.1
atggccggagccagagatagaggagacgggcgagccccacgcggccacgtggtgctgttcccgctgccgttccagggccacctgagcccgatgctgcagctcgccggggcgctccacgcgcgcgggctcgccgccaccgtgctccacacggcctacaacgcgcccgacgaggcggcgcacccggagctcgcgttcgtcgccgtgccgtcggccgacgccatcgcgcgcgcgctcgccgcggcgccccgggacggcatcgccaagatcatggcgctcaacgccgccatcgaggcgtccgggtcgtacgccatgctccgcgagaagggatacttgccagcgaaagagtctgagctgaacaggccagtggaggagatgccaccactgcgtgtatcagacctgttcgacccaagcaagtacttcaacgaggaaatggccaacaaaatcctggctctctctaccgaaaccacaacgaactcctccggcacagtgttcgtgacgagctcggcgccccatccggtcttcgccattggccctctccacaagctcaccagcaatggcgacaggagcagcctgctggaccaggaccggagctgcatcgagtggctggacacgaaggagcccggatccgtgctatatgtgagttttgggagtgtggtcatggtgagccaggatgagttcaacgaggtagcctggggtttggcaaacagtggaaggcctttcctatgggtggttcgtcctggtctcgttatcggtgtctcggggaaaccggagctaccggaagggtttgtggaagcggtggagggtaggtgcaaagtggtcgattgggcaccgcagacggaggtgctagctcaccatgcggtgggtgggttttggacgcacaatggttggaactcgacgttagagagtatttacgaaggggtcccgatgttgtcaaggcctatctttggagatcaactggttactgcgaggtacgtgcaggagacgtggcagataggttttcgggtggagggtaagctagagagatggaaaattgaggaggccattaggaggttgatggaaggtgaggagggggctgaggttaagcagagggcagatgaacttaagaagaaaatattgatatgcttgaagaatggaggttctactcagcaagctattgataagttggtggaccatatgttatctctttag

SEQ ID NO: 101309 - DNA, 603 bp, Oryza sativa
  Clone ID: PAT_MRT4530_98942C.1
atgtgccgccgggcggcggaggggcgcgacgccaccagatttgcctcccttggcctcgtcacgcacaaatccagtgggcatggtgccttgggcggcgtcgatgaccaggaggcgcgagcaaaggatgggtttgggggccagctttttagccaaacggcgacaacggcggtggcaacagaggagacagtgggcgcgggagaggatgctaatggcggagaggccgatgagctggtgggagacgtggtgaggccaacggacaaaggaagaagtcccattcactcccttcctccggcggctgcaggcgttcgtggaagaggagcacgaagacagctgggacacaccttcccccatgcgcttgcagttcttggcgacgaagccagcaagcgggtgcgtgatccagtgacgcggaagaagatgagtggagggcgtggcgatggaggaggtgaggacggggttgtcggctcccttcgctcccttaaccatcgtcgctcattgccgcaatcccctctgcccccatcgctgctcatcggcgatgcctcgctcctgactgaaggggaagaggaagaggaagagagagataagagagagaaggcaacaacatga

SEQ ID NO: 101310 - DNA, 1395 bp, Oryza sativa
  Clone ID: PAT_MRT4530_98943C.1
atggccggagccagagatagaggagacgggcgagccccacgcggccacgtggtgctgttcccgctgccgttccagggccacctgagcccgatgctgcagctcgccggggcgctccacgcgcgcgggctcgccgccaccgtgctccacacggcctacaacgcgcccgacgaggcggcgcacccggagctcgcgttcgtcgccgtgccgtcggccgacgccatcgcgcgcgcgctcgccgcggcgccccgggacggcatcgccaagatcatggcgctcaacgccgccatcgaggcgtccgggtgcgcccgcgacgcgctcgcgtcgctgatgtccgggccggagcggccggcgtgcctggtcatcgacgccgcgctccccggcgcgcagaaggccgcggcggagctcggccttccgacgatcgtgctgcacaccggcagcgcggcggcgttccgcctgttcaggtcgtacgccatgctccgcgagaagggatacttgccagcgaaagagtctgagctgaacaggccagtggaggagatgccaccactgcgtgtatcagacctgttcgacccaagcaagtacttcaacgaggaaatggccaacaaaatcctggctctctctaccgaaaccacaacgaactcctccggcacagtggtgaacacattcgaagctcttgaaacccctgaactgcgctcagttcgtgacgagctcggcgccaccattccggtcttcgccattggccctctccacaagctcaccagcaatggcgacaggagcagcctgctggaccaggaccggagctgcatcgagtggctggacacgaaggagcccggatccgtgctatatgtgagttttgggagtgtggtcatggtgagccaggatgagttcaacgaggtagcctggggtttggcaaacagtggaaggcctttcctatgggtggttcgtcctggtctcgttatcggtgtctcggggaaaccggagctaccggaagggtttgtggaagcggtggagggtaggtgcaaagtggtcgattgggcaccgcagacggaggtgctagctcaccatgcggtgggtgggttttggacgcacaatggttggaactcgacgttagagagtatttacgaaggggtcccgatgttgtcaaggcctatctttggagatcaactggttactgcgaggtacgtgcaggagacgtggcagataggttttcgggtggagggtaagctagagagatggaaaattgaggaggccattaggaggttgatggaaggtgaggagggggctgaggttaagcagagggcagatgaacttaagaagaaaatattgatatgcttgaagaatggaggttctactcagcaagctattgataagttggtggaccatatgttatctctttag

SEQ ID NO: 101311 - DNA, 387 bp, Oryza sativa
  Clone ID: PAT_MRT4530_98944C.1
atgaaggaggcccgtttaagggtgctgccatcatgccaggagacacttgaaggcccaatatcgcaagatcaatctgggccgtcagatctgctccgcctctccttcctcctccgctccggccaccggagggacacggcgcacgtcctccccgccggcgccccccttctccacctcctgcccacgcgcgggcgcggcatccctgtgccgtccacgccggcgtcgccgctacatctccgcgcatgcacctcctcctcctccgaggtcggatccccttttcacgtcttccttcgtcggcctccacccaaccatcggcaggtcgagcaccatggctcatcaggaggaccacggcttactaggtttttcatctcgatgcagacacatgattga

SEQ ID NO: 101312 - DNA, 2787 bp, Oryza sativa
  Clone ID: PAT_MRT4530_98945C.1
atggcagttaaggaccggttcacgggaaaccctgggagacttaccgtgcttaccacaagcgggagtggggatttaatgcacattcagcttagaaattctggttcgagaatttctgggcgtgacaaggatgaggtggcctttccacatccctgcactattggggaaaaatatcagctgtacttctactcccatccagagacgagtcgcgacacaaatcgatccagcttcttgaacgcgcacgctcttgagccccgcaatcgcagcaccacgtctccactggttatcacccgtgccgaagcacggatgacctcgccgagaaggctaatccctgtttgcgaatcgaagcacacaaacaagaacaagaaagaatttggatgtgagaccaaaaccattagaaagtttatcttcttagatttccatccatataaagaatgccccaatccaagcatgtatgcgacctgggcgcctagtttagtgcagactggttctggactccgaattgcactcgaggtcgacttggtttgggcctccaccttgacttggacaccctggatgatcctccatgactctaagtccttctccaagtgtctccttgtcccttccattgttcataatcacaatataatcattaggagtaatgtccgcatcatcccgagaccaggagctccaccaccactgctggccactcctcgtcgcgctgtgctagcttctgctaccgccagccgcacctcgttccaccgcgctggcctctgccaccgccgaccacatctcctcctgcgctccggccagattcagtctggggcgacccgtggtggccagattcgatgccttcttgcaaggagggcccgccgccgctactccacacaccaagcgttcaccgcctcccccatgcctgagatggagcgccgctgcaaaataggccccgccgccgccatcctagcttgccaaccggcttttcagcggtttgagcaagatcttcaattgtttgattatggatcaagttcagcttcagctatttcagctgtagctgcagagcatctagatagttacacaagtgtgcctttatttattgagcatgggtccattccagaacagccaccaattcgattaattgattgggataacttggatattgagggaaaaaaagatgatgaaggaaggactgaggtcatgactgatgaccaactatttgaacttctaggcttgagtgatgaaaatgagagggcaaagaagtctgcacaagttgatgaatcaaataatgttttagaattaaatggtcatgcagtcattgagggcaccgacggtgcagccattcctgttgatgatgccatcccaggtgaagtagtcatattgtacgacaagaataacccttgtatggacaagggcactatgtacccctcattgaaagaattcagattggttgtgaggcaatttgtaattaaaaaggaatttgagcttgccatagagaaatctgacccggagagatatagggtcacagttcataatgaggaccatggatgtacatctaccatgaggataaagacaactacaccatcgcaggcatgggttgctgacaaggctattgatatcctcaacaccaatcctaacatgggtcccaaagccttgtggaaggaagaggtccttaagagatcacctggtagtattgtggaaattgacatcaaggaagttgatgggaggccatactttcataggtttttctgtgcacttagtccttgcattgaggggtttgttgatggttgtagaccttaccttagtattgattctactgcactaaatggtaagtggaatggacatttagcttcagctacatcaataaatgggcacaattggatgtatccagttgcatttggatttattgactctgagagtgaggacaattgggtttggttcatgacacagctccataaggcaataggggatctagaacctcttgcaatttgttctgatgaatgcaaggggttagagaatgtagtgcagaaggtgttccataaagctgaacaaagggagtgcttctttcatctcatgaagaattttgcaaagaggttccatggtgacacttttggaaatatgtaccctgcagctagggcttaccgcagtgtggtgttccagaagcacatgacccctattattaatggatctcctgaggtttggaaatggttgacaacatatcataaactgaagtggatgaggtgtgggttcaacccagaaatcaagtgtgactacttcacaaacaatattgctgaggttttcaacaactggattagggactacaaggacctgcatgttgttgatctagctgacaagataagggagacaattttgattctatgggataagagaaggaggattggagaaaggcttcatgaagaatatgttgatgtatattacttagtagagaaattcaaggctgcatataagagagagataccagcgctgccagacaaatcacattggcctcaggtggacatgcctttcaacttgggtgcaccactaggtaagaggggtgtagggagacataggaaattgagaattaagggttgtcttgagaccggtggcaagagtagtgcaaagagtgctgacaagaaaaagaaaatgggatacactaatgcaagaaagccccggaatggtgacaagaaggagatagctcaggcaccacaggagaagcaggaggcaatttgggagcaagcatttctgcaggagcagatctcacgggagctagcacatctggaggaaatagttctactatccctaagaagaaaaaattga

SEQ ID NO: 101313 - DNA, 1111 bp, Oryza sativa
  Clone ID: PAT_MRT4530_98946C.1
atgccgagcggctgcgaggacggcgaccggtggggatttcggtgcgacggaggggagcttcgggtcttgtggcgcgggagacggtgcacagggccatgggcggtggtggccgggcccgcgcctggccatgcgcggcagcggaggaggccgatagggctagtgcagtggcgcatcttcacaatgggtgcatacatccccgttggtaatatcgattcgattaatcccacctgggccacaacaattgctgtcaccgtcggcggtggcaccaatggcatacttctcttgccaccacagagacacaatagaatcccgatgcatatggatgcaataatgaaatgcaagattgacgattgggacatcatacacatcatcagtcatcgtaagatcggagtcaagccgattggcggtcaggccaacctcattgatagaacgatccggctgttggatcgccagacgcgggtagatctctcggagccaaatggctgcctacgaaaatggcaatcaggtggcggcggttcggcggggagggccagcaacgacggggtgacgagagatggtccggcggcgggctcggcaaggaggggtctagcggcgggggctcggcaaggcggagtgatggccgtggggtcagagcggctcggcgaggaggccgcccggcggcagctcggcgaggcaaggaaggccagaggcggctgctcggcgacgagggacggcgccgatgatgagggccggcggcagataaaccctccctccccgggtggccgcgccaagcggtggcaccggcggaggcggaggtgggaactttctgtggctcgcgcaatcaagtcggcggcggacaaaagggcgacaagcaccaacgccgagccgtacgctctgctctccgcgatctcccgcgggccgcaggagctgctctccttgatctccctcatcgcggcagcgctggccaaaacacccaaggggagcagcggcgagcacaccacggtcggcgcacactgatggggatttgaatccgctgtatctgtgttcatgtatagattgtgttgatgaatggatgtttcgtgattgtattttgttgaatggatgaagaattttttaaaaaaaaaaaaaaaaa

SEQ ID NO: 101314 - DNA, 448 bp, Oryza sativa
  Clone ID: PAT_MRT4530_98947C.1
ttttttttttttttttttttttttttttttttttttttttttttttttttttttttttttttttttttttcccaagggaaagcctggcgggggattgcaaccggcaaatcaaatatatagcccccaaaaaggaacccataaaccgccctagttcaggggggaacagttaaggcaaacttcggtgcgttgggccccccccaaaaaaaaaactattcttacttaaacaggcaaaaaaacaaccccgcgctgccccccatcccaggggagggggccaaaccccacccgtaaatatggcgacgggccttaaaacccacccccccaagtaagccgaaagaaagggatttcaaggggacggaaaaggaaggcgggaaaaccccggaaacttatccttttttagcgggccccaggggttgaaatgaaactgaacagagggtatgccactactaac

SEQ ID NO: 101315 - DNA, 491 bp, Oryza sativa
  Clone ID: PAT_MRT4530_98948C.1
tcgcgatctagaactagtaggaaagagatagacatcctaccaaaccatatgcaccagcagcctgcagtatgagccataaaaaggtatagtatagtatacttcaaccaaaaagttatactcttacaccatcacaacactaagcaacaagaacagcagctagcagcaatccctagtgctagtgggcagatggatcaatttggattctcttctttccaaccaatcaaacttttcatatatttttttcccttttggtagatcagacatcaactattctgaaaaatagtaaaatacaaagaggagtttgatctactgctgctttcttctaccatcacagggagagtgagagagagatcacttcatggcaatgccaagaacgagaggaggaggacggtgaaaaagatggccggctcagccctcgggagcaagccggcctccgcggccgccccgtcgaagttgctcgtgcccggcgggctcagggcgctccccatccc

SEQ ID NO: 101316 - DNA, 629 bp, Oryza sativa
  Clone ID: PAT_MRT4530_98949C.1
cgactcgggctaaccctaactctagcaggcgacatcgaggtcgagatcgagggatttatggcgttcccttgagagagaagctgacgaggagcgcgcgccatggttcccagatggccggcggctacggtgttgagtggtttcaagtagtgtatgggaaggcggaacaagcatcagccgttctgtcacaacatgatctggttagagaaagcggtgagagcttgatccttgagcgcaggaagaagattggcacacacaacataaggcatttgtggatggttgctgcatttgcaatgtctggctaccttttcggtgctggggtcgctacccttatcaaagggaacaacagacgaacacctgaagcggcaggaactaaggaagatacaacagacgaacactaggagcggcaggaactaaggaagaagcttggacgactagaagagtaatagtactcaattccaaatggactggaaatgattctgtaatcaaatgcctctaacaagctgtggtaaccttggaccgtctatgatttaaatcgttgttgattgggacctcccttttatatcatgtaacttagctgctgttgcgagttctctgaaaaaaaaaactagttgtagatcgcgaaaaaaaaa

SEQ ID NO: 101317 - DNA, 540 bp, Oryza sativa
  Clone ID: PAT_MRT4530_9894C.1
atgacgaccggggccggcgaggaggcaacgagggcagccggcaatggctgcacggagacgaggacggcgtggaacacgccgctgcgatgccgacgacggaggcggcgccgcgagacgacgagccggcgaggaggaacgatgacgacgacgacgaacaccggcggggttcggtcgaaggggaggcgaggccgagggcaaccttgccgctgcgaggccggaggtggagatggcgacgtcggccggcgcactggcacggcggaaggggcggccggagtgggtgccgacgaggccgagggagagacggcgcgggcgacggcgttccggcgaaatacgggcgacgccgtggcttggccggggaagaggatggcgcgagggaagcaagccgggcatgggagagggcggaacgacgacgggaaacacagccggcggccatggaaggcggccgggaaagacgcgtctgttcccgacgattgggggcgccattcaagggggaaattggggggaattgaagaggaatcaatggggattaaaaccccctaa

SEQ ID NO: 101318 - DNA, 399 bp, Oryza sativa
  Clone ID: PAT_MRT4530_98950C.1
atgtggtggtggcggctgccatcgcaaccatggcagcaaggaggtggagtggggttgggggtggctcaggaacgaccggaaacagggcagctgacatcggagacggccgtgaggtcgcataaaaccgcccaactcggtaacggtggagaagagagggacggcggcgaggtcactcccttccctcttcctccagatccgcgcatcattccgccattgccaacggtgtcaacaagcatgatgatgtggtcgatcaagcggcattccgacgagctcatcgctgacatccatgtcatcgaatgggttcagctctcagacccctcctctgtggcccatcgaatcgaccaccaccaccaacacccatccttcctatgcaaccattgtggcgctcgaggaacctag

SEQ ID NO: 101319 - DNA, 2388 bp, Oryza sativa
  Clone ID: PAT_MRT4530_98951C.1
atgggggtttcactggcagttatggatcccatggatgatcatgacagtgacgagttgccgtcaggggtggcgtcagatgaagctcacgttgccttcagagcgagaactaagaaaaggtccaaggtgtgggatgagtacaagcctatctatgtaaacggagtggttcaaagcgcggaatgccgctactgccatattctgatgagttgcaaaggttctgatggacattccaatggaacgagtcatttgtggcggcatcagaaaatttgccgggcgaaagaggacttggatctggctcagttacatgatactggtttcccatatgattcacttgatgatataaaattggcaagtcacagtgacaacagcaggttcagatcaaaggtgtgggaggagtttacgcctgtatatgttgaggggagaatccagggtgctgaatgtctccattgccacaagcgacttagtgcagataaaggtagaagccatttgaaccggcatactcagacttgtccggcacgaggagaaactggaataaatcataagagtccgttttctccctccagtgcaccaagttttaaatctggggttcaggatgagctttcacctgccttgacaaacggtaaagttcagattgcagagtatgctagcaaacttctcaaggttaatagctcagttgacaaaactccccagagccagcacattctagctttgccagcacgagacaacatgaccaaagaacaaaatacctcatctactcatgctgctccagatgtaagcaccagtaaatttgatcaggaaacatcttatcaagagctaattagaatgatagttttgcatggatatcccttgtcaatcgtggaacatgaagaaatgaaaagatttgcaaaaagcctcaacccgttgtttaacatggcatcaagcattgatgtggaagagtattcaactcttttatatcagaaagaaaaggctgaccttaaggagaaaattgctgcactttcatcccgacggatttccttatcagcaagcatttgggctcctcatggagctgagcccactgtgaagtacatctgtttgacagcgcactttattgatgcagaatggaggcttcaaaggaaaataatcaagtttggtgtgttttggtcgttgcctactgatttggaaagaatgatactttataaggaggcttgtgtattagactctgaaagtgggccatataatgtcatagcagaagctataagtgattggaatcttgataataagctttttagcttgatatccgtcagtgaaattagaaaccatgaaggtaccacaaagcttaaggacatgctcatacaaaaaaatagtcttcctattagaggtgagctatacaatattgcctgtgtggatgacgtgcttaacaacattgtttcaaaagggcaatcaatgcttcaccttgttgataatatactagaaagatttatgctggcacatgcgtactcatcgttaactcaacagcaactttttgaagctgttacaaacatgggtttgaagtgtccccaggaagacgcaaaatggtggcacaaaatttacttcaggcttgaagttgttctgcattgcaagaaggcatttccatctgaagagttgttacctgcagaagactataaggtcgttgagtctatctgcaagattctgagggctttttatcgtgctattgaagtaatctctggtcctgtttgcccaacagcaaatgtgtacttcaatgaattatggaaagttagaacaactttgcaagaagaagcatctactgatcacactgaagttgctagcatggtgagggagatgcaggaagcattccatgaatattgggaaaattcatacctatggctgtcaatacctatagttcttgatcccagattcaaaattacttttattgagttccgtcttaaacgagctttcggtgctgaagcagcaaagtatgtagctgctgtacgtgaaataatcagggagctgtttcatgaatattgcggccctgtggataaaggtgttcacacgtcaaacaatgaagctcgtgatgttgaaatggatggatttgacagtgattcattggaggattgggatcagcatcttagtgcacaatcaaggagccaacggttgtcagagcttgacaattatctcgaggatggccttgttccaaggaaagatgattttgatattctgaactggtggatgattcattctacaaagtatccaactctttcagttatggcacaggatgtcttggcaatgccatcatctgctcttcattgcaaggccgccttcagcagtgagggtccagtaattcataagcaatggagcactttgaacatcaagacaattgaggcgcttgtgtgtacccaggattggattagatag

SEQ ID NO: 101320 - DNA, 967 bp, Oryza sativa
  Clone ID: PAT_MRT4530_98952C.1
atggaggaggaggtggaattgcctctccccacggagaagctcgccgtggatccgggcagggagggaggagagcaagaactggcaaaggatgagttgcagcagcgagggtattgtgtattgggtggttacatgtctccagtgaacgacgcttacaagaaggagggtctcttatctgcagcccaccgaattcgcttgtgcgaactagcatgtgaaagctcatcttttgtgatgggtgatcgatgggaggcaatgcagaaaggttaccaacgcaccttgactgttctttcaagaattcggaacgctttgtgcaaggatggtttagctgatggaggtagtctcaaggtaatgcttttatgcggttctgacctgctcgaatcattcagcatcccaggagtgtggattcctgatcagatcaggaccatatgcaaggactttggtgttatttgcatacgtagagaaggaaaagatgttgagaaaatatataatatccagcagcgagacactgagcgaatgcagggacaatatcatttcagttgagtatcttgtatgtgatgaagtcatccagtatattggagaacacaaactctacaaggaagctgacggcagtgatacaagaaaatgacaataaagggtccagtgcaggcaatctgaatatagaccttaatatattcacggttaaatgttaggtgcctgttttatagctaataggcaaatgttgtaccctgggcatctgttttgggatatacaactgaattggatgatgagaagcatttgttttatttacaaaaatgaaacatttcgaaataaaaagagcacctgctaattgcatgttgactggaagttgtatcataatacagatagatgagatacttgtcagcagttgtactccaacatgtaatgctggacatatttcctacaaagcttcattgtgtccatgttagtatggttgctgatcacaatatttcag

SEQ ID NO: 101321 - DNA, 756 bp, Oryza sativa
  Clone ID: PAT_MRT4530_98953C.1
aactcacggttggtgcgtcgcagttcctccagcctcgcttctcttttgctaggaatggaagatttcagttcatatgtttcccagaaagatctttcacagctctttgtgcttccactgtctgagcaagcatttcaggagtatttgctaatgtcatcctctgatcatttgagtcagctcaatgatgacagagacctttggaccgatgtttggggaaatggtatcttctcttcacagaaaatttatgctatgaactttatgcatatccaggtgcctaactctattaactggatttggaaaagcaaatgtgccatgaaaattaaggtatttggctggctcctgttgattgatcgtttgaatacttatgacatgctggatagacgacattgtgcacctcataatgctgctttaacctgtgttttatgctcggcaaatgcaagagaaaccactttgcatctgtttttccagtgtccatttagttctcagtgttgggcacaatttggactggtttgggatttgtctctgaattttgaggagatgttgtatactgccaaaagttcttacaggtcctcacactttgtggagaaggtgctctatgccgcttggagtatttggaagccgaggaatggattaatttttaataatgttgctccttctattgcctcctggagagctttctttaagaatgaactctccctcttagtccataggcttaatttgtttgagagagatacgcttgtaaattggattaatctggtg

SEQ ID NO: 101322 - DNA, 263 bp, Oryza sativa
  Clone ID: PAT_MRT4530_98954C.1
tttcctctcctctccgtgggggtgctgtgtcaccttcggccgcgcatggccaggactggtgttcgacacataacacaaactaaactcaatcaaacgaggactcgctaggaccaacccaagggacacaggacgacggtgggacggatgcctgtcgagcgcttggcttcgtatctcaggaaaagcatcgtttgccttgaccagatcctgacgacgatgccctaggttccattcgacctagatcctaacagattttagagacgata

SEQ ID NO: 101323 - DNA, 716 bp, Oryza sativa
  Clone ID: PAT_MRT4530_98955C.1
gagccgttccgagcgccgccgcgacgacgaagaacgtgaccgcgaacgctaccgcgagcgagactaccgtgaccgcgatgtcagacgtaggaaagaagaggctggagagcctgaagcagatccagaacgagatcaaaggacagtatttgcctaccagttatctctgaaggcggatgaaagagacgtgggcgaattcttttcaagggctgggaaggtccgggatgttcgcctcatcatggaccgaaactcgcgccgttctaaaggagttgggtacatcgaattctatgatgttatgtctgtaccaatggcaatagctctttctggccagctgcttcttggtcaacaggtgatggttaagccatcagaggctgaaaagaatttagttcagtcaaatgcttcttcaagtggagcagcttcaggtggggcaagaaagttgtatgttggaaatcttcactcaaatattactgaagatcaattgagacaggtcttcgaaccgtttggtcaggtggagcttgtccaattgccactagatccacttactgggttatgtaaaggttttggttttgttcagtttgcacgccttgaagatgcaaaggctgctcagagtttaaatgggcaacttgatatagctggacgtgtgattaaggtttctgctgtgacagaccaagccagagttcaagtcagtggagtaactactggagatttggatgatgatg

SEQ ID NO: 101324 - DNA, 544 bp, Oryza sativa
  Clone ID: PAT_MRT4530_98956C.1
tctccctcccgaatctccggccgcccctcgcctcgcctcgcctcgcctcgccgccgcatccgctgcccgccggccaccgtagccgcatcgacgccgcggccgcgtcgccgcccctctccctaccttcctccgcccctcgcgacatcgcccctcctcccgctaggtccggccgcttcaccggcgtggccgtccatggctgcagcgatgggcgcggcggtggtccggcggctccacgcggcgcaggcgcaggcgcagcccccgcggctgacgaagctcgcgcttcgcgcgcccaaattcgtagaagttgaatttgaggatggcagctcattccatctgcctgctgagtttcttagagtgtacagcccagcagctgatagcaaaatcagatcagtagctggtgagaaggttatatttgggcggcgacatgttggaataatgtcagctgaatcagtaggaaattacggagtacggatattgtttgatgatctgcacaagacagggatctttacatgggattacttgcaccacctaggttctaacaagt

SEQ ID NO: 101325 - DNA, 1764 bp, Oryza sativa
  unsure (1)..(1764): unsure at all n locations
  Clone ID: PAT_MRT4530_98957C.1
atggaggggatccaggtctccctgatctctcaccttcatgctgccctccccaccttctccatcggcacccactacccgcaccacgcctccttcccgctcccaacaacgcccttcgcacttcgcctccctcctccttataccctctcggagcgagcacccctcgctctcaaggcagtcacctcatcccccaccaacttccaacgcctttccttcgtccacaccaacgtctccctcttcgactccgcgtccgaatcccgccgctgccgccaccgctgctgctgcgccgccaatgtcggtcgcgtgcgcggccgccctcccgaccgcctccgcgcgccgccgccaccgcgcttccccgcaggaggacctcgactggtccgcatcttgaggagggacctcgtgaccaagggggtcaccctctccgtctgctgctctatgctctcctcctccaacagctctgcccaagcattggagaggttgccgttcaaggctgatggatacaacttctggacatggaggggtcgccggatacattacgtcgagcaaggcgctggccagcccatcgtgctcatccacggattcggcgcctccgcgttccattggaggtacaatataccagagctggccaagaagtacaaggtgtacgccattgacctgctcggattcggctggagcgagaaggcgctggtggagtacgaggccaccatctggatggagcaggtccgcgacttcctccgggacgtcgtcaaggacccggccgtcatcgtcggcaacagcctcggcggcttcacgacgctgttcgcggcgaccgaggtgccggagctggtccgtggcgtcgtgctgctcaactccgccggacagttcggcgaccccaaccgcccgcccgaggcggcggaggcggcggcgggggaggagagcgcggtgaccaggctcgtcgtgaggccgctcaaggaggcgttccagcgcgtcgtgctcgggttcctcttctggcaggccaagcagccggcgagggtcgagaaggtcctcaagagcgtgtacaaggatgcgaccaacgtcgacgaatacctgatcgggtccatcacggcgccgacggcggacccgaacgccggcgaggtgtactacaggctgatgtcgcggttcatggcgaaccagagccggtacacgctggacaggctgctgggcaagctgtcgtgcccgctgctgctgctgtggggggacctcgacccgtgggtcgggccggcgaaggcggcgcagatcaagaagttctaccaggacaccaccgtcgtcaacctccaggccggccattgcccccacgacgaggcgccggagcagttcaacggggcgctgctcgagtggctcgcctccctcgacgccggcaagccggcggatcagccggagcccgctctccaatccgtgtgatcaacaataaacctggaagagaaacaatgcgatgttcaagtgtactcctataagctagttaaaaatgataaataatttactagtagtgattttagtttatagtgatctatgtatagtgttggggtgtttgttacctagctgacgaacttttttttttttgagaaatccctcgttgccatgcgagatccgctcgaaattagacaaaattcaaaccggaagcttcaattcataacctcaaggtaaagaatgtagcgttacttagcaagtgattatataaattatttattatttccaaaaaaaaaaaaaaataanatntnggaangataactggttaggttanaccttgtt

SEQ ID NO: 101326 - DNA, 1701 bp, Oryza sativa
  Clone ID: PAT_MRT4530_98958C.1
ctagctcgggaacttcgttgagtactgctgcggagacataaatgttgccgtaatcatctttcccgcaaaccacctcccatgaagtgctttctgtgcactcatggcagctgttatactgtcaaatcgaaggtacacaaagccagaagtattcttgtccacaaaaatgtgttttacttggccaaacttggagcattcttcttggacatcatctttgatatccaaatcaaaatcagggtccgtctccacggatggatcaaacatatttttaagcaataggcattcactgggtggggctgtctcaatggcttgggtagtaattggaagagacaccccaggaactgaaccaagaccaggcactgtaggcagtacagatgcagcgactggaggagcaccaagaactgatgcaggtggtaatccaacagaagtgttcaaaccagtaccggctatcccagcagtcaaactggtggtaacgccgctacggtctaatttctgcatcaaaagagctcttgaactagcattcagtgccaaacctccaccttcatcatcatccaaatctccagtagttactccactgacttgaactcctgcttggtctgtcacagcagaaacctggttacagcagtttagcatagtgtcaggcagaacccttatatttgagatgtatagcttgaaaacaacatgtattctagtaaatctgaagaaaacacttgccttaatcacacgtccagctatatcaagttgcccatttaaactctgagcagcctttgcatcttcaaggcgtgcaaactgtctcaattgatcttcagtaatatttgagtgaagatttccaacatacaactttcttgccccacctgaagctgctccacttgaagaagcatttgactgaactaaattcttttcagcctctgatggcttaaccatcacctgttgaccaagaagcagctggccagaaagagctattgccattggtacagacataacatcatagaattcgatgtacccaactcctttagaacggcgcgagtttcggtccatgatgaggcgaacatcccggaccttcccagcccttgaaaagaattcgtacacgtctctttcatccgccttcagagataactggtaggcaaatactgtcctttgatctcgttctggatctgcttcaggctctccagcctcttctttcctacgtctgacatcgcggtcacggtagtctcgctcgcggtagcgttcgcggtcacgttcttcgtcgtcgcggcggcgctcggaccggctccggctcctccgctctctatccttctccctctccctctccctctccttctccttctccttctccttctcgcggtcccggcttctcctctccttgtccttgtccctctccttctccctatccttctcgtcccggtctcggtcgcggtcgcggtcgcgacgctcccggctgctgcggtgccggtcccggtccttgtcgcggtcgcggtgccggtcccggtccttgtccttgtcgcggtcgcggttctcctccgagcgagagcgcttggatctgcgctcgccatcgtcgcgctcttcgtcgccgccgccgccgccgccgctccggcggcgagagcttcgctccttctcctcggatctgggcgcggcggcgccgttggacggcgccccggagccctccaccgtcttctccaagtagtcgtactcgtcgaaatccat

SEQ ID NO: 101327 - DNA, 509 bp, Oryza sativa
  Clone ID: PAT_MRT4530_98959C.1
ccggccgggacatgccctaattatttggtattgttgcaactattttgcaggaatacttctggctttgtgtaccttcgatttgacagtataacagctgccatgagtgcacagaaagcacttcatgggaggtggtttgcgggaaagatgattacggcaacatttatgtctccgcagcagtactcaacgaagttcccgagctagcggacagcaactttcgttgatcgctgaagattcttgctctattgctgtgtaacggtctcctgtaacattatgtcatgcagccttttgtactttatagcatgggttattcaacactaagttcgcatacatcactcgtttttgcttaagacattatctataagctctcgaagtgtacggcgggcaaatattttaactcttggtgtttcaattgatcgtgccgtgatggcaaatattaaagaaatgttgtcgaattttggggcaatcgtaattgcccaggaaagaaaaaaaaaaaaaaaaacccgcggccc

SEQ ID NO: 101328 - DNA, 3000 bp, Oryza sativa
  Clone ID: PAT_MRT4530_9895C.1
atggggaatataattggggtgaatggtgagatgaatgggtataatggtgaggaggaccaattgctagccgccgccaccgtggacctcctcgacgcgtcctactgcgccgtcaccatggacctcctcgccgcattctaccgtgctgccgccgtggtcctcctcgctgcgccatgccgcgccgctcccgtggaccgctggcatagcgccgccacggccaccgctggggaccgccaccgagccaccgttgccgagaaagcgctggatcgggatcggaatcaagggtttgaacttggcagtggagggattggtgtcacgggtgactttgctggaggcaatgctgccatatggttgcaaacttatgaggaattacatagtgttgagagttgggcggagttatgtgtagtagttcatagtaaattcggaaaggataaataccaggagcacttagaggagctagaaaatatgagccaggaaggtagtgtagatgagtattacactaagtttgaagaattgatgcacaaggttttgatctacaatagggcctttgatgacacttactttgttacaaagtttatgggtggtttaaagactgagattaaagcagcaatcaagctacacaagccgagatcagttgatgctgctttgtctttggctaaaacgcaggaggagctgctgggagagctcaacaagaaaccttatcagaagcaccacttcaaggaattgtacaagccagttaacaagttaccttatcaaggcaagggcatacttggagcagctcctgaggagaataagaaggttgatgaaaagccaaagtgggaggaacagtttgattctctaaaagcagctagaagagcaagaggggagtgcttcaagtgtggtgaaaagtatgggcctggtcacaaatgtccaaaatcagtacaactgcatgtggttgaagagatatgggatatttttcaattacatgggggcatagaaacaggggaagaaatgaagagagtggtgatgaggaactggtactctttgagaagttcaagcaatttcctagctgaacatttggttgacaaacttgggttgaagtgtaaagaggttcaaacaactcagggacagacatttgtgacagattttaaaatcctagctctgggaggttatgatatgatcttggggatggaatggccggaagcatttagccctattctagtagattggcaaaagaaaacactcaatttcacatatcagcaacagagggtgacacttactgggattaagcaccaattcagccttgggagtgctctgtcagttaaacaattgaaggggttacacaaggatgggacctctgatgagcatgacattccagtagaaattgaacatgttattgctgaatacagtgatagattccaagaacccaaagaatttgatcactgtattcccttgttgccaggggctaaacctgtctctagaaaaccttacagatatgcaccacaacaaaaggatgagattgagaagcaggtgacccaaatgttacaagaaggactgattcagtcgagtgcaggtccatttgcctcccctgttttgcttgttaaacaaaaagatgggtacgacagaaaattcattaaggcttatggagtgattgcaaaacccttgacacgcctgcttaaaaaagaagttatgtacagttggggggctgagcagcaacatgccttcgatgcagtaaagaaagctcttactcaagcaccagttttagctctaccagacttaaccaaacaatttgtggttgaaactgatacaagtgataagaggataggggtagttttgttacagcagggccacccaattgcttttattagcaaggctttgggagttaaatcccaagcaatgtcaacctatgaaaaagaatgtatggcaatcttactggcaattaacaagtggaggtcttatttgcagcatgccgagtttgtcatacaaactgaccacaaaagtcttatacacttaactgatcagcaactcagtacaaacatgcaacaaaaagccttccttaagcttatggggttgcagtatgtgataaatttgaagaaagggtcagacaatcaagttgcagatgccttgtctaggagacatgaggaagaagggctagcaatgtctgtgagtacacttaggtggttggaaacagtggttgaagcttaccaacaagatcctttcacacagcagctcttggcagctctcagcttgaacccagaaggggtggatggatttcttctgataaatggagtgatcaagctcaaaggcaagatttggctaggagatcttcctgaggcacatcaagttgtcttactagccatgcacagcagtggcataggagggcattctagaattacagcaacctaccagaggataaagaatatgtttgtttggccaggactaaagaaatcagtccattattggttgtctcaagcacagcattggtacaacacctccttccatattgttcttggaaaatccccatatgaagtcctttttgccaggaaaccaactcattttggagtggtggatgtgggaagtagtacaattcctgatgtgcaggtctatcttaagcttcaaccttttgcacagttgtccattgctcagcgctcttgtcagaagattagtttcaggtactttggaccatatacagtgttggagcgtgttgggcaagtggcctatcggcttgatcttcctgccggaagtcaaattcatcctgtggtccatgtttccttacttaaagctgctgttaaacctgacactattgttagtcctgaactacccttgcagattacggatgattcagtgttgcttcagccagaagtggtattgcgcagaagtctcatcaaacgtggtaaagcagcagttccttatgggctaatccagtggacaggcgtgccagctgaactcgccacttgggagaatctacgtcacctgaagctgcgatttccttcggctccagcttggggacaagctttgtcttaa

SEQ ID NO: 101329 - DNA, 483 bp, Oryza sativa
  Clone ID: PAT_MRT4530_98960C.1
atggaggttgtgatgccagaggtgccatcatcgcttgtccaccttggactaggttttcacccgaaaagtcatgccagggagggagagccctccgccggcccacacccctttcatagcctcgggtctcttcgccggtgccacccgcaccggcctcgtgctgatgccaatcgtccatcactcacggcctcctgtctaccggcagccaccgttgtagcaccaacgccggacattcgttgcccacagcttcctcgttgctgcccaccatctagccacgtcggcgtcgacctcacgctgccgacgccgtatctgctgcgtcgcctcagccatgcatgtccatcgcaggagcgctggatccggtcatggggcggccaggtcgaggtgcgcccatgccagatccatggcctccaccaccgccacgatctggtcatggcggcgccggatctggacaccggcaccctagccccgttgcttcctcgtcggtga

SEQ ID NO: 101330 - DNA, 807 bp, Oryza sativa
  Clone ID: PAT_MRT4530_98961C.1
atggatttcgacgagtacgactacttggagaagacggtggagggctccggggcgccgtccaacggcgccgccgcgcccagatccgaggagaaggagcgaagctctcgccgccggagcggcggcggcggcggcggcgacgaagagcgcgacgatggcgagcgcagatccaagcgctctcgctcggaggagaaccgcgaccgcgacaaggacaaggaccgggaccggcaccgcgaccgcgacaaggaccgggaccggcaccgcagcagccgggagcgtcgcgaccgcgaccgcgaccgagaccgggacgagaaggatagggagaaggagagggacaaggacaaggagaggagaagccgggaccgcgagaaggagaaggagaaggagaaggagagggagagggagagggagaaggatagagagcggaggagccggagccggtccgagcgccgccgcgacgacgaagaacgtgaccgcgaacgctaccgcgagcgagactaccgtgaccgcgatgtcagacgtaggaaagaagaggctggagagcctgaagcagatccagaacgagatcaaaggacagtatttgcctaccagttatctctgaaggcggatgaaagagacgtgtacgaattcttttcaagggctgggaaggtccgggatgttcgcctcatcatggaccgaaactcgcgccgttctaaaggagttggttgcggttatcggattttcgccgatcgcgggttttctcgaagattcgtgaagctccgtgaagaccttgagcaaggcaagtcaccctttgatcaattgctcctataa

SEQ ID NO: 101331 - DNA, 375 bp, Oryza sativa
  Clone ID: PAT_MRT4530_98962C.1
atgcagggcctcgcgtccccgcggtgcgctcccttctgcggccgctccggcgccggcgcgggcggggcgccacgcgcgcggcggcagcagggaggtggctgcgggcggccgctggaccgcgtggccgggtgggtcggcggcggcatcgccgcggcgttcttcgcctccctcgagcggtgctcctgcgtgaacgtccgcacgcacgacgagctcgacgacgagacgagggactccgaggcgctgctcatcatgttcgacgtcgtcgacggcagcgaagacgctgcctccgccgccgccggcgccggcgggaggaggggcaggaggagcgagaagagcaagcgaggtggcggcggctgtggcgggcagctatggtga

SEQ ID NO: 101332 - DNA, 205 bp, Oryza sativa
  Clone ID: PAT_MRT4530_98963C.1
gaacagagaaaaaattaagaatgtaacttacattgtttgaaccaccctaattcattgataactgaaaaacgggcaatgataagctttatttcgatacgaagagatcatggacataatcaccatggggatcctttgcactttaacctaactaccatcagagccatctgtactaattaaaacagtcctaggtaggacacctagctaa

SEQ ID NO: 101333 - DNA, 545 bp, Oryza sativa
  Clone ID: PAT_MRT4530_98964C.1
atgagtattgctgtctttcttcccggcgaagacctgatgtggcgtaagtcctgagctgcatgttcaagcgcacacactttcctaggcgcatgccgaccactggctatgtagacacagatgaccgtgactggcgtgctctctcggtgcaaccttcgcaagataatgaagagaagcactgggacgaccttggcgaagcttaagcagcgcatgctacatgctggtcctaaacacgagctagtgaacaggcaacatcaatttatccaccggtcttgcttctaaagctcatggtggcccgactcctgctcttatgacgctgcagaccttgggcaggtacaagaggcgaatctgtcagacaaagatagagctctgacaacagagctgggattactaaacatactgacaacggatacattcgatctactcaagggcacactaatggaatctggactgaccactagctgatactctaaaggataggtacgtctgtcatatccgagaaagctgagcctgagcccaccttgtgtgagacgtatgctcaactgtga

SEQ ID NO: 101334 - DNA, 103 bp, Oryza sativa
  Clone ID: PAT_MRT4530_98965C.1
atgcactggaaaacacctgatttggagcctggccgcctgggccgaatcatcgagtgccttccagaacttttggccctgtggatccaaacggcatgggactctg

SEQ ID NO: 101335 - DNA, 576 bp, Oryza sativa
  Clone ID: PAT_MRT4530_98966C.1
gacaatacacttttcttcttcctacatgctctcttcttttgctacctcttctctttctgctctacaacaggatgatatctctctgcctcctgctcctccgtggtgggacgccggcgcgtgccatagcttggctactctgcggcgcgggcggcccgctccttctccttcttcttggtgccgacggtcgcgctgatgttatgggcgtcggtggccgtgaagtccttgccggtgctgtcggcttgactggggctgaacggcacgcaggatggggacgacgagatgcactttgccgggcacctgatcgcgcgcacgagtgcggcgggctcagcgaagacggcaaggtaaggcttgggcttgctagagcgtcatgcataacggcttctttggttgagtcctacgatactataatagcaggtggcgatggagagaccattgtattaattgacgaatgccacggccatggtggagctggagcggctgaatatgtgaagcatcaccttctcagcaatctaggtaatcatacagagatcattactgatatagagtgcggtatcgctgaaacggacaaccatacag

SEQ ID NO: 101336 - DNA, 2883 bp, Oryza sativa
  Clone ID: PAT_MRT4530_98967C.1
atggcaccggccaagaagtcccctcgcccttgctgccacgtctccttcctcctcctccagctcgtgctcctctccgttatcgtcttccccgccaccgccgccgcggcgtccaccttccgttgctccaacccctcccctgtacccaatgaggtaccggaaggaaacgacgcgcgcgaactcctccgctcctttcagatcacgacgggctacttctccggcggcgaccgtctcttcgctcccgacgacgactcggcctatatcccacgctcgttcgccttgtcaccgtataaggttgctcacaccaccgatccggccatcctcgaggtcgctgccacgcttgccctttacgggccatccagcgaccatggcagcggcggcggcgcccgccgacggcgccatcgctacttggtgagtcagctggtcgcatctttcgtcctccatggatactacagctccgcttccggcgaactttgcgttgtcggcggctctggcagctactccgtcgatggcggctccgtcgaacacctccgggacgtcaacctccacctccgcgtcccgaacgctcccagcctcgccgacccgttcgtcaccggcctcctcgacggcgccgacttcgagaccatatccctcgtcgcgtacgtcgagaacgaccgctacgtgtacagtgagaagagaccgtcttgcccgccgcccatgccggcgcacgccgcgcggggcgcgctccaggcgctcgaggccaacttctcgtgcagccacctcagggagcttttcgtgagctcctacaggttggagaacacgagcagcgacgcctcctcgcctgcagcaagcaccttccagttcccgctgagccatggcgggcttcgcatgctcgtcaaccagatgcactgcaccgcgaacggctcggtgcgcgcctacgtcgtcttctccaactacacggactcagagagacggtggcggcgcgacatggtcatcaataaccgcttcttggtcaaggaggaggccgtcgtcgccgacgggtactgggactcgacgacgagccggctctgcctcagggcgtgccgggtggcgcactcgtcggcggcagagacggagctgaaggtgggcgagcagtgcggcctcgggatgagcttctggttcccggccgtgtggacgatccgggaccggagcatcgtggccgggctgctctggaacgcgaaccaggaggagagcggcggtaacaagcacgccggtgcttcgctctccggcgtgatgtcggtgtcaagcatcgacggcgacgggtacaaccgtaggcgtagcaacctcaccgacgtcaaatacaactacacgatggttgagaaggcgaagaaacagtatctcagctgcaagttcagcaagaggaagacaggacggttcccaggcaacagcagcatgtactcgtacagcgacttcagattcgacttcatcgaaaccctgggcgctggaggacaagcgtctccggtgaccatcgggtcggtgatggtcgacggcgatcagctggcagcagaatacatgttcttccgacatgccatgggagagatgaacaagagccggacaacagtggtcaggatggatcattcccagctgctgaatgtcagctacgatataagctatcgtgtccgatctgcaaattcgaaagcacccgaaggagtgtacgatccaaagacaggaatcctgttcatggtcggctgccaagagatcaatggctcctccactgactgtcaaatactggtaacagttcattttgcctctttggatgccaaggggaatggtcacggcagggggaagatcagtagcacgagagacaaggcagatcgtctccacttcgaagcgatggacatcaccttgtacgggatgtacagggagcagatcggcgagtcgatctggaggatggacctggagatcatcatggcggtggtctccgcgacgctgtcgtgcgtcttcgccgcgctgcagatccgccacgccagggcgaaccccgcgtcggctccgtccgccacgtcggtcgccatgctcgccgtcctggccctgggccacgtgacccacctcgcgctcaacgtcgacgccctgttcgtcagcaggaggacgcactacatcccgatttccgccgatgggtggctcgagctgaacgaggtgatgctgcgtgtgcccacgctgatcgccttcgcgctgcacctctgcctcctccagctggtgtggtccagccggcgatcggccccccgcgccatagccgagaaatggtcggccgccgagaggagatcgctgtggatctgcctgccgttgtacctgctcggcggcctcctcgccggggcagttcacgtcatcaacaatggccgtgctgcagcggagaactcgctggtcgtccgtgtcgcgggcgattcgggcacgctgtgggacgacctcgcgtcgtacgcggggctggtcctggacgggttcctcctgccgcaggtgatcctgaacgcgttgtcccggtccagggcgagggccatctcggcgtggttctacgtcggggtgaccgtgctccgcgcggcgcctcacgtgtacgacgcgctgagggctcgcggctacgtgccgagcgtgaggccgtcgtcgacttacgtgtacgcgagcccacgcgacgatctcttcggcgtcgcgtgggacgtcgccgtgccgttgggggcggcgtcgctggcgctgctgctgttcttgcagcagcggcttggaggtgccttcttcgtgaggggcaggaggtttggtgaatacgagatggtgcccaccacggatttcgacgatatgggttcaagagatggattctccaacaacaaactactcgacgacttcgattggggggagatcaaagccgaccggagtatgtcttccgactag

SEQ ID NO: 101337 - DNA, 301 bp, Oryza sativa
  Clone ID: PAT_MRT4530_98968C.1
cgaggagtcgcatcgcatcgaccccatcgctcgctcccctccgcgccggcggcgccgcccgcgtccccgtgttccctcgcgtgctcccctcacacccgcgccgccatccctccctccctccctcccatcgccgccgctcctccgtcgcccgccgtggggagaaaagtcgggggcggggcggggcgaggaagtcggggatccgaggcggggagtgttaccaccaccgctacatccggaccagcgcccgagcagccgcagtccgcagacgccaccaggcaaaccccaatccccatcatcccca

SEQ ID NO: 101338 - DNA, 390 bp, Oryza sativa
  Clone ID: PAT_MRT4530_98969C.1
atgaagggaggaggatcaaagaggagattgctccgggccttcctccactcatggaagaagctcggcgccgccgccgccgccgcggccccggcggccggcgagtgggctcctctcgacggtgacggcgagggcgccatcccgagcgacgtgccccggggccacacggtggtgtacgtcggcgaggagctgcgccgctacgtcgtcagggtgtcgtccctcgaccacccgctgttccgcgagctgctcgaccgcgccagggaggagtaccagttcgccgccggcgccgacgcgaggctgtgcataccctgcgacgaggacatcttcctcggcgtcctctgccatgtcgactccaagcaggagcactggaggctgatctcgttttgcagatag

SEQ ID NO: 101339 - DNA, 2536 bp, Oryza sativa
  Clone ID: PAT_MRT4530_9896C.1
ttgcttctgactagcgctaggcttaacaggtaccgcatttgctccagtgaccacttggcgattggcatgtctgcttccttaacaggtactacagttgtaacagacaataactttcttacgctcgggttcttcatcttgtacttgatttcttggctgctgtgctggaacatccaaaggtacaatgccgatactggcctctgtcttgtcaactgatggctagggctgaaattgagcattgacaccttgtggtaatgcactcgctggagttggagctgttgcaacgcgggctataggattgcttcgggatgcatggatgacaattcgctgaggagcaagcttctgattgcagggagttgcgtggactgacgtgctggcagctatgtttctcggttttgggcacttgtcggcgaaatgacccattccttgacaattgaagcaacagatatcttcccggactcggcattttcttttctcattttgattcctctgtcctggcactggagttaggctgaaactgaaatcttggcgaggatttgtgttgccttgatgcttctctccattggaactggcgggttggttggccatcttcttcgtcagcagaaaactgaattgacaatcttttggtacatgatcagttccttcacaaaagaaacaagtgatcctgctcgttggacacctgtcgggtggatggtcttcctcacaatgaatgcatgtagtggcacacgagctggcaacatgaccgatttctccacaacgagagcatgccttacgtccatttcatcttcatcatctgaggagacttgatctgaatcttcactatcagacactctacctccattagctaaaagatgctctgtcaactgtggtgcacctcggaaggtatttcttctctgacgttttgtcattcctggtggaggccattctgtgctggtaatgatcatcttacggacttcatcttcggttcgcattgatgtttttcttttctgctgaggacactcccttgcatagtgcccttgctcatcacacataaaacaaatgatacttgcttcttttgagtcaacatgtggcacgtcaccctgggtccttcgggatgctggcggcatgctgacttgtggtgtgagtgcttggactgcctccaactgcacttgaggttgtatttgactcaggttcagaattggcgtctgatgctgctgtagtatctctataagcaatcggttctggttaatcaggtgttggactagtgtcacacaactggtgtctggtgcttcattcactcgggagcttgaggtaccaatgtcctgacttctgaccttattgcctttctcattgtcagccatctgttgcaaaggtttggagagggagagagggaaaacaaaggggagagacagattagaaactaaggataggaccttaacagatctaagtcttttgtcctgcttcacagctggcttcactgcttcctccacttcgctagcggatcctgcagtcttccggagcttcggcaaacaactgacgatgtcttcttcttcactgacctgaccatctagtacagcttgtcgcgaccgggaaaattgccttttcccgaacgctagtgtattaatccccgtcccaggaaaagccggggtacaccacacaaacatgatacaaaaggcacatctttattatgtcgataatatttacattattacaaaggcacttgaggcctacggccggaacctccgggacaggtcggtaggactgagcccctagcagcagggcaccaaccctgtgccatgacatctcgactaccgggccacagctcgtgtagccttcatttgtcctactagacatatggaagtacggtagtgctttgcaacagaggcccgaagaccggtccttatgtagccgaggtgggtccacggtggaccgggtgcacccgggcacacaccggccggcgccgtgggccccgcgcgtcagccgcacctaagggcgcgggcggctgacggctgggccccacgcggcagccgctcggcgcgcccgaaggcagccacgtcggcgcggtcggcgggaggcggcgcgcctgcgcccctatggtcgccggcggcggccataggcacggcggagctgcggccgagagaggggagggaaaagggggaaacgaggtggcggtccacggctcaccctaggtctacggcgacgacgaaaaaggcggccgaagcggaggaaggcggcggcgcggctcgggtccacggggacggcggcgcttcggcggtcgacgagctcgacgagggggtggacggcgacggcgacggtgcggcgaagccggaggaggcgacgccggggcgggaaacggtcccggtgagcggagagaactggccgaaggtcatcggcgatggaggagagagagggcgacggcgcgagctcgattccggcgaggagacggtgcggcaaggggcggaaacgggcgagggaggcgcggagagggtttaaatagggttggaagggggagagggcggccgggagaggaaggaaaccggccgggaggtccagccgccat

SEQ ID NO: 101340 - DNA, 3169 bp, Oryza sativa
  Clone ID: PAT_MRT4530_98970C.1
cgggctgcaggaatcggcacgaggctcctctcccctccatccaacgctgcttcgtctttggagttggagttggagttggacaccacccaccggcacctagctaggcttctctaccatcatctgtgatctttcttgtcgagagagagcaagcagttgcatgcctgattggtcagcgagtgagctgctggtggcggtggcggccgcgcttagtcagcggtggtgactgtcccggcgatgtcgggagctgaccggctaagcatccgcgccgcggcgctggcgctcgacgatgctgccgccgggagggacaagccggacaccaagcgtgacgtcttcgcggatcttggctcgccggtgtcgccgctgcggctgcggcctggcggcgccgcggccacgccgtcgtcgtcctcctcgtccgctggctcggccaagtcgcccgcgctgtgcaatgctggggcgggggtgggtaggggaggaggaggaggccgggggagccactcaggcgagctggtggcggaggggaacccgccgcggccgccagggcaccgccgctccggatctgggcctctgatattctccggcgggagcagcagcgccgggagcggaggaggaggaggaggctgcggcggcgggagcacggcgagctcgccgctgaccaatgcgctgcctaccggtaacatctgcccgtccgcccgcgtcgcgagcgcggcgcctgcgccgccccgacgcgcccgtcccgacgtgcttggatccggcacggggcactatggccacggcagcatcatgagaggcggcggcggcatgactccccctagaagcagcattgacgccagtccgtaccacggcagctactcgaggtcgccggcgccgcagggcagcagcgggggtctccaggaggtgaccagggccgggaacgagtggtacaagaagggccattacggcgaggcgctgcggcactacgaccaggcggtggcgctgtgcccggacagcgccgcgtgccgcagcaaccgcgccgccgcgctcatcggcctcggccgcctcgccgaagcgctccgcgagtgcgaggaggccatccgccgtgacccggcgagcggccgcgcgcacagccgcctcgccgcgctctgcctccggtttggaatggttgagagggcaagggagcacttcatgttagctgggcaagtaaatcagtcagacccagctgagtttcagaggctccaagaggtggaaagacatctggggcgatgcatggatgcgaggaaaactggagactggaagagtgcgctaagggaagcagatgctgccattgccaatggagcggattcctctcagttgcttcttgccttacggtctgaagcacttctccgtctcaacaaactagaggaggccgattcgactattacaagcttgtcaaaactggacattgcatcgctatcttcaatgtcaactaaactatcgggcatggttgctgattcatatgttcatgttgtcgaagcccaggtcaacatggcttttggaagcaaaactagcactgaggtttattcctgcaggtttgacatagctgttaccatggctgagaaggctagggttattgatcctggaaatacagaagttggaaggattacaaacaacataagattagttgcacaagctcgaggacagggaaatgagctttttaaggcaggcaagtttgctgaggcatccttagcttatggtgaagggctcaaatatgagccctcaaatccagtactgtactgcaatcgagcagcttgttggtcaaagttaggtcggtggatgaaagctgttgaagattgcaatgaggccctcaaagtccatcctggttacacgaaggctctcttaagacgtgcagcatcctatgcaaagcttgagcgctgggccgattgtgtgcgggactatgaggtgctacgcaaggagcttcctaacgacacggaggttgcggaagcattgttccatgcgcaagttgcactgaagacagcacgtggggaggaggtagcaaatatgaagtttggaggagaggttgagacaattaccagcatagagcaactccgagatgctatacattcacctggagtatctgttgtttacttcatggcaacgatgaatcagcagtgtcaacagataaccccatccgtggactctctttgctccgagtgcccttcagtgaattttctgaaggtaaatgttgatgagagtcctatggtagcaagagcggagaatgtgcgcatagtcccgagcttcaagatatacaaggacggtgcaagaatgaaggagatgatctgccccagcttacacatcttgcgctattcagtcaagcattatgctgtctccagttcttgaggaggtcttactagtggcactcatattttttgatgcatataattccctgtcacctaccaacattttaccaacaaactattctctataatcagcctccacagcatttctccagctgcatagttactctccgctgagcataatgagctaaagcttgattcacgaagtagtttcctattggctatctttcctttgttacctgttgcatctattttctgatccttcatccttccaaccttattcttggatcatttaggttccttcatttgcttattcccacccatccatcgttcggccaacctgcattgtgcaattctttcatctcttacattctgttctgccacctcataatgcatttgacacatttttgctgcagcccataggccactcctcaagaaaaagaatgcttctgttctgacattgtttagatgcaggcatgcttgttgttagagaaagaaataagaggctgcagacagaattggtttttttcattacatgtacatataccatatagcaaaaacatgaaaccaattggaagatttgattctatggagggatggtggtgccactttgcagtggacagaagtacagggctagttgccaattgtagagagaagatagatgaagaaagacaatgtaattggtagggagataatgagggaggtggttgatgtctctttgcatatgcctctgctgggtctgtggtgctgatacatatatactacttgctgacatttttatgaataaaaatagcccaacattctttcttatttctacccaaaaaaaaaaaaaaaaaactcgagactagttctctctctcc

SEQ ID NO: 101341 - DNA, 816 bp, Oryza sativa
  Clone ID: PAT_MRT4530_98971C.1
atgtatatgacagatctttttcttgatgtcatacctcagacaacagaatcttcccctccacatcaaagcaatagtggcagaaataccgaatatgccccaagtctgattcctaatggaggacttcaacccttctccaagggctcatcagagaaccagctcatcggctgtggacacatcagctccagacccaaagaaaaagaccaaattaaagaaacccaagccaaccgacgatctgcctgccctggacccaccatcgaacaagctctggatgaagaagagatcggagaggatgttgatcaagccgtagatgaaaaaaagagaattgttgtgaagaagaaatcggcagcaccaactctcaaaccggctccaccacctcctcctccttctcctgtccagcaatcatcaagcgataaaactccatcagctgcagggagtcaccatgttgaagaagaagtacaaccagctactcctgctatcccacttgtgcatgaagagaaagccaagttagatcaactctctgttgggccgattcagtcgaatatagatcggctcgaagctcgcaagatttatttaatagctcaactcgaagaatgcaacgccgagctggatctggaaaagcaaaagctagccgatcttccaaatgccgttgaagatcaaaagtccagattgagattggctatcaagaatgtggctgacatgaccaagtctctcaagatcatccctagaactgatgctcaagatgcccaagccattgaagaagtagaacaaattaggcaacgggctgtttcggctatccagtgttatttgtctcagtaa

SEQ ID NO: 101342 - DNA, 716 bp, Oryza sativa
  Clone ID: PAT_MRT4530_98972C.1
gagacaagacaaaaattctctggcagttacatatttgcttcttgaattccaggcttacacttcaacaagaacaagattaaagaatgtgtagggataacatgatgagttccagcactagacttgctgatctgttatgatagacaagaagtaaatagaaatcaccctggcatgaagcatagtggaagatcagttcgatcaagattcagagcttcagaatatttttaacagctcatcaagatgtggtgctacagaatatttgaacaggttgatcaacacaactgaatcctcttgactcaccattaatgtagaggctacagcatctctcccttctagggctgattctcttccctctccggtgagaggttgggctatgtgggccaaaaccgactgcagctcatggcccagtaaaatgcaccgcgatggcccaaatacttagctgagttgctcgcttcttctgaattctgatagtatgtgactcagtaaacacacgctccaatatgcacacttcagctccaagcctccagctctgcgattaattcaattaatcatgcatccatgagcctggctgaatttgtattccagtaggcatgtgactccagtcaaatttgataaacaacacatcttggatgaatagaggcagcatcttagaaaatctggatccttgtgattctgcttagcatgtggtcacatgcttgctgacttggtaatgctaaaag

SEQ ID NO: 101343 - DNA, 399 bp, Oryza sativa
  Clone ID: PAT_MRT4530_98973C.1
atgcttaaaaacgcaccttcggaccctgttccattggccggcggtcaaaaacgcaccctagctggcactatcttcggggcggcctctggactagcacttgcggacatttttactctagaccacgggacagctgtctgctgccttgtggcaggccccgtcatggccgtaatgggttgtaacgcacgaaaaaatgttgggcacgctgatgagcaaactcaagacctttgggatagactagggatgcaactatcactctcaccactatcactagaccacttgaccaattggtacgacatgattgggatggcccaagtatttaacataagaatatgccggtttgaccgtcgggctacccggtcggaccacccggacacctccagactaaccatcaccgacaga

SEQ ID NO: 101344 - DNA, 335 bp, Oryza sativa
  unsure (1)..(335): unsure at all n locations
  Clone ID: PAT_MRT4530_98974C.1
agaagtactcgagcaangaaggagagagcttggtgagctgcagagntggcccnntccannatggagtcgtcggtcaccaccntcgctccnttncanggtctcaagtccaccgccggnatanccgtcgtccgtcgatacggcaacttcagnttnggnaacgtcancaatngnggnaggataaggngcatgcaggtntnnncgnttgngggcatcaagaagttcgagaccctatgctacctgccaccgctnaccgtggnggncctcctnaagcagatcgagtacctactccgttccaagtgggtgccctgnctcgagttcagcaaggtcgtgattcg

SEQ ID NO: 101345 - DNA, 198 bp, Oryza sativa
  Clone ID: PAT_MRT4530_98975C.1
atgggtggagctcaatgggccaggcagggcaccccctcagcccaaactgaggaaccccctccaagtctttggcccaaaactacagcccaacaggtagcccaacagataggaggatacgagaatggtctgcctggctgcctcctacctgcccagtgcccactgtcgtgcccgtgcgccctgcctgccaccctgccctga

SEQ ID NO: 101346 - DNA, 814 bp, Oryza sativa
  Clone ID: PAT_MRT4530_98976C.1
aactagtggatccccgggctgcaggccccccttttttttttttttttttttttttttctaaaaaagggtcaagcaaagaaatgcaacgaccttgaacttattattcttacaagagtccaataaaatattttgtataaatggtattgggctcacattggtcccgttacatttgaatgaaaataatagtataaagtaatattgcacaatcgtatttatttttttccgaaactatttacgaagtatctgaaacaaagtcttggattatggtgcgaaccactattggaatcctcaccgagtgtgtgacaccatctagccatgtcaagcttccaaacgtgtagccagactgtactctctgccttgctgtgaatgtcaccttgaatgttgcatttctactaccacctttggtgaatgtgataattgaaggttcaacagatatcctcacaccagctggagcctcaatcgatgccttataagttccttcttcccctccgacgttggttacagtgcgccaaaccgtaacagagtccttaaggtctggtacgacgatggacggaaggttgagctgatagagctgacccacataggactcacagtcatccttagggccaagagtgagggtgcagttgaaaaacttagtgtattctttcgggtcaatgtcatagacaagcccagggtcaatggacttgtctgggtcgatctggccaccaccaaagtcgaaggggtcggcgatcttcctaggtgctccctcagcttggattggcatgcccgcacgcgtggtcgtacgcgtgggcgcacgcgtgggcgtacgcgtggg

SEQ ID NO: 101347 - DNA, 1929 bp, Oryza sativa
  Clone ID: PAT_MRT4530_98977C.1
gcgatggatccgctcaggagctacctcgggaggctcctcctcgaggagatcaccccggtggtgatggtgctcaccaccccgctcgccgaggccgcctgccgcaagagcggcctcagcgtcgtcgacatgctctcgccgttctccctcttcaaaaaaatcgacgtgcccgtgcggacggcgagtgaccagccttacaggctgcagatgtttaagattcggatggtctacgcttccgacgtccggaagcaggactacgaggtggcggatcagaggatcaagccagtagtttctgaggccaatgagagtgctcttccagatctgctttcagacccaccacagctagaagatgtacttagcaagcctgaagctgaactgtgccctttgtggattaagaaattcaacagagctctgatgcgtacactctcattttcagagcatgaaacattcgaccaccctgtggcatgtctgttagttgtatcatcaaaggacaatgaaccaatcagcaagtttgttgatctcttcaacacaaatcagttaccttctcttttaaatgaaggcataatggatccccagattcttaagcactatcttatacttcatgatcaacaagatggaccacaagagatagctatgaacattttagcggaaatgaagagcactcttggtttgaatgattgtaaattgttgtgtattaattcttctacagaagcagatggtgcagatgctgagaattcatggttaccttatgtaagtacagagaactacttcagattaaattgcatacttactagataagccgttttttttcagataaaggacttcatgcaagatttggcttctaatcatataattccctacatggagcaaaagatccgtgtcctcaatcagcaggtagccacaacaaggaagggctttaggaatcaaataaagaacttgtggtggagaaaaagagatgatgttccagaagctgcaaatggcccaatgcaagtggttacttacatcttgcccttttccctatataaaaattctgtacttgctttgtccaattatagattactctcaacagattataagcttgacaaagcttggaagcgctttgctggtgtgcaggaaatgagtggactgtgctatttcatgttggaccagtcaaggaaggatgctgaatattgcctggacagtgcctttagtacatatctgagaattggatcttctgggaagagaaatgctactagatgtggcatttggtgggcagaaatgcttaaaacaagaggacagtatagggaggcatcaagtgtatactaccgcgtttctaatgaggaaccttcattgcattctgctgtactgcttgagcaagccgcttgttgctatgtgttatctaaaccacctatgcttcggaagtatggatttcacctagtgttagctggaaatagttattacatatccgatcaggtgcaacatgctgttcgggcatacagaaatgctctgtttgtttacaaacaacatccttggagttatatcaatgatcatgtacattttaatgttggaaggtggtatggagtccttgggatatttgatgtagccataaagcacttgctggaggtcattgcttgcagccatcagtccctgacaacgcaaagcatgttcctcaatgattttttccattttgttcagagtatggggaagaaatttgatgtctacaagcttcaacttcctgttatcacatgccatcactcagagttatatatgaasatcatcrtacttatgcatcasatgcagattcttagattacgaaatctagtctcttacctttggaggatgcgttgctgggatcgatcagttcttgcccgaccaatttcattaagatttggggggaaaatacagtaaaatgttacaacgacttacaataccgtggttgccagggaaagaccc

SEQ ID NO: 101348 - DNA, 2120 bp, Oryza sativa
  Clone ID: PAT_MRT4530_98978C.1
gtttcctttcttcctctctaccctataccctagttcgacgccgccgtcgcctcggcatagactcccctccccgtctcttcttcgcgagctcgccccgccttctgcgccgagcaccgcctatcttcgccggcgtcctcccgctgcatcagaggtctatctggtggtcgcttgaatcgggaggtttttgttggattggattggattcggagagatggaggatgtggagaacaagctaaaggactatgagattgtgagggaaggcgaggcggagatcatcatcaacaagaaaatagcagcaaatgaagtgttctacaatcccgtgcaggtccacaatagagatatgtcagttgctcttttaaggactttcattgccaagcgtgaggaagaacataaggcaatgatggataagagggacaaggcgcataacaaagtgagccagagtaaatcatctggtccaaatggagagaatgggtcaacaggacagcatgatgaaatggatgttgatgctgaaaaggaaacaaataaagttgcggatgaaacagaagatctgtcaacagaagcaacaaagacaccttcgcggaaagtagccagagagcttaaggcaccagttgttcttgaggctttggctgcttctgggttgagatctatccgttatgctcgtgaaatagacgtgttagaaaaggtggtcgctctggacattgataaagcttgtattgaagcttgcaagcggaatataaagtttaatggtgcttctgctatgagtaagatcgagcctcatttgactgatgctcgagtttatatgctcacacatccgaaagagtttgaggttgatattgacccctatggagcaccttctattttccttgattcggctgtacaggctgttgctgatggtgggctattaatgtgcactgccactgatatggcggttctatgtgggccaaatggtgaagtttgccactccagttaatgttagtgaaagcatttggcaggagctggaggaagaaatgatcccatcatcatctattgttagaactaactggcttgaaaaatctcctgacttgagaaaatacaaggattcctgtgtttgtgttgtgggagaagcagtaaaagtgaggattgagcttaggatcctctacaattcctggtggtgtttctgcatctctctatatgtcagctttcaccagtttggatgcttcagtgctgtcaatagtgtgctgaccacaggtgctggggaagatatagctaacacaaagcctgcgatatcaacatttgaggatgatggaaataatttcacagtttcaaagctggacattgtgttaggaggaagtgaaactaaaagtgtacaacttgaagttactccaaaagttgaaggtattctgaagttacatgggataaggtggacgctctcagatttattagttggctatcaatactttgaatttgacacaaaaaggaaaactaagaaagggaaaaagggacctcgtcgtactttgagcaacaccctgattgtaatcaagggtttacctaaacttacggggtgtattgatcacttgccaacaaatgcgtttgctggagatttacggctactcaagctgaatctgaggaaccagtcagaatatgctgtgaaggtttgctcaaatgagcataacttttggagcaaatttaatggtactacacaatttgaaccaactaccacaaaccacactttcaaagaaggctttcagaaaactacacgttcttcagaaccacaaaactactttttttatgaatttacactagtcagacttctgactgagaccattagtaaggtatacgtggtaatctgtgtgccatatggaccacacacacgttcatggtccatggatgaccttctggttaatgtggcaaagaatattaagatgaagcttagccatccaagatttgtaattcctggtgatttatcagaagttgatttcgagtttccccaatgcttaagaaagcatgtacaatcagaaattagtactgtatcgacaaaacgtactcagggagatgccaagggtttgctctttacattttctcaagtaattggcatcaccgtgtggcctgcacattattcaaaacatgaggaccaagtctag

SEQ ID NO: 101349 - DNA, 492 bp, Oryza sativa
  Clone ID: PAT_MRT4530_98979C.1
tcacgcagtcactgttgttgcgctctcagctgctccccgttgcttgctcccgtcgagtcgtcgacgacactcctgccaacgcctcctagggtcggctccccaccgcttgccaccattgatgaccccgccgctcgccgctgttgtgttgacgccccaactgccgcctgcttgctccccactgctcgccaccgtcaacgatgaccccgccgctcgctgctgttcacacttgacacccgtgccaccgtccgcagtcgagctttgtgccacagcctccagatttacattatcagtggcttgacgagcccaatggcaacgcgggagctcgatgagggtcccggctacatgagacctcgacgaggcccggtacattagtctcaataattcatcaagccatggacttgttgtgctggtaaggaggtggtggatgtggccatgttcatgacattggagggcggtgagctcgaagaggaaggattgtcgtgtgttaggcat

SEQ ID NO: 101350 - DNA, 3912 bp, Oryza sativa
  Clone ID: PAT_MRT4530_9897C.1
atggcgctgagaaagaccttgcagctcgacagcatagacattgagaaaaacccagcaggcttgcaaggatccttctcgggctcggatgtcatcgatgttccgatctccgcttcggcgggagaatccttcgacatggagtcgccccaggttgtagccattgcgttctcgtttccggccattggcggaccagctgtgatcggcactgtgaaccttaagcaccaagtccccctacttggcgcaccactgtcgacgggggatacccgtagaccggatatagagggtattgggattacaaagggaatagtggaactcgacgataccgacgagatcgtagtcgagttgattcgactagatccttgcggtacacgtgtcgaacctcgatcccatcgaaccttttttccagtttcctgacttctgcgagatacgtagataactcggggctagagcacttgtaatctttatgcacctggttcgtgactagttcggaatcccctttcacgactagtcgcttgactccgagtgcagctgcagctcttatcccggtgagtagtccttcgtattcggctgtgttattggtcgccctgaagttgaggtgaattgcatgcttgaattgatctcccgaaggtgacgtcaagatgaatcatgtccctgctccttggctgttgagtgcgccgtcgaacaccattgtccacgtttcgttgttgatttggttgtctgacctattatcaggcatagtccaatcggctacgaagtcggcgagtacctgggacttgatggttgttcgtggcacaaagtggacatcaaactggcttagctcgactacccattttgcaatgcggccgacaacgtctttgtttctcacgacttcaccgagagggaaggaggatacaactgtgaccttgtgggcttggaagtagtggcgtagctttcttgatgtcatgattaccgcgtagagcagttttcggatctgtgtatatcttgtctttgcgtcgtggagagcttcgctgacgtagtagactggtcgttgcaccttctctctctcgacaacaatgacagtgctaacggaatatggcgtggcggcgatatagagaaataattcttcattaggttggggggcaacaagtacaggtggatttgataggtagcgcttgagtgcaatgaatgcctcttcggcttcctgtgtccatacaaatttgtcttgcttcttcagcagagcgaagaaaggttgtcctcactctctcacctagcgatgaacttgcttagtgccgccatgcatccggttagcttctgtacttcctttagtcttgtaggcgacttcatgttttcgattgccttgatcttttcgggatttgcttctattcctctgccagagacgaggaaaccgagcagcttgcccaatggtactccgaacgtgcacttctctggattgagcatgaggcgatatcgtcggaggttgccgaacgtttcccgcagatcgtcaatcaatgagtcgcttgtcttggtcttgacaacaatgtcatcgacataggcctcaacattgttttccgagttggtcgctaagtgcaccttggaccgtgcgctggaaagtgtttccccgaacggcgtgattaaagctgtcttctcctcgtcctctttcgccatgctgatttggtggtagccggagtaagcgtcgagaaagctcaacaactcacaaccggctgttgagtcaaccagttggtctattcgaggaagagggaagtgatccttgggacacgccttgttgaggtcggtgaaatcgacgcacattctccatttcccgttggccttccacaccatgactgggttggctagccactctggatggagtacctcttttcttgggtggctcagctgtggcaggtgggctgggcgtgtgctcgaccatgtcgaggctccgcttgtcgcattgcactgccagcttagtattcccttgaatagtgattgttcccttcggtcccgcatcttgagtacttgatacgcgtagtgagatgcggccatgaacttcgcgagtgcagttctcccaatgatggcattatatgctgtatcgaattcagcgacatcaaaggtgatctgttccattcggaagttgtttgcttggccgaaagtcacaagcaacgtaattttgcccaatggtttggacgatgactgaggggtgattccatggaagggttgatcggtgggtgttaactcgcttcgtgggatccccatcgcgtccaaggtgctggcgaagagaaggttgattgagttcatcttgggtgcagccccctgccacatcgaacagacttcacgttccaccttcttgtattctcgctttgaggagtatgccgtggaacctccgaagatgtgcgagacatggagatcagagtctgggtatgctgagtccgattcctgaatagccgcctcagcgtccttctcgaccacacatactcgcttgcctttttgtaatgctatgtgttttgcgagcgactttttgaagacgaggcaatcttctagagagtgcctgtctgacttgtgtatagggcaccatgttttcttcgtgtcgctgcattgtgggtctgggcgcttgggagggtccgcgtattctgttgcgagaacatccgcttgagttttgcttttcccactcttgcgatttttcttcttgctcgactccggtgcatccttgactggtttcttctctcctccagtcttcggtttgtcgttcttgcgtctcagtgcgtcgtccgcatgagcgcatcgattgacaatttcgaataatctccgagtagtcgtgatgcacctcgttgccaactcctgggtagtatagcaatctctgacaccagacttgaaggtgcggattacagaagagtcggtgatctcggggattgtattcctgcactcattaaagcgccgaacataatccctcaaggattcatctgggttctgtgtcaacgcctgtaggtcgtcatcgatcgcgtggcacttatacgttccttggaagttggcgacgaactgctgccacaggtctgcccatgaagaaatcgagtagggggcgagatgtatcagccatgaacgcgcagagcctttcaatgtggttggcaagtaattcgccaatgcgttgttgtccactccagcagcgtagaatactgtggagtaaacctgaaggaattcttctgggtcggtactcccatcgtatttctctattgctcctggtcggaatcgctctgtccatcgtgcgagatcgtcattcagaacgggatcgtagggggtttccctctgtattgcgttgacggctctgatgtgctgggccggtgtagtcacttgattctccgcttccgcattggcgcgcgctgacgtgccgacatcgtcgatagccaataccttgtgcgacgtactcattgtcgatgaaccatagtcttcgagcaggtgcaagactgatggttcgtggggatcgatgtcgattaccccaacaaatcgatctgaaatcagcgtcgctccttgttccttgtcctcatccctgagggggacgcgtgactgctggaccttaggaggtggcgtcttcatggcgctgagaaagaccttgcagctcgagaggtcgtgattcttggaattcatcctcgtcggctcgtgattcttgtcggagagacaaggcttggctgcactaggatccttctcgggctcggatgtcgtcgacgctccgatctcctcttcggcgggaggatccttcgacatggaatcgccctgggttgtagccactgcgttctcgttttcggccattgacagatcggctgagatcggcaccgtggtgtaaaccgggaagacgatttcgtcgacttgagtccacaccaacattgttgaagcagaaactccttggttgaggttagtgttgacgttgttgtcggcgaagctggatgtcat

SEQ ID NO: 101351 - DNA, 4713 bp, Oryza sativa
  Clone ID: PAT_MRT4530_98980C.1
atggatccgctcaggagctacctcgggaggctcctcctcgaggagatcaccccggtggtgatggtgctcaccaccccgctcgccgaggccgcctgccgcaagagcggcctcagcgtcgtcgacatgctctcgccgttctccctcttcaaaaaaatcgacggtgattcacctccccgatgctctccgcttccgataattgtgtgtatgacgcttgtcgcatttcattcgattgggttctgtgacctcatggggaatcccctgtatgcagtgcccgtgcggacggcgagtgaccagccttacaggctgcagatgtttaagattcggatggtctacgcttccgacgtccggaagcaggactacgaggtggcggatcagaggatcaagccagtagtttctgaggccaatgagagtgctcttccagatcagcttgaagttactccaaaggttgaaggtattctgaagttacatgggataaggtggacgctctcagatttattagttggctatcaatactttgaatttgacacaaaatggaaaactaataaaacaaaaaaccaccctgtggcatgtctgttagttgtatcatcaaaggacaatgaaccaatcagcaagtttgttgatctcttcaacacaaatcagttaccttctcttttaaatgaaggcataatggatccccagattcttaagcactatcttatacttcatgatcaacaagatggaccacaagagatagctatgaacattttagcggaaatgaagagcactcttggtttgaatgattgtaaattgttgtgtattaattcttctacagaagcagatggtgcagatgctgagaattcatggttaccttatataaaggacttcatgcaagatttggcttctaatcatataattccctacatggagcaaaagatccgtgtcctcaatcagcaggtagccacaacaaggaagggctttaggaatcaaataaagaacttgtggtggagaaaaagagatgatgttccagaagctgcaaatggcccaatgcaagtgtttgctgtaacacttttttttttcttcaacaggtatacgttcacctccatagagtcacagattagagttctaggtgactatgctttcatgttacgggactatgagcttgctttgtccaattatagattactctcaacagattataagcttgacaaagcttggaagcgctttgctggtgtgcaggaaatgagtggactgtgctatttcatgttggaccagtcaaggaaggatgctgaatattgcctggacagtgcctttagtacatatctgagaattggatcttctgggaagagaaatgctactagatgtggcatttggtgggcagaaatgcttaaaacaagaggacagtatagggaggcatcaagtgtatactaccgcgtttctaatgaggaaccttcattgcattctgctgtactgcttgagcaagccgcttgttgctatgtgttatctaaaccacctatgcttcggaagtatggatttcacctagtgttagctggaaatagttattacatatccgatcagaagcaacatgctgttcgggcatacagaaatgctctgtttgtttacaaacaacatccttggagttatatcaatgatcatgtacattttaatgttggaaggtggtatggagtccttgggatatttgatgtagccataaagcacttgctggaggtcattgcttgcagccatcagtccctgacaacgcaaagcatgttcctcaatgattttttccattttgttcagagtatggggaagaaatttgatgtctacaagcttcaacttcctgttatcaacatgccatcactcagagttatatatgaagatcatcgtacttatgcatcagatgcagatgttaatgttagtgaaagcatttggcaggagctggaggaagaaatgatcccatcatcatctattgttagaactaactggcttgaaaaatctcctgacttgagaaaatacaaggattcctgtgtttgtgttgtgggagaagcagtaaaagtgaggattgagcttaggaatcctctacaaattcctgttgttgtttcttgcatctctctaatatgtcagctttccaccagtttggatgcttcaagtgctgtcaatagtgtgctgaccacaggtgctggggaagatatagctaacacaaagcctgcgatatcaacatttgaggatgatggaaataatttcacagtttcaaagctggacattgtgttaggaggaagtgaaactaaaagtgtacaacttgaagttactccaaaagttgaaggtattctgaagttacatgggataaggtggacgctctcagatttattagttggctatcaatactttgaatttgacacaaaaaggaaaactaagaaagggaaaaagggacctcgtcgtactttgagcaacaccctgattgtaatcaagggtttacctaaacttacggggtgtattgatcacttgccaacaaatgcgtttgctggagatttacggctactcaagctgaatctgaggaaccagtcagaatatgctgtgaaggtttgctcaaatgagcataacttttggagcaaatttaatggtactacacaatttgaaccaactaccacaaaccacactttcaaagaaggctttcagaaaactacacgttcttcagaaccacaaaactactttttttatgaatttacactagtcagacttctgactgagaccattagtaaggtatacgtggtaatctgtgtgccatatggaccacacacacgttcatggtccatggatgaccttctggttaatgtggcaaagaatattaagatgaagcttagccatccaagatttgtaattcctggtgatttatcagaagttgatttcgagtttccccaatgcttaagaaagcatgtacaatcagaaattagtactgtatcgacaaaacgtactcagggagatgccaagggtttgctctttacattttctcaagatattaaaattcaagaaggagccacgttctcctggcctatttggttccatgctgcaactcctgggaacttttctctttatatatctctgtattatgaaatggagagcccaagtgagataacttatagaacattgcgcatgcactacaatattgaggtttttccatcacttaatgtgtcctttgctataagaatgtgctcatcaagattgaaagagtatattgtgcgcatggacatcctgaacaggactccctcagagtcatttattcttcatcagttgtcatgcaatgacagtaaatgggcaatttcatcgttgcctttgtgcgattctatccgctctattgaaacagtatcagcaaatcagtctgtgtcgtgcttcttcaagataaaggatttaggtacaaattcttgtaaagaagctgaaaacagttcttgtagaagtgatatgctttttttatctcgtgagggcaacagcaatactgaggagtttgatgtttcccaatctcctattaccaatttccactatcaagagagataccaacagggaaggttggctaagggaccacgggaccttcttgattttattctgatctcgaaagcagtaggtggtaactattccaagtcagatccagacgttcaactactctctcatcatgtgtgccattgcagtgctatcgaccagagtcctatatggtggtttatggaagggcctagaacagttactcatgatttctcaaagtcttactgtgaagcaaacatccagttggtaattcataatactgtgcaacataatatttcagcgagagtagttacctatgacagcgtgccagataaaagccaaactgtcaatttgcaagattctaatagtaatcagggtggatggtatgatgtatcgctggaaaatgacattaaagctatctctactgccaaggggacacattatcagaaacagccatcagagagcatttcaccttttgtttggtgttcattgagttctgctcaagttgacctgaaacctgacacttccactaaagttcctctaaaagtgtgcatatttatgcctggaacatacaatctttcgaattatcagctacaatggaaagtgcattcatccgaggtaggacaggtggatgaaaatcaaagatccggtggtggccaagggcatcctttttatgtcactgttcttcaggatgcttgatgaactgcaaggaaggatggtgtgagacagtgagacaaccttctcatgaagaaactcgttccttggatgctgggtaaagatatacaatctgaccaacccaaaccagtggagtggtgactggtgaagatgtgtacctgtaagttcacggttgagtatagaatgaatatacatggattccagtttcaatactagcacagttatacaagttcttttcaagggtaattctggcgattagatgtataccattgtcggtgaaattttggtgctaggaaggatgcagacaacaaaagctttggtttgccgattgttgctgtagcctataggttcttacattgttcttgtaaatccttgtcaactttgagacaactcgcagatgcagtatctgtccatagttttcagtcatattgtacttttgaggaaattagatacttgagacgctccacgggcggcagttttgcctggctaattgtgatgttcatcatatagtgttgctttgaatcccagatcatacgaagttattttatttcc

SEQ ID NO: 101352 - DNA, 1028 bp, Oryza sativa
  Clone ID: PAT_MRT4530_98981C.1
ttttttttttttttttgaatatatccaatgtttttattccttttcacagttcttttattattgcatctgtttgtttctttttcagtgtttctttgagatttcaaccaatcccgccttacaatacaaacatggcacaaccacttgtaatcggtgtatcttttcactggaagtatattatttgaacagtttccaccctatggcagcctgaagcaacaatgttgccattggggctatccaaaaatggggttaggcttagggccgctagaccctggatgataatggtacctcttgcttcggcgcttgctctttggaacaccccagccctccagcttagcaatgggacatccacaccggttgcggaagagcagtacagcccggccgtttggtggagccatccgccgtagctccgcgcggaggcactcgtaatccgggttgttcccaccctgcccgcccttccacggcagcgcctcgatctcgcgccacatggcggcgtcggcgccgccactggtgctccccgtgcctgcgcgcacggcctcctcggtctggagctggacatcgaactcgagcgccttcacgaggccccggcaccgcgggttgcggcagcggcggcgagggaggcggctgcaggagaggaaggtcgccccggcgagcgccgccgcggcgccgaggtagggcatcgcggccgccgcggaggcgagcgccgcggcggccgggggcgaggcgagcagcggggtcagcgagcgcgagacgtgcgcgagcgaggaggcgagcaggaacgcgaccgagaagagcacgagcagcaggatgaggagatcgagcgtcgccgacgacggcgtgtgcctgcacgccgacgacgacgacgacgacggcggcggcgggtagaccgacggcacgtggtgcccgccgcccgccgaccgggaggacgacgacgggtggggcatcgccgacgcggcggcgaagggggcggcggcgacggcgacggcggcggcggcggcggtgcggttggaggaggggaatggccggagcat

SEQ ID NO: 101353 - DNA, 376 bp, Oryza sativa
  unsure (1)..(376): unsure at all n locations
  Clone ID: PAT_MRT4530_98982C.1
cggacntgtngnagncacacaaaccacaacctgcactatccttgcacgcncgatggatttgagtcaaacaaccaagtttacccggttcgcatgcatgaaatttcttcgatttcacttgttacttacagtttgtaatcagtttgatgcattatggtactagctggtgatttgtaagcaaggatgtgattttgcatggacaattgcttgcaggtgtcgaaggcggagttcatcgatctggcgaggaagtcgggcaagttcgacgaggatagcctggcgttccagtcgcggctgctggccaagtctggcatcggcgacgagtcctacatgccgcgctgcgtgttcgagccgggcaccaacttgcgccaccatgaaggaa

SEQ ID NO: 101354 - DNA, 543 bp, Oryza sativa
  Clone ID: PAT_MRT4530_98983C.1
atgctttgctgcctcgctgcgctgggacagcagaacgacgacctcgctaagccaaaccgccggttccctccgaatcaagtgctagcaggccagttcaagcgatacgccgatacgctgtctcttgaacgacgacctcaccatcttccatcgcgccatcgccagcaacgaagggacaagagaacggtgggggtcgatggcagcgtgaggaatgaggatgtaaggggagaaagggagctggcgcgacctaggaaggaggaaggcggtcgcgatgggctagcgtttcccaaggggatgggaacagagagagagagagaggagaagggcggcggcgggctagggtttgctcaggctccttgcgaagctgcgatcaggatatcaatcggatggccaagccagacgattaaagagagcgctccaaattcaccagccttccagcgcgggcggaccgacatgtggacccacatgaaagtatggcccagcgaacagagaaagaacggatccaaagaccttttaccaataaaggagctcgagcaccagccgctg

SEQ ID NO: 101355 - DNA, 385 bp, Oryza sativa
  Clone ID: PAT_MRT4530_98984C.1
ttcgtttccgccagcgccgaggtcgcctacgcccggcggagagaccgggtcgtgcccgcgcgacacgctgaagctgcacgtgtgcaccaacgtgctcgggctcctgaaggacaagatcaggggcggtggctgccgacgagccctgctgcttggtgatcgacggcactaggggacctcgacaccgtcgcctggctgtggaccgtcatcaaggccaacgtgcttgggctcaagcttaacatccccagcgatctaaggcttattctcaacaactggggcaagatctgaccatccgactgccagtgaagcttaatgcacatggggacactgaagagcgatcgaacgactgatcgacagacagtgaggtacacggtgtctacatgttttt

SEQ ID NO: 101356 - DNA, 242 bp, Oryza sativa
  Clone ID: PAT_MRT4530_98985C.1
gtaagatccagacacttcatgttagtatgtatgcttgaatatttgaatgtacatttggtggtttcagatccaattgtgctaccaaaatttcacatggaaatctaaagtattagaaatgtagtatgtaatctccagaactcactactcatccctaaaaatatggaaacaacaaaacttagagaagctattgagaacacctagcaaaaaaaaatacaaacaaaacaaaaaccgcgtgcattggc

SEQ ID NO: 101357 - DNA, 455 bp, Oryza sativa
  Clone ID: PAT_MRT4530_98986C.1
atggggggcattaaaggctggaacaaccgattgttcccattcatcaaaaacatgttaaggcacgagaatgacagaagggctgccacataacatgaaaaggacctacgaacaggataagaagccaaaatgctcgagcaatcccaacaacggggacaaaagaaccccaaatgaacaactacaaaccttttcagaggccagcctagggccgaaactgtagaggacagtaaccgggacccagggtgtcaacacccaagtatgacaaaaagaccttgatgaattcaagatggagcgtgtcgcggacaataagaaacatgccaaccatgagtaccacaagagttgcttacgaggtgggcctttgtacgacaagacggtgtatgttctgtccaccacgggccgcctcgagaaggatcaacgccatcgttccaccgtttaatgctggcaatggttcaaggttc

SEQ ID NO: 101358 - DNA, 421 bp, Oryza sativa
  Clone ID: PAT_MRT4530_98987C.1
gcacgaggcttcaatgccacgctgatagaaattaaaaaaactaaattttaaaaacgataaccatcgataaaaatattattattatattagttttacggaaacggtatcggtacggtcggaaaatttccataccgttttcacccccagccaagtcccaacaacgttccgaggtcacagcgctcgtccgggcgtccatcgctgccaatttcaggcccgttgttttggcgcccgaatccccctcccgcatttttccccttcagaaaaccccgcgcgcgcggccttctcgattcctgcccgtccgatccgccctcacagactcaccgcctcatctccgccgtcaattgggcctaaacccaccgaccacccgcgggcctcgtcttcctcctcgccgggccccctttcacaacggagccgggcgctg

SEQ ID NO: 101359 - DNA, 298 bp, Oryza sativa
  Clone ID: PAT_MRT4530_98988C.1
cttaattttactacccccgcaaagccaaccagggctggtttttttcataaatcctattgcttcataaaacttactctatatctctatcccccctatccaacaaactccccctccccttcaacataccatcttcctcccactcccccacctcattaactaactccatattcctcaacaacgataccctctctatcaaaaactctcccccacacctcaacccctccttacaatccttctttaacccctacataagaaaaaagctcctacttcactaaatccctaacaaataccaaatatt

SEQ ID NO: 101360 - DNA, 1002 bp, Oryza sativa
  Clone ID: PAT_MRT4530_98989C.1
atggggtcttgcttgcaagggtgcaaaccttttctttttggtggtgtggctgaattgaataatatggctgcaaatcttgcagatgccggagtgctcgacaggctggggcaactgggagttcagcacttcgtcaggcagggcaactggccggtgggggaggcggatatccggcggccgacgacggggcggtggcggcggcgatgggcgacgaggcggcggcggacctcaacgcgacatcgagtagtgggaggcgggagtccggcggccggcaacgaggtggcggcggacctcaacacgacgtcgagcagcgggaggcgggaggcggccgcggccgacgacgacctcgccgcggtgcgcgacctgtgcgccgacgccgagcagccgtcgctcccggacccctcctccctcgagcggaggccccgaccccatcttccccgaccgccaccggagcagctcaaacttccctgccgacgcaagcgccacggcgagcacgttgtactgccgggtggtccgccgtgcgcgctgcgacaggaggaggcagtccacgtcgaccgcgaggtgctcgatgacgacggtctaagtgcgggcattcgggagcgcgccttcgcggaccatcgcgaggaaggcctccacggcggggcgatgcggcttggctggaacggaagcgaaggcgtcgagggcggaggcgtggtcacccgaggcggcaaggaggcggaggcgcgcgagaggcggcgggggtaaggggaatgaggcgaggtgggaacggaggtcggggccgtgacctcgccggcgcggaggacctgttcacccgcgccatcgacgaggaccatggcgagggttcatggtggcgggatctggcgcctgcgccatcggcggcgccggtggcggcggcatgggggaggccctcttgctcccgcttcgtcgccgcggcagcctcgtcgcccgtcgccgccgccgccgcctcgtcgccggccgctggactcccgtctcccccacctgccg

SEQ ID NO: 101361 - DNA, 417 bp, Oryza sativa
  Clone ID: PAT_MRT4530_9898C.1
atttgcaaccaactcaatttcagtctctttctagttgctccgcctctgcaatccatcccagcagcacgcccatccattgggtcccatccacacaggttgattaggcgcattcaccagtgcccaggtgcgttcagtataccagcatcacatcatcatcaccaccatcgtcgtccatgcacacacaaacaacagcacagttgcatctgcatggtttcacattcacatttgtcacttgtgtcatgcctccattgtcacacatcacttggcagtcagctcagtcagcattcagcatgccatcacatcgtcaatccagcatccagtgcaatatgtcagcagagcaggcctgtccgcagtgtcagcagtgtttgcagtgcaggttcatcttgcctgtgttggcagcagtgcatgtctgcaggc

SEQ ID NO: 101362 - DNA, 289 bp, Oryza sativa
  Clone ID: PAT_MRT4530_98990C.1
cctgaaatctttcctgagattaattatgtgtggttcgatcgagaaagaaacccgttgaattataagctcattagctcatctatgtcgattggatcttgttgctgctctgatcatatttgttgctcccagtacaagaacacggcggatgcggcagtggacgcggtgcgcgagatccttcggcaatgcgcggaattcaagacggtgaagcgcgttatccacaccggctcgatatccaccgccttgccgttgatcgacgtccccggcgccggctttggctcctccgggtaca

SEQ ID NO: 101363 - DNA, 1380 bp, Oryza sativa
  Clone ID: PAT_MRT4530_98991C.1
atggccttgaagcttctctggctgcatgccgacggacactgccagtgccacctctctctgctgctgcgcctcgtcgcttgcctcgcccttgtgctgctgctgccgccgccgccgcctgcccaagcggcgacggtggtcacccacctgccggggggggggggtcctctacccttctacctggagaccgggtacgtgggcgtggaggaggagaccgggacggagctcttctactacttcgtggagtcggagcggagccctcgcagcgacgtcgtgctgctgtggctgtcgggagggccccggtgctcggtcttcagcggcttcgtgtacgagataggccctggaatggttggcgcggaaccttacagcggcggcacggttccgcggttggagtataatccgtattcctggacgaagtggctggatgatcatccaaagtacctttccaatccgttctatattggaggggattcatacgccggaaaggtggttcctcttatcacgcagtatctctctgaagtgagttacgttgacaaattgatatataatcacttagatgacaaaatagaaattatatatgtatctagcttgttaactcttgttgcttttattcagggttatctagtcggcaatcctagtgcaggagataagattgatgtgaactctagggttccatactctcattcatttggagtgatatctgaccaattgtatgaggctgccctggcaaattgtaaaggggattatgaaaacccaacgaacaaaccatgcactgacgtaatgcagaccattaacaatctcatgtcagaagtattggaaccagcatgtccctttgactggccatggccaatgccaggaagagatgcttccaataggaagtctctaaccgaggagcactattggttaggtgacccacctgttgaacctcctttcagttgttttgctgcataccgatactacctgtcttacttctgggcaaacgacaatgccaccagagctgctctcgggataaaggagggaacggtgacggaatggataaggtgccctacgggtcttccttacacacgtgatcttccaagcagcatagaatgccatttcaacgtcaccaccaggggttaccgtgctcttgtgtacagcggagaccacgaccctattgtgccattctcaggcacgcaggcatggataagatcattaaacttttccattgttgatgattggagagcatggcaccttgatggccaggctgcaggattcacaatcaagtatgctaacaacctgacctttgcgacaataaagaagtcccgtcagccgtcggcggctctgcaagtatactcttatgcaccccgcccgctgcttctcctttttattgtcattgagatttaa

SEQ ID NO: 101364 - DNA, 427 bp, Oryza sativa
  Clone ID: PAT_MRT4530_98992C.1
gcagatccgcagctaagaaggagagagctagctgagctgcatagatggccccgctcacgatggcacttacggccaccaccgtatctcccttccaggggctcaagtccaccgccggcctgcccgtggcccgactatccagcaactgcagcttcttgaacgtaacgacatgacgtcaggatcacgtgcatgcaggaacacccgattgaggacataaagatgatgctgaccctcttctaccagccaccgctctcgtggaggacctctagaccagataaagtacatgctccgctccaggtgactgccatgccataaacacaaaaaggtcggatacatgtaccgtgaaaaccacatatccactgcttactacgttagctggtacaggaccatgatgtagctgaccatgtgccggtgcactgactcgcaccca

SEQ ID NO: 101365 - DNA, 540 bp, Oryza sativa
  Clone ID: PAT_MRT4530_98993C.1
gcacgaggagacgttcaacgtgccggcgatgtacgtgaacatccaggcggtgctgtcgctgtacgccgcgggtcgtaccacgggttgcgtgcttgactcgggtgacggtgtgtcgcacacggtgccgatctacgagggctacgcgctcccgcacgcgatcgtgcgtctggacctggcgggccgcgacctgacggactacatgatgaagatcctgacggagcgtggttactcgttcacgacgacggccgagcgcgaaatcgtgcgtgacatcaaggagaagctcacgtacgtcgcgctcgacttcgaccaggagctcaagacggccgccgagtcgtcgggccttgagaagtcgtacgagctgccggacggcaacgtcattgtcatcggcaacgagcgtttccgtaccccggaggtgctcttcaacccgtcgatgatcggcaaggaagccaacggcatccacgactgcacgttccagaccatcatgaagtgtgacgtcgatatccgtaaggacctctactgcaacatcgtgctctcgggcgg

SEQ ID NO: 101366 - DNA, 633 bp, Oryza sativa
  Clone ID: PAT_MRT4530_98994C.1
atgtcggcctcccctcccaccagcgccgccgccgttgctgctcgtcttcgcggtcatggcggcgtccggtgcaccgtcgccgtgacgcggttcgtcgttggctcgaccaagccctgccttggttcgtcgttggtgcacgtcgcggtgttctccgacggctgtgacgagagcggcccaacggagcttgggcggccaccgtggcccatacttcgagcggttggaggagctgaaccctctcgacgcggcggagaagcgaacccatctgttgacgtgggtgccccggctggcgcgacgttcttgacgcagacgtgcgccgtggacgtggtgtacacgcacgcacgcttgggggaaaatagaggcgagggcgatgccaccgccgccgcgagacgtccagtcgccgagcaaatggccgtgtccgcgaggtggctgtcgcggaggtcgaggccgaccatgcggagcgggagaaagaagcgccacccgcggcggtgtcagcgaggtggccaccgtaccccgcgccgtgaggtgtggccgcgacggcgctatcgttgccaatccgcatccgcctcggttgctgttagacagcgtgggaaaaagagaggaataaagaaagaaaggagagagataaaattgtga

SEQ ID NO: 101367 - DNA, 2108 bp, Oryza sativa
  Clone ID: PAT_MRT4530_98995C.1
cttccgaattctgaaattccgtcctatataacatatttaagctgagcagataaattatttttatgatacacaggaccagcagcagaactgattatttcgatcaagtctacaccagggctacatattacatgacaatcaacctttttgcctcgagttcgtataattaagcccctcgtataattaaaccaaacgaaaaactacaaaaatctggaaatgttcatacacagatggaagctacagaaagatcggcgctatgaacctttttgcctcgagttcgtcagaggctcctcacttaactacagttgccgatttcgtctgggaagtgagcaggaatcaaggacctccaagaggggcttggctagcccagatgatgttcctctctaggctgcgacgggctcatttacggaatgaggaacacctgcattaaccttggcagctttgaagagctcatccagaacctcagacaaagttgggtgtgcatgaacagcaaacttgatgtcttgtacacgagttccgagggcaatggcgtttgatgcctcgtggatgaggtcagcagcatgcaaacctaatatgtgaactccaagaatttctccagtgtcaggccggtaaatcatcttagcaagtccatctccttcattctcagccagagccttcgtgtttgccttgaagctggtcttaacaacacttatctcaaatccttccttatcagccttttctctcgcttgtggctctgttagcccaaccatactaatctccggatgagtgaaacaggcagccgggatgcttagatgatttaggatgttgtctttcccagagattcgctcaacaactgagattccttgtgcactggcagcatgagccagcatgagtttgccattggcatctccaatacaatacaaatttggaaccgcattgccatctgcgtccataacttgcatccgctcatcaacaggaacaaaaccgcgttgtgtaacaacgttgacattttccaagccaagccctttggtgaacggtgcccttccggtagctatgagagctgcatccacctcaagtgtttccttgtgttcctttgtctttgcatcaattaactcaatcaacacaggttttccatcctttgctggagtaatcttgcttgcaaaaacaccagtgtgatagtctatattccgaggattgataagaatcctttgggccaattttgcaatctcaggatcaaaaccaggcatcaactgatcaagtgcttcaacaaaagtaacctcacttcccagagccgtgtatacatcactgaattccagtccaatgtaaccgcttcccacgatagcaatccagtcaggaactgactcaagttttagtgcatgatcactagtaaatacggttttaccatctatttcgatgccattggggacaaaaggaacagaccccgttgcaataatgatatttctggcagtgatttcattgtcaggaaaaccaacttttccatatctcactttttgttttcccacaatggtgccaaaaccagtcaatatatccacacccaaagctttcatcgaattagtcaagttgctacgaattttagaggccagattatttgcatgatctgcaacagcctgcctatcatatccagctgttgaaacctgtagacccaacgatttcatgtggtgttcatcttgaagttccctcatccgaccgctgacagcaagaagtgccttcgacggaacacaacctctgttcacacaagtcccacctacaacatccccctcaattatggcagttttcagacccttctcgacggcgtggagagctgcgccgtgcccgccgacgcccgccccaatgatcacgaggtcgtagtcgaacccgccgctcccggccgcaccattcccagtagccgccgccgccttccgcggcgtggcggccgctcgcggcggggcccgcagcgagcggagcccgagggcctcgcggcggaggccgcagaagcggagctccgccggccggatcgcgcctggccgggcgccgccgaccgccgcggcggcggtggcggcggcggagagcgagatagccgtggagtacatggcggcgaggtgagcgcgtggggggcgaccctcgtgccagaa

SEQ ID NO: 101368 - DNA, 537 bp, Oryza sativa
  Clone ID: PAT_MRT4530_98996C.1
atggtcggcctcgacctccgcgacagccacctcgcggacacggccatttgctcggcgactggacgtctcgcggcggcggtggcatcgccctcgcctctattttcccccaagcgtgcgtgcgtgtacaccacgtccacggcgcacgtctgcgtcaagaacgtcgcgccagccggggcacccacgtcaacagatgggttcgcttctccgccgcgtcgagagggttcagctgaagaaaaaaacatcctccccctgcacgttttcagtgacccagataactcctctgctcatattgagtttcttcatctgggttatgtctgcctgaacacagttgctaccactgctcatccagtgccaccgacccgacctcctccaaccgctcgaagtatgggccacggtggccgcccaagctccgttgggccgctctcgtcacagccgtcggagaacaccgcgacgtgcaccaacgacgaaccaaggcagggcttggtcgagccaacgacgaaccgcgtcacggcgacggtgcaccggacgccgccatga

SEQ ID NO: 101369 - DNA, 774 bp, Oryza sativa
  Clone ID: PAT_MRT4530_98997C.1
atgagagcacgcctccaaaccctggccccggccctgcgccgcgccgcctccgcctccgccacgggccccgcctccgcctccgccgcgggccccgcctccctcgccagcgccgcgccgctctccacggcggccgccgccgccttcccacctcctcagtctaaaaccgcttcacgtatgggtttgttctctatgcccggcggcgacacacgccaaccttcatatggagaccgtctcatggagtcacagcagctgcctcaagactaccgtgccaatgtgccgcgttctggtgacacgatgggagtaggcaaatggtccaggatagctggtggcgagaatccctcctacttcgggaccccatcacacatctttgacgaacacaagcaatctctggtgaaagggaagagagattttgtctatgtcttgctcaagagaaacaagacctttgtgaccgtgacagacgttcgggggaacagaaagaccggggcatccgctggttgtttggaggacaagaaagggcgctctcgtctctccaaatatgctactgaagcaaccgcagaacatgtcgggcgagccgcgaggaagatgggtttgaaatccgtggtgatgaaagtgaaaggaactgtgttcttcaataagaagaagaaagtgatcctgagcttcagagaaggctttcggggtgaaagagtaagggagcaatctcctgtggtgtttatccacgatgtgacccagcttccacacaacggatgccgcctcccgaaacaacgcctggtttag

SEQ ID NO: 101370 - DNA, 190 bp, Oryza sativa
  unsure (1)..(190): unsure at all n locations
  Clone ID: PAT_MRT4530_98998C.1
cntcgtcntgtcatgggcgnctacacnttcgtgtgccggagctccgacgaggagtggacgaacaagcagctcaagggcgagctcgaggactacgtcntcacccnntacgatntnnagcgtcntntcgtcgacnacncgttcntnnncgactcggacaacgtggtncagtnctnctncgacatggtctccc

SEQ ID NO: 101371 - DNA, 285 bp, Oryza sativa
  Clone ID: PAT_MRT4530_98999C.1
atgcgccgcgtccaccccccgccgctgccgtcgcgcctgcgctgcccatccttcaccctcaacgtgcaccaggcctcctctgcggcgccgtcggctcgggcttggcctaccgtgagggcagaggtcccggcatttgtggagttactcgcaggtggagctccgagccgccacaggcaggttcgctgcggcgaacatcatgtcagagtgcggcgagaaggcgcccaaccttgtctacaggggacggtgcaggaggccagccgcgccgtcgggatgctcctcccctaa

SEQ ID NO: 101372 - DNA, 499 bp, Oryza sativa
  Clone ID: PAT_MRT4530_9899C.1
aactcaaaactatgttgaacagagcccgagagaatgcatgacaatgttgagtacacaatggcaatgtttttttctttctctggatgacttgccacataagaatttttcggcagtacatgcaacagttttgcagcctacaacagtaagaatgactgacatccatcctaaacagtaaacactatcatatcgacctctgaatctggacccaacaacagttctaaccacaggtggcgatttacacaattttgctgctgggacagacattggacctacagtttataaaactttttatgcgctatacctctgcggactggttaccaatccccctatgctgtgtacatgaatatacatgtacctgcacaaaactcagaacagcaataagtagctcgattgagcttactttgccctagaagctcgacacgaaaaacccagctctcgccggccagctccaacaaagaaaaaaaaccctccatagtccttgtgacagaagcatcccaag

SEQ ID NO: 101373 - DNA, 729 bp, Oryza sativa
  Clone ID: PAT_MRT4530_989C.1
ccggccgggattcctctcttcttcctctcctctctctcttttctctaggcatgggacggtggacagcaattggtcggcggcaatggccgactgaccctcccacgcgcgtcgatggtggcgaggggcaacggcggcaagggtggccctccctcagctagatccagcgacatcggccgtcccctgcccggatccatgcgaatctggcaccggtggtaggaggagcataggggcggtgacaggaggagcacgacggcggggcaagcatggcggcggtggacgtgcgacgggcggacgggctccgctatgatctggctacagcagcgagaggagcccggaggtggtaggggtggccctccccccggccaaatccggcggcaacagccatcccctgctcggatccacgcaaatctgatgttggtggcaggtggagcacgggagcggcgacgggaggagcacgatagcgggggaagcatggcagcagtggatgcgcgacaggcggacaggcgccgctaggatccgatggcaacaactggaggagcccggtggcagcgggtggggtgtgtgacggcgagcgttttgcttctttttttcaattccttttttcggatttttatttttcgtgcggatcacatagctcccgcatgcagatcacataagcatctgtacgcgaaaagtgaaaaatcacttttggcagtatgaaaaaatcaaaatcacttttggcagtaggcg

SEQ ID NO: 101374 - DNA, 1419 bp, Oryza sativa
  Clone ID: PAT_MRT4530_98C.1
atggtgctagattctaatgagttgcatcaacatgatgctcctgatgttgatgtgtctattaattgtgatgatagaatttttggccaagagagtgtcaacttggcagcaatccaagaggagctcttggaggaggacagtttaagcgacctcctccttgctggtgcagaggcggtcgaggcaggagattcaatccttgcatcagtagcattctcgaggcttgatgacttcctgtctgggatacctgaaaatggagcagccagttctttcgatcgattggcataccactttgaccaaggtctgcgttcccggatgtccagtgcatccactgggtgttatcagccagagccacttccatctggtaacatgttggtgcaccagatcatacaagagctatcaccatttgttaagtttgcacacttcactaccaatcaggccatcctagatgccatcattggtgacatggatgtccatgtcgtcgacttgaacatcggcgagggcatccagtggtcatcactcatgtcggaccttgctcgctgtggcggtaagtccttcagactaacagctatcacaacatatgctgactgtcacgctagcactcatgacacagttgtacggctgttatcggagtttgccgactctttggaacttccatttcaatacaattccatctgtgttcacaatgaggatgaactgcatgccttcttcgaggactgtaaaggctcagtgattgtctcatgtgatacaacaagtatgtattacaagtcactaagcacattgcagagtttactgcttgtctgtgtcaagaagctacagcctaagctagtggtcaccatagaagaggacctagttagaattggaagaggggtatctccatctagtgcctcctttgtcgagttcttcttcgaggcattgcatcacttcaccacggtgttcgagtcaatggcgagttgcttcattggtagtagttatgaaccatgcctgagacttgtggagatggagttgctggggccaaggatacaggattttgtggtgaagtatgggtcagtgagagttgaggccaatgcttctgaggttttggaagggtttatggcttgtgagttgagtgcttgcaacatagctcaggccaggatgctagttgggctgttcaacagggtgtttggggttgtgttcaagaagataagtttgttaatggtctactatatctccttagggaaaaatgatttgagagagccaaataaggtcatctggtcaagtttggctgctggatgcgggagtcatggaattgttgtacttgccttctatgctgctgacaagctgcttgagttcaagccaaaagggattgaaacttatatccatcctgctgttgaacgtgcacatttccacaaagaagacagaatgtggcaagagtacgaaaactga

SEQ ID NO: 101375 - DNA, 2175 bp, Oryza sativa
  Clone ID: PAT_MRT4530_99000C.1
ttatatgccgaagaagtaatttagtgaaatctctccccggtctccaaccctctctccccctcttcctcttctctcacctttcagcaacaatggcgcagcagtagtggcctggatggcggcggcagcggcggcggcgccggacaacggcgcggtggggtgcctggcgtcggcggtggagggcccgataacgtgaatggcaatgggccaacacccctgacctctgctctgctgcagtttcgatctagttctttttctttttccgcgcatctcgctcctcgccgtctcgctgccgccgccgatgccggtccgcgttttctccgtcccttccattgccgccgttcctctcggccgcgcctctgcttgtggtgccacgttctccagcgccgatgcggcggctgtccaacccccttccactccctcagcacgaccggtaatagaggcataaccataattaaacatccaaaggatatatcttttcccgttgccgttgcactcgtccatgccatgataaattgtatccctgtaggaattcagaaaggaatcaatttcttcctcggatccatctctcttgcaccaggaaaatttccttaacagactagtaccttgcagtttgcctccccaatcaagctttcgcaaagcattgatgatttcgtctttctctgttgatttatcacaaggtagcacaaacatgatgaatgcatacatccacaggaaaaatgcttctctgttccttagagggactagagaagcatgtgtacagataagatactccaaatccatactaataaccttgtccccagtgttcattaagtttaggagatgcatcacgtcttcaggtatatcctccttgtgttgtccaaacactatttccataattattttgccagcatccttgtagtttttagataccaaagagtcgttcttgtcatcaagttcgcttcctcttaattgcactatcccatcttctctgataaaaacatttgattcatcaaaattccgtggacacttcccccttttgtgcaggaaatatagctctttaagtagtgctctgatgacaaatttggcttcctcagtcatgaggcgatataccctttgacgcgttggaccaacaagcataactggtgtatgcttgatatattcgataagtggcttaaattccagatcacgtatgtactccgcataactgacatgatgtgtgtttcgaaacgggaacacgactcctctctttgtgggcaatgaatcaacaccaatgtcattcttgttcgtgtcttgattcgccgatataggcattgatccaacagctgaaggatccatgatcacaccaaactccttgtccatgttggatccaaatagactatcaagttgcaaatcttccaactgtttgttttcccaaagctcttcttgcatccttggcagcaacattgggaaggtaatcaacaggattagttgaatgtcatctggagtgtaccttatcctttcctcaccgtatttgtccgtgccatgaacaattgcattcctgtaggacttcagaaagtcagtgatttcctttttgtagcacatatctttctcccgcctgaacaattttttgaggagattatcccctttcagtttcttgtgccaataagatttgtatggcatatcccctgctggtttgtcacaaggtagcataaacatgatgtgtctatacatccacaggaaaaatgtttccctgttccttagagggacaagagaagcatgtgtacagatgagatactccaactccatactaatagccttattaggattgttcatcaagtttaggagatgcttcacatctttaggtatatcatccttgtgttgttgcaacactatttccacaattattttgtgagcatcctggtagttttcaaataccttggagtcgctcttgtcatcaagattacattctcttatttctgctatcccatcttctctgataaagacatttgattcatcaaaatgctgtgggcactttcccattttgtggaggaaatacagctctatgagaagtgctctactgacaagcttggctttttcagtcatgatgttgtccataattggttcagcctccttatattgggtgagtggtttgaattcctcatcgtgcatgtacttctcgtaactgatttgatgcattttgtatctgtctatctccat

SEQ ID NO: 101376 - DNA, 191 bp, Oryza sativa
  Clone ID: PAT_MRT4530_99001C.1
cggcacgaggcagtgtgacgcgcgtgacgccccctccctctctcggccggcgccccacccccgccgtgcggtgtccttttattccaaccctcaccgccccacgattcacgccaccaccactccgtccgtcgtctcgtctcgtcgcctacctagggtttcgtgtttgggagctctgcgacgaggggcgaggg

SEQ ID NO: 101377 - DNA, 688 bp, Oryza sativa
  Clone ID: PAT_MRT4530_99002C.1
gcatgtgctcaagaccactggaagattcttttcttcttcctctgtcagtgcaggcctatgaagaattcctattgatggaagaagagctcagtcttttgcatttgtagccaggacaaggagatagctggagctttatttggaattcgggtacatacaattctaagagattttacaagctcaattttatgccccttcagcccccaagaccctatatttggctatggaagtcaaagtgtgttatgaaaattaaggtgtttgcttggcttcttttcagtgacatgctaaataccacggatatgcttgacagaaggcattgtgcaaaggagaatgctgatttaacttgtgtcctgtgtaatgggggtcaaagagaaaccgggcttcatctcttcttcacccgccctttcagtgttagatgttggcgacatctgggtatcacttggaatcagcacatggagttctttcaaatgattgttctatcaaggttgaactttgccagaatgggtttcttggaaattttttttattgcctcttggcacatctggaaacagagaaataggtttatctttcagaatgttgtgccctctttttcagtcatggagaagcctcttcaagaatgaaattcttctgcatatgtgcagaatgaaggagcctttagagcaattagttttttgattggttacaaccttta

SEQ ID NO: 101378 - DNA, 918 bp, Oryza sativa
  Clone ID: PAT_MRT4530_99004C.1
atggactcctcagcgacccccgtgggcttatctccgccacttcacagtctggtgctctacaatgaaccacactatacaaaagcggtctacgaaacgaacggccgagatctaatctaatccaaacggacggccgagatctaatcgatctaccgcgggtctacggctgacgtggcactgatgtcgatgatgacgtcatcaccggcggctgctcggcatctcgtgctcgccggcgaacgacggcgcggcggcgcaaacggaggacatctacgcgtagagggcgacacggcgaactcaccgagggctcggacgacggcggacggcaacagacggcgacggcggcgaggtcgaagcggcggagacgttcgggtcgaggacgacggcgatgctccggcggtcttcggtgaaaacggatgacgggacgaggacggcaacgacttggcgaacccgacggcggccttcccgagcgacgacgacgaccggagtggcggcggcgcacggctggacttgctgcggcgacggcggcgaaaggctaacgcggaggcggcgctacaagcggcggcaagctaaggcgagggttgcgtccgacggaggaggtctcgggggtccttttataggggctagggggcggcggctaggcccacggcggccggcggcggcgatggaaggtttagggttaggagtgaaaaatgaatccgaatcgagatcaaatccggggttttccaaacgaaattagccgaagtttccaaaagagaaaaggaagaggagatcccgagggccccttgttgtggctccctaggacgtacgtctccaagagccaaccttttgattgcttcgctagggtcctcctcttcacctaacacatgtgagtatggagccgagaactcatgcttgatgccttcttcatcaaggaaactctcg

SEQ ID NO: 101379 - DNA, 648 bp, Oryza sativa
  unsure (1)..(648): unsure at all n locations
  Clone ID: PAT_MRT4530_99005C.1
atggcactcgcggcgggatcggcaaaggctggcgaggagaaaagccgcgtcaaagtcgccaactgcggccactcccgcggcggaatgtctccatggtgctcgacaccagcttcacctctgccgccatccgcgatgttgacttgtaccgcgccgagccctgggacctcctaccgccgcgttagtccatcgtcatgcacgctttggcctgagatcgactgcgacgacattgcttgcacgaggagcttcgggtgcccatcgggaatgaggacgaacagggccacgacgacatgaacaggggcacctttccttcatctcccaaggtgtgacatgtgagagaggagagatagcaatgctgacatgtgggcccaaaggcatttttgaaatttcacgcgatttctctcttctcttcaaccggaaattattattctaattggcgcgatgtccatcggcaaattaccacgtttataagagtgttttcccccaaaagtgagctcgggncggtgtccttgggctaaaaccacacaatagcagtatcctgtagcaaaatttgccatcatctaaaatggacaatacatgttctcagcttaaaagtgaacatatcttatgcatacatgtaagatggtatataatatgatacatactacatat

SEQ ID NO: 101380 - DNA, 1706 bp, Oryza sativa
  Clone ID: PAT_MRT4530_99006C.1
gccggaattcccgggtcgacccacgcgtccgaaagaaatcaagcaagcaagaagagacgagacgagggagagaaggagaagagggggccggccgcgggcgtcgtcgtgttcctccccccctctctctcctctcctctcctctcgatctccatccttccttccatccattcctccccgcacccttcgcattgctctcgtcgtctcgattcggtcgaggatctccaggaaaagaggaggaagcgatatgggttgcttttcatgctgcggagcggatgatgtcggcaagaagaagaagcgcgacgatccttacgtcccgatccctgatccaggtggtaactatggacgtagcaagcccgggcccccagccccttcgcgttctccccccaccagcagaaatctgccaattgcagtaccggcaattccccttgatgaaataaagggaataaccaagaacttcagcagtgatgctctcatcggagaaggctcgtacgccagagttttctttggtgtgctgagagatggcaggagatctgcggtgaagaagctcgactccagcaaacagcctgatcaagaattccttgtgcaggtttcagccgtttcacgactgaagcatgagaatattatccaacttatcggatattgcgctggagggagcatccgtgttcttgcttatgagtatgcaccgaggggctccttgcatgacattctccatggtaaaaagggtgtgaagggagctcagccaggaccagctctatcatggatgcagcgagtgaagattgccttgagtgctgcaaaggggcttgagttcctgcacgagaaggcggagcctcgtgtcgtccaccgtgacatcaaatccagcaacattatgctctttgacaacgatgttgcgaaagtaggagacttcgatgtatccaatcagtccccggacatggcggctcgcctccactccactcgtgttcttggcaccttcggttatcatgctcctgagtacgcgatgacagggcagcttagcacgaagagcgatgtctatagcttcggagtcgtgttgctggagcttttaactggtcgcaaaccggtcgatcatacgctgccccgtggccagcagagtcttgtgacatgggctactccaaggctaagtgaagacaaggtgaagcaatgcgtggatccaaggcttgaaggggattatcctcccaaggctgttgccaagatggctgccgtagctgcgctgtgcgtgcagtacgaggcggacttcaggcccaacatgagcatcgtcgtcaaggctctgaacccactcctcaacagccgcccgaacaatcgccccgcctccttcaccgacgccggcgagcgatccggattatgagcacgccatgaccatttttctcatcggactccggtgacaccacgacgacgggagggaaggctcggtttccatggattccaaatgtgtaaaaattcagtggaaatgaagagggtagctctgctgctgcctgtcttgttcttgcctcgatctccagactcctgttgctgtaaattgtcgcaatccctcctgattatgtgttcctctcgacctcttgtagtagtttgagaaatggatgaatatatatacttcttgcttgtccacttttagcttccactgtcaccagacaagttttgttgttctgcgtacaatgggcagattaataattctcatctcataaaaaaaccaa

SEQ ID NO: 101381 - DNA, 463 bp, Oryza sativa
  Clone ID: PAT_MRT4530_99007C.1
tcggcacgagggcgcccgcggtggaggagattcggaatcggatatgcggcttcttcgccggaagtcttcgatgggcggcggaggtggcggtgggagggggctgaggcgggtggttagcttgccgaggtcgccgatggcgctgtcgctggcgccgagggcgtcgctggccaagaccgagtccatcaagaagagggataagaacaacaacaaggggtccaagagggcccgcctccgcgccgggctctccgccgcgctccacctcggcggcggccaccgccgcgccggcagaagaggcggcggcggggacgaaggagccggagcggtgtcatcagcggcggcgccgggtgttgcagtgctgcttcgcgcggccgctgatgacgccgacgagcggcccgcggcggcggcggcgaacgtggggcacgggggcagagatcacgcgagcggtggccgcggccggagctgg

SEQ ID NO: 101382 - DNA, 368 bp, Oryza sativa
  Clone ID: PAT_MRT4530_99008C.1
gatttatttctgagcaaaatatacaatcgctgtatttcataatcatagaaaatatattaatactaacataggtccacttaatccataagtaacgagataattgttaattgaagtctactctattatatggcccattaattaattatatgaattaattgaagcagattttggcgccttgactgactagaagcgtggctccttcgcatcgaacttttgctcggcgtacacatacatgtactccccgaacacgtactccaggtactgaccgacgacgccggcgccgccctacacggtaggagagatggtcgtctccaaggccgggttgtacatagacgctacggagcgccggttgccgtcgagcatgggga

SEQ ID NO: 101383 - DNA, 286 bp, Oryza sativa
  Clone ID: PAT_MRT4530_99009C.1
atggacaaagctatcgaggaggtgatggcagaggccatgaattccatgaacgtgaaggcgaccgagcaagcggtcgccgaggccggcgcggaggcagaggcgaacactgtagtaggcttggatgccgaggtcttggagacggtggcggaggcaaaggccttggagacaatggcggaggcagaggccttggatacaacagtagagggcgacatggtgaccatcgtctctcgcccgtctggctacccaaaggctacaacttcggaggaagcatcactagagaagcatg

SEQ ID NO: 101384 - DNA, 339 bp, Oryza sativa
  Clone ID: PAT_MRT4530_9900C.1
atgggaaaaaaacaaatccactggtcgcttcaccgctgtcacctggccgccaccctccgccaggccggacgggcgcagcgcacgcgccgcagcccagccgctgccgcggctgcatccgccgctcgccacgcgcgaccgccgcctgcgccgccgcagctgcatccgccgcccgccgccgccgtggcgcttctgccgcccgccgttgcctgcgccgccacaactgcatctgccgcgcgcgaccgcgcctatgtgggggagggatctgccgtggcctcaggggaggggaggagagggaaggggaggaagggggaagaagagaagaaggagatgagaagatga

SEQ ID NO: 101385 - DNA, 832 bp, Oryza sativa
  Clone ID: PAT_MRT4530_99010C.1
gtttataaaagctgcaacagtaagtaacgtgtttttcaggtcgctacatcaacaatactgggttacagaagaatttttaaaacttcctgagatgggtttcggaacatccttattacataaaggcttgagatagagaccatgacagataacattagggcaacattgaagagtcatttgatatttttgagacagcaaggtatagtaggcgtatcagttcacaacacattgtttgagaaaacaattaatcttcctcctcaaaagattgatatgaagtatcttcctcctcaaaagattgatatgggtgatgaaaatagaagtacggttgggcattcaagatctcagcacctccgatcgctttcagatagctgcatagattggtctgagttagcagtgaatccaaaagcaaaacctgttagaaatacatcattcagagttgaaaaagttgaagtagaccggactgtgaaaattgaagctaaaagggctgagctagaatgcaagactaagttgtatgaacatatcaaggaagcagctcatgactctggagccaatgttcttcgacaaatgaaggctattgaaaaagagatttctgaactaacatcccaagaagagatagaagaaaagaaaaggaaagggggttagcgatggtcaaactgctgaagaactcgcgccaagtgaaatctgccagtagacatttattgttgtcttccttttgcttttttttggggttcaggtttgtattgctgtagaagctggcgatgatgtagaatttgtgccagtagaaattggtgctccaggatgcaaacaacaaagttcattggtcgattgacttttt

SEQ ID NO: 101386 - DNA, 2214 bp, Oryza sativa
  Clone ID: PAT_MRT4530_99011C.1
atggccccattcctggcttcccccatacgccttcacccctgtcctctcctcttctcccaccctcacctcttcggatccgactactttgcctttagcgtaaaaggcagaggtgcacatttagaaagtatgcgtgtggaaaataagagagggaatagaagttggggaacagatgctaaaagaacacaccctaactcaatatttaaccagttagtgcgatatggttacatcggaaccggattccctgacatgaactgctccttgacgtggtcactgataggtgggccctcaacactgtctcttccttccttctttccctctgctcatctactgctctcacttgctctcttcttcttcttgtgcattcagagtaaccacaggatgagcaagtctggttgtgagagatgcagaggacggggtttttgggatacggatgatcaggacacgtatttcttcaaggttatgattggtggtttccgacgtcaaatgaccataccatacaagtttgcagaaaatttcagagatcagatccaaggaacaatcaaactgaaggcacgtaatggtaacacttgcagtgtccttgttgacaaatgttcaaataagttagtccttacaaaagggtgggctgaatttgccaactctcatgacattaagatgggtgacttcctggtattcagatacactggcaattctcagtttgaagttaaaatctttgatccaagtggttgtgtgaaagcagcatcacacaatgctgtgaacattggccagcatgcccaaaacatgcaaggagaccctattgaaattttaagctgctctgatgaacatctgcgagcgcaatcgctaacaaccgaaaggcaaaatcaacctgaaaaggatgtcattgacaattgtaacaagaagatgaagacagagcatgcttcttcttcagaagatgatcaggaaacacctactgctgaggtgcacaggatgaaagtagaagagatggtccgagctattcattccaaccacccagtttttgtggctgtcatgaaaaaaagcaacgtcactcgacaaccttgctatgtggcaatctccaggaaatatgccaatgaatattttccaggaggggaccaaatgctaacgcttcaacgacatggcaagaggtggcaagtgaagttttgtatcagcaaacgcaaattgagaatgctttcaaaggggtggagaaaattcacaagagacaacgagctgcagcactgggctcctctggctctgttcatcactctgtttttttcccctcattttcgaaagatgaaaaagtgtggtcagaagatgaggaagctgaacacaagatccacggctagggatgatcaagaaaagtatttcttcaaggtcatgattggtgacttccataagagaatgaccatacctgataaatttgcacgccacttcaaaggggtgatatcaaaaactattaagctagagcctcgcagcggttacactttcgatgttcaagttacaaagaagttgaatatattagttttgggatctggatgggagtcatttgttaatgctcatgacttaaacatgggtgacttcctggtgttcaaatacaatggggactttctgttgcaagtgttaatctttgatcctagcggttgcgagaaatcgacttcatgttctatggaaaatgctattgatcatgttggacaagggtggaaagaacacaatgatatctcaacaagttatcatgatcaaccaaaaggaaataaacattggatgcaaaaggatagctcatctaaagggaataagattggcaataccaggtcatcaaacaccccatctaagttttcaggttgcattctccctcgtggaacctgtcttcctgtggttcaggagaagaagatgaaagaaaagatccaagctatacattccaaaaccccaatgtatgggaatgtcatgacaaaatgcaatgtttctggaagcccttgtgttcttgaaataactcaactatatgatgatgcgtatcttccattcaataatggccaagagctgatgcttcgacaccgagacaagagttggaaagtgcggttttacagattcaagaacaaatctagaaagctcactcaaggttggaaaagatttgtgcacgacaactacctgcggatgggagatctatgtctctttgagatattaaagaataaatacacaatgaatgtccatataattcgcaaatgctaa

SEQ ID NO: 101387 - DNA, 717 bp, Oryza sativa
  Clone ID: PAT_MRT4530_99012C.1
atggaagaagtcttggctgaggaagagattgaagaagctgtcgatgaagcagctgctgagttgagcgaggcacgagaacaaacaccaccagccgatatcccggctcctcaaagaacgcctccaacaccaattgccctagctcggcaaaccaggcaaaagaaatctgctggaaggaaaaagccagcaccagtaccatctccagctccatcgccttctcctccttcacctcctgcccagccagcatctagtgaacatactccatcggctgcaagcagtcacaatgtagaagaagaagtccaagcccctcctactatcactaaagcaaggcaaaggatagctgatcggcgagaaagaaaagacattgaagcaactatccaagccaatcggctgtccgtgaacaaggagaaggcaaggttagatcagctatccattgggccggtgcctattcaatccaatatagatcggctagaatctcgaaggattgaggtcttggctcagcttgaagagtgcaacaccgagttagccttaaagaggcaaaagttagccgatctgcccaaggttgttgaagaacagaagttgaagttgaaggctaccatcagaaatgttgccgatctaaccaagtccttgaagtttgttcctggaaccgacgcccaagatgaagtggagcaaattaggcagagggcaatatcggctattcaaagataccttgccgattga

SEQ ID NO: 101388 - DNA, 2332 bp, Oryza sativa
  Clone ID: PAT_MRT4530_99013C.1
ccccatcaacgccgctcgctcactactcgcgccgccgcttccgccgccgctccgctccagtcgcgtcggcttcccgcctcctcgccggcgagccgtgcctcgacgctctccctctgttgctccgccggccagcagcatgccgcgcttctgctcccactagctcccgccaccgccgcccctactgagcccggtgggaccgggcggcggtggggtgccccgggccggccgtgcgccccccccccccggtccggccgccccttcctcgccccccgcggggcgccgggcctcctcctggcgcgctccgcggccgggcgctcggggtcgccgcctcgggctccggtttagcgggagccatggcgtctgctgctgccgcttacggcgtcggggctcctctcaagctcgccgcaaggcggcatggggccctcgcgctggccggtagccatcgctgcagtggatggaagtcttcagtgtcttgccctgttcctcaggcttggatgggcagttgctcttctgtcgcaatgcgccgtgtcgcctccggttctcgattgattgttcaggcttcaaacagcgggggctcaagcttgaaggcatcgttggctgatgctagcctgcttactgaagagaggataactgttttggtgattggaggtggaggaagggagcacgctctctgttacgccttgaatcgctctccgtcttgtgatgcggtcctatgtgcccctgggaacgcaggtattgctcagtctggagatgcgacctgtatatcggacttagacgtctccgatagcgatgccgttatcgcgttctgctgcaagaggggagtgggaatggttgtagtaggtcctgaagctcctcttgttgccggtcttgtgaatgaccttgtgaaagctgagataccagcatttggtccttcctcagaagctgcggctttagaaggatcgaaggactttatgaagaaattatgcgataagtacaatattcctacagctaagtatcgcacattcacagatcctgcagaagctaaacaatatgtcaaagatcaaggcgcccctattgttgtcaaagctgatggattggcagctggaaaaggcgtggttgttgctatgactttggatgaggcatttgaagccatagactctatgctggttcaagggtcatttggttctgctggttcacgggttatcattgaagaatatctggagggtgaagaagcctctttctttgcattagtggatggtgaaaatgcattgccacttgaatcggcacaagatcacaaaagggttggtgatggtgatgtaggcccaaatactggtggtatgggtgcatattcccctgcaccaatagtgacagaagagcttaagcacacaattatggatagtataataatcccaacagttcaaggtatggcagctgaaggatgcaagtttgttggtgtattatatgctggacttatgattgagaagaaatctggtctgcctaagcttatcgagtacaacgtacgattcggtgacccagaatgccaggttcttatgatgcgattagaatccgatctagcacaggttctgatgtctgcatgcagaggagaacttggcaatgtttcactaacctggtcacctgaaatggcaatggtggttgtgatggcaagcgaaggataccccggatcttataagaaggggactgtaataagaaatctcgagaaggccgagcaggtctcgcccgcggtaaaaatattccatgctggaacagcactggatggggatggaaatcttgtcgctgtcggaggccgggtgctcgggatcacggctaagggcaaagacattgaggaagcacgggcaagagcatatgatgcagtagatgttgttgactggcctgaaggattcttcaggcgcgatattggttggagagcactgaagcacaagcaagtggccaattactgatgcggattttcctgagcacaccacaactatggtgagcatgtaatgttaagagcaataaagagaaaatttgtcacttctgtggttgaggaaaggcaaaaccatagctcaaatttgagtttttttttttgtaccaactgttaaatttgagttgggcttgcattttgaggaacagccagatgaacaatgaccgagttttgacttccacaagtagagagagagcattgttcggtgcttaatatctacttccgttggttagtggtattaagggattccatatgtaagtcgttttagacttgtgcacaagaattaagataacaatctcaatgattttgttacccttcaaaaaaaaaaaaaaaaaaaaaaaaaaaaaaaaaaaaaaaaaaaaaaaaaaaaaa

SEQ ID NO: 101389 - DNA, 168 bp, Oryza sativa
  Clone ID: PAT_MRT4530_99014C.1
ttttatgatgatgttactgtaaaaaccacagtaacaacctataaatttcgcagtaacgtaccgtgttactgcacttctgcgataatattactaccgaatcatagtaacaaggtgaagcaaaggaagggaaagagaatagacctggggaggaggaaaaatatgagataa

SEQ ID NO: 101390 - DNA, 2961 bp, Oryza sativa
  Clone ID: PAT_MRT4530_99015C.1
atggcgctgcttgaagatcggtcagccattcctatatccttaggtgcatacctcaagctgcaccatccgttattactgattgagcattacaccttagtattgccataccttgcctttacctatacctcaaggcactcaatcctttcaatggctgatgctgttctcccagcttttctgcaagtgctttttcagaatgccatggagctgttgaagaagaaactggagtttgcttgtgatattgataatgaggggcaaaaactcatgtccaatatggaaatgattcaagctgttcttagaggaggcgagaagatgaagtttaatgatgagcagagactctggttttctgatctgaaagatgctggctatgatgccatggatgtattggatgaatacctctatgaagttcagcgactattgcctatactgggtgaggcttatattgggaagacaactgttgctcagctaatcatcaatgacaagcgtgtatcaaggcactttgatgtcagaatatgggctcatgtatcacctgatttcaatataaaaaggatatctgcatctatcctagagtctatatatgacaaatctcattatgacaacctggacaccctccaaaaacacatacaaaagcggctacgagggaaaaggttcctgcttgtcctagatgactattggacagagaactggcatgactgggaggaggtcaagcgtccattgctcaaggcttctgctggaagcaaggttatagtgacaacacggagtggggcagtcgcaaaattgcttggtatggatctaacgtatcaattgaaactatcaattgaaacctctatcaaattgaagatggaagttctacagaagtgtaacggtgttcctttcattgcggccagcttaggccatagattacaccagaaggataaaagtaagtgggttgctattctgcaagaggaaatttgtgatgccaatcccaattatttcattcgggcccgtcaactgagctatgcacagttacactcccatctcaagccttgttttgcttactgctcaattattccacgggaattccagtttgaggagtggcttatcaagcattggatggctcagggcttcattcagtctaagcctgatgctgtagccactgggagttcttactttagaactttatttgaacagtcgtttttccagagagaactggttcaccatagtggggaacgacaccgttatagcatgtcccgaatgatgcatgagctcgctttgcacgtctcaactgatgaatgctatatcttggggagtcctggcgaagttccagagaaggtccggcatttaacagtattactcgacgagtttgccagccaaaacatgttcgagacaatttcccaatgtaagcatttacatacacttctagtcactggtggcaacgcaggttatgaactgagtatccccaaaaatttactcaatagtacattaaaaaagcttcgacttctagaattggataacattgagatcaccaagctacctaaatcaattggaaatttgatacacctccgctgtctcatgctccaaggatccaagataagaaagctgcctgaatcaatatgcagcctgtacaatcttcaaactctgtgcctaaggaactgctatgatcttgagaagttgccacgcagaataaagtatcttcacaagctaaggcatatcgatctgcatctggatgatccttcccctgatatccatggattgaaggatatgcctgtggatataggattgttgactgatcttcagacactgtcaaggtttgtcacaagcaagaggaacattcttgacaaccacagcaatattaaggagctagataaattggacaatctctgcggggaactactcatttcaaatctgcatgttgttaaggatgcgcaagaagctgcacaggcacatttggcttccaaacaatttctccaaaagatggagctctcatggaaaggcaacaacaaacaagctgaacaaattttggagcaactgaaaccaccctccggaataaaagagcttaccatttcaggttataccggcatatcgtgtcctatctggcttggttctgaaagctacacgaatctagtcactttgtcactctatcatttcaagagctgcaccgttgttccttccctttggctattacctcttttggaaaatctccacatcaagggatgggatgcattggttaaattttgtggtagcagttctgccaatttccaagctctgaagaagctacatttcgagaggatggacagtttaaagcaatgggatggggatgagagaagtgcattccctgcccttactgagctggttgtcgacaattgccccatgctggagcaaccgtctcacaagcttcgatcactgacaaagataacagtggaaggatcaccaaaatttcctggtcttcagaacttcccatcgctgacgagtgcgaatataatcgcgagcggtgagtttatttggggatcatggcgctccctttcttgtcttacgtccatcacccttcgcaaactgccgatggagcacatcccacctgggttaggacggctccgttttctgcgacaccttgagatcattcgttgtgagcaactggtgtccatgcctgaggattggccaccttgcaatctgactcgcttctccgtgaagcattgccctcagcttcttcagctacccaacggtctccaacgcctgcgagaattggaagacatggaggttgtaggatgtggaaagcttacctgcctcccggagatgagaaaacttacttcactagaaagactggagatttcagaatgtggctcgattcagtccctgccaagtaaaggtttgcccaagaaactgcagttcttgagcgtaaacaaatgcccatggcttagttcgcgttgcatggttctgggaagtactatctcttcactatggattgacggtgaacttattaggtactag

SEQ ID NO: 101391 - DNA, 624 bp, Oryza sativa
  Clone ID: PAT_MRT4530_99016C.1
acactgaaagtaaccttagacattaaatactgctacagtacaacgcatttagcattgtggagtcagaccacaagtccgatgcaaccaaagtacaccttaagcttaaggtgtagcaacaaagctataaaatacaatacttttactgtttttctgtgcacaccaataaaatatacatgtcagttactaaacatagtaacgagtactactagccgttgctgctattccatttgagttgctcatttggtcccctagccgttgtcttcctccagcattcttctgctgccttttcacatggatctagttggtgttgatggtttttcttccatccatgaccaatctgtttttttttctccaccttgtctctaacgcagaactcacggacgatgtaggcgaagttgagggcggtgaccgtctagtaggtgctgatggttgagagcagcttcaagtttgtggcgcagacgagacagagaagcacgcgtcggcagcgtcgcggccggagtagttcgcgcacgcagcgtcatcgatgggtgaggccgcgcacggcaacgtggcaccgaagccacggcacagcgaggtcacagccgaaggaggggaggccgggaggagcagcgacgttggcgcagc

SEQ ID NO: 101392 - DNA, 215 bp, Oryza sativa
  Clone ID: PAT_MRT4530_99017C.1
ggaaagcagggccaactgcccatgcatatataatactaggagaaaacaggaataatttaaaacaggctgggtttatgcatggtttgaggggccgaacatcaaggaagccccatggaaaaaggagaattaatatgggggaggaaatatagggggggggggaaaagccagggccggccctgaaagaagtaagaaagaaatcccacagggaagggcaa

SEQ ID NO: 101393 - DNA, 228 bp, Oryza sativa
  Clone ID: PAT_MRT4530_99018C.1
atggcatctgctgagttggctgtgcgacctggtgccttggcggtgtttgttgaattgtctgtgcagcctggtgtcttgtatgctgtggctgttctctcgtcaacagctgaatcggctgaccaggtgccgatgctgctggagcaggcaaaggagtcaacggtggtaccgtcggctgagctgaagatgcaatgggaggaactggttgtgcaaacggttgagcgccagtga

SEQ ID NO: 101394 - DNA, 425 bp, Oryza sativa
  Clone ID: PAT_MRT4530_99019C.1
ccagatgaccttatttttttttttttaagggaaacacacagggggaggcaaactctcgacacccaggagtacaaaactaaccgcaaaaacaacggaccggcgcccggaaaacaggggggcacaaaaaaaacaacttgcacacgcaaagaaggcaataagacaaactgggaccaggggcaaaaacaaataaagagaccacaacctcccaaaggtcataggggggcaactggcaaggggaaccaacaacagatgtacccccaacacaacactgaaggccctagtttaaagggaaacagaggtttaaccccaccacaccaaaacatcatgaaaacacaatattagcggcaaaaaaaatgacgccaaccggggggaccggttagagaccggacccgtcagaaagaggcttgcgagccaacacaaaagaa

SEQ ID NO: 101395 - DNA, 1101 bp, Oryza sativa
  Clone ID: PAT_MRT4530_9901C.1
atggttcctcctgcctaccgcaacaccaatgcacgtaaacagttgaagcggaagcggtgcaatgccgggacagacgagcacgatggctgtcctctccacgacgaggtcctcctcctcgtcatgtcgctcctcgtcccggacatcgccgacctcgtcagcctcgcgctcggcttcttcttcacgtccaccggcgccggcaccatcacgacgccggatcataataactatatgccgctacgcttcgtgccactgcgcccctcctcctcaccacgccgccgccgccgccgtctgtgcgtgtgcaaccccatcaccggcgaggtcgacgtcctcccgcacctgcgcggcagcgaccgcccgccaaggctctacgcgtgcgcgttgctcaccgtcgacgacctccagtacttcaacctgggcaacgacgaagacgaccactacacgacgtcgccgagctcctaccgggtggttctgatgtacaaccggcgcggcttcacggcggcgcggtggttcgcgtccggcagcggacagtggggggcggaggtgcgtgcggagggcgcgagggccggcaggatgaggcagcacacggcggcggccatggtggtgcaccgcggcatggtggtgtggccacgactgaagctggcgctgctgaggttgcccaaggcgggggtgaggggcgtgtacaggacggagggaagcttgctgggttcgttgccggacgggcggctgtgctgggcggaggtgtcgtgggacaagacgaggatacgcgtcttcttcacccaccaccaccactaccacggcctcgccgacatgatggtgtcgctgctcgaatctccctacagcggccagcgctggcagcgggaacgatcggttgtgatcccgcgctcttcctgccactgccagcgggtgaagctgcggtggttctgcgagaagagcggcctcatcctcttcaccgccgactaccgctgttacaccctcaacctcgaaaccatggaggtggacatggtagcaggatttggtatacaaggggacgtcgacaacatgtgtggcccgggtagcgctcctctcctcacttgctcacatatcttccacatatattactag

SEQ ID NO: 101396 - DNA, 284 bp, Oryza sativa
  Clone ID: PAT_MRT4530_99020C.1
tttttgtttttttttttttttttggttttttttttttttttttaaagctacctccaaatagggggtagcattgggtagcaaaccaaggatataactgaggaccaacattcaggtgcagcttcacatcatcggtgcttatcataactgcaataaccgcgcacatggggccataaactaagaacttattccggagtttcttggctgacactttaagaagaagaagctacccaactggggaaccattcccccggcatggttcggggggccctcctgagccagaaatt

SEQ ID NO: 101397 - DNA, 207 bp, Oryza sativa
  Clone ID: PAT_MRT4530_99021C.1
atggggagatcttcacggtggagaggatctgggcggccgacccatcgcgcctacggccagcgggtcccccccccccccccctccatcgccggccagacagccggcggcttcggcctcgtcgcctccgccgtcgccgcggcacaccacctcgccggcagcgaatccccgcccctggaggccagtccgactaatgggctttgccgttag

SEQ ID NO: 101398 - DNA, 417 bp, Oryza sativa
  Clone ID: PAT_MRT4530_99022C.1
atggcttggtcgtattatctttgtcttctccgatccatcccagggaagatgatgctagggcggcaatggaagcccggctgttcttgctggtcagccatgaggaagctgcagggggcggagaaggaggagatgctccggacgatgcgggagatggaggccaaactcgacgacgagatcgcggccaacctccacgccatcaacgctcacacctcctctcatcaacacggcttcttcaactgtaagctgacagctatgggggtgcccaaggggaagttcagagaggaggtagtaggggaaatcaacattgccgccatgttctgtgtcggcttcttgcttgcctcctcctctactgaacgaatcatggacaagtacatcactcctcaacgccaatcacctgctcaggagaccaagaattaa

SEQ ID NO: 101399 - DNA, 567 bp, Oryza sativa
  unsure (1)..(567): unsure at all n locations
  Clone ID: PAT_MRT4530_99023C.1
aattgtaatacgactcactatagggcgaattgggtaccgggccccccctcgagtttttttttttttttttttatnttcangcaaaggcnaagnaaaacatggaaaattcaagacacggtatcattcactcccaggaacatctgaaaaacagttgcttctaccantacatngnnccnancannttnaaggaanaacncaanaaaacaaaagggaatanantgncttgaactgcttntattcnnctnataatgcccgcctggtgctcgtcncngatgccccnnctcatattacncnactncttcntatnnctgtnccgctanggancaaancanccttgatcgaggggncaatgccacttttgatnaggtatnattgagtctctctggcagcttcatggacattgtcaactttngantatcncncattatctccatacgaacattnttgtcnatganggcccttctnatgtggggattncttcccnataccaatgggaatgcacntttnccacagganttcctntcgctctctgccaatcntggggccggggattgttatttnaangct

SEQ ID NO: 101400 - DNA, 213 bp, Oryza sativa
  unsure (1)..(213): unsure at all n locations
  Clone ID: PAT_MRT4530_99024C.1
gccaccntgcttnncatctgcaacttcnncggtnccgtgcccnacctgaagccnccngttttnctngcccccagcccgcnnantgngtcgngatccttctnccggtatantngcttggtntgcttggnagtttngttntcnnntncagaanttntaggaattgcagcaaactaatcttntaacctcangnantccatatttttnagcaaagaa

SEQ ID NO: 101401 - DNA, 1995 bp, Oryza sativa
  Clone ID: PAT_MRT4530_99025C.1
atggcatctgctcctccagttcaggaagaacccctacagccagggacgaaccacttcaggagcctgcttgctgctgctgtgaggagcatcagttggagttatgcgatcttttggtccatttcaaccagttgcccaggagttttgacttggaatgatgggttctacaacggcgtggtaaagacgaggaagatatccaactcagcagacctcacggctggtcagctcgtcgtgcagagaagcgagcaactgagggagctttactactctctcctgtccggcgagtgcgaccaccgggcgaggaggcccattgccgcgctatcgccggaagatctcgcagacacagaatggtactacgtcgtctgcatgacctactccttccaacccggccaagggctgccaggcaaaagctatgcaagcaatgcatctgtttggctgcgcaatgctcagtctgcagatagcaaaacatttctacgctcgctattagctaagacaatcatctgcatccccttcacgagtggcgtgcttgagctggggaccactgatccgactttcattatagcatatgcctgccacaacatggaacaggttttggaggacccaaagttggtaaaccgaatcgttgcatatttccaggagcttcagtttccgatatgcttagaggtactaatgagcactagcccttctccgaacgaaacggaagatgccgacatcgtgtccgaaggcctcatcactcacaacgccatcgaagaggggcagatggttgtctctgatgagtgcgtgtccaacgccaaccgcgatccaatcaccatggagatcgacgagctctacagcatctacgaggacctggacctggacatggacctggacctggacaccgtgcgctttctcgaggataatggctggcctgtgaaccccagctcttttcaactggtcccggcgtcgtcaacggaggcggtggcggcggcggcggcggctaatgatgtcgacggtgttgcgaattctcaagtgtcgtgcttcatggcttggaagagcgcgaagtcaaacgagatggctgtgccggtcgtcaccggtatagagtcacagaagttgctgaagaaagttgtggactgtggtgcacggatgagcactggtcgtggtagtagagcagcgctaactcaagagagtggcatcaagaaccatgtcatatcagagagaaggcgccgagagaagctcaatgagatgttcctgattctgaagtcaatagtcccctccatccacaaggtggacaaagcatccatccttgaagaaacgattgcctacctcaaagtgttggagaaaagggtgaaagagttggagtccagcagcgagccatcacatcagcgcgcaaccgaaacaggacagcaaaggcgctgtgagatcaccgggaaggagctggtctctgagatcggtgtcagcggcggcggcgatgcagggagagaacaccaccacgtgaatgtcaccgtcacggacaaggtggttctcctggaggtgcagtgccgatggaaggagttggtgatgacacgagtgttcgacgcgatcaagagcctctgtcttgacgttctctccgtgcaggcgtcggcaccggatggtcttcttggactgaagatacaagctaagtttgcttgttctggttcagtggcacctgggatgatcagcgaagctctccagaaagctatcggtggctagacatttttaggttgggttttttttttaaaaaaagtatgcagttaatattttttttctttttactatatacgaaagtggaaggttccaaccctccacgcaatagccaaaaataataaaagcgacatcgtcttctagaaggaggccagagaatgtgtatggatgtaaatggaaaaatcggacagaatcacgaacagaggagatcagaaacacctggaattcagaaaaaatggtgagagttggcgaccaatttgagttgctgtactcctttgtgcccaataaaaaaaaaagaag

SEQ ID NO: 101402 - DNA, 1575 bp, Oryza sativa
  Clone ID: PAT_MRT4530_99026C.1
ttttttttttttacacaaatccagcggttaattccaggggttcataaatatcattaccgacacgagacgtatcaatattacaaatatatatatcctgtgttttacagcaagcaggcatgagaatatcacggatcatgcaccttcaccttttaatcctgcccttggggcacgcacgcatgtgaaatgaaaacggacaaacacaaagccaaaagaaagaagaagaagaaaaaaaatagccaaacgacgagtgccctttgggcaaaaacatgccaaaacaacgaaacgaacgaccaaccaacgcctcaaccaccggcctcacaggcggcagcagcggtagggcagcggcccacacacccccacatgacctttcccaaaatccaaacaagaacacatcacacacgaatcagcagggacacatgcttgcattgccggtcgaagtgaaataatgggcgacacagctgcacacctcaatccaatcgtacacaataattatgatgagggtaatagtagatacgtgttggtgctcgtactacgtggtgcacacaacacatgaaacgctgtgaaactgaagatgcatggctcaaccatcagcactcggggtagaaggtgtgatccctggagtagtcctggcagtagtagtagaccatggcgttgcgctgcgcccacgccatggcggcctcctgctgcgggctgagcgccgcggagccgccgccggacgacgccggcacggggctgcacgccggcggcgcggcggtggcgcagccggcgaccttgaggtcggcgaagcgggagacgaacggctggtagcggtagtcggcgcggtagcggccgccgtcggtggcccagtcggaggcgtcccagatggagccgtacgcccacatctgccggtccgggaacgtcacctccaccttcttctcgtacctcctgatcggcacgtcgtccaccaagaacaagatgtggtcggggttccagaggatggcgtagtggtggaagccggcggtggggtcgaaccagaggtggaagcgcatctcgcggccgacgatgttgccgtcgccggagccgcgtaccgacggtgtagccggcggggagcttaacgcgagcggcgaagtagccatccctgtaagatctccttgacttgaacccgctcccgccggttttgtcgaccccgagtgtgagggagtattggccccgggggtgtagccggtgttgaggccccatcgaggccctgaagtacccgttccaggacaaccgtttcggcacgaacctgctgccttagccccggtccatccacacgctgaccggcgactgggccagagacagcgtctccgtgctcagggccccacacggtgtggcccccttcgtagaagaccctccatctgcaacctcttgcttgaggaagtagcctgggcagtaggctgggctcctgtgagcatatgaatgtagcagcagcacgcggagcagcagcagaatcagaagaggaatgcatgctgatcctgggatgttaccactaccagctcgtgccccatcggcagttgtagtgatgtgaatgaatgtatgggctactaagtttactac

SEQ ID NO: 101403 - DNA, 414 bp, Oryza sativa
  Clone ID: PAT_MRT4530_99027C.1
atgactgaggcagagggaggacaagcgagaatcctgttacgcgccacggggtgctgtggagctgcaataggtggaggcaggaactcgacaatcaggtgtggtttctcgatatactgggagggcatagatctatgcgtggggagggcggccagccaccggatatgtgaggcacacagccgccgctaccggttccttgtgggggttgtccaccacccgccgtccatgcccttcaccgccggatggggccaccgggtgcgggggaggatagaggaggccgccgcgcaccatcgccctcacccgctggtgcccacgcctgccatcgccgtcgtccacgcccgccgctgccgccaatgctcaccgttcaggacagaggagaggggaaaagaggagccgggaaaggaagagattcggtga

SEQ ID NO: 101404 - DNA, 126 bp, Oryza sativa
  Clone ID: PAT_MRT4530_99028C.1
atgagggccttttataacggcgtggagccgactaccctccccagtgtgtggctgtttggtttcgtcaccgggaacgtcagcgccgtcggttcagacttcagactcagacatgcagacgcggagtag

SEQ ID NO: 101405 - DNA, 583 bp, Oryza sativa
  Clone ID: PAT_MRT4530_99029C.1
tcagagggacgtccggcagcgctcgtccatccgttcagcatccaacggagttgagcgcgcacagcacacaggctcggcccacggcaaataaaaaacggcccacatcttcgcgttgacgccacacaagccgctgcggtgcagccggtggtgcgccgcgccgccgccacaagtgagggaggggaggcctatgccgccgccgccacacggccacaacccgtgcttcctgatgaagccccctctgccaccgccctcttccttgaccctgtcccacgcctccgcgtcctccctcgtgccgtcgtgcgggagcctcgctgcgctccggctgcgtggaggtccgattccagatcgcgtatctgacggcatggcagcattcgctccgctgcagttcgtcctttgtcgttcgtcccagaagcgcgtcgcccagtcgttcaacccatgtcgccagggaactccggccgccagaatcgccgctcaatctcctcgagttcctctcgagctggacgagtgccctcgtggccgggttgacgcgcaccacaagttcgcggtgaccattggaggtggtgtatcggttgctaaggcgtag

SEQ ID NO: 101406 - DNA, 639 bp, Oryza sativa
  Clone ID: PAT_MRT4530_9902C.1
actctagaggatcccctcgtaagctcataatctattatgaaccaaataacctagcgattgatggcgattaaaatcaagtgatcaaccaaagagacatttgtttggaccaagggtttcagatatgtcttctttggatcaaaggcatgcacccgttgtggagaaattggacacgttgctagcatgtgcctcaccctctgccctcattgtgaagaagaccatccaccaggggagtgtcccatccgcaaggtcacatgttttctgtgcgagggtacaaaccatgtgcccaaggattgccaacttagtgtgttgttgaccaagaccgcagaaatccaacgaacaaccctacgattgtctcgtcagctagtcagctccaacaacaacatcgatgatatcatccacagcaccaatgctcctcttgctccacctaactctgcaataaatcatggcaataatacctttagcactaaccattctctgcaccgacagcctcagcaaagaattgtcgtcgatggaagaagttgtgtctctccccgacctactccaggccaagcaaagggcaatcaacctccggagggcgataccaagcagaagaccgtcatccgcttcaaccagcaatcagaaggaagcttctcctgtgaa

SEQ ID NO: 101407 - DNA, 1118 bp, Oryza sativa
  Clone ID: PAT_MRT4530_99030C.1
aagtatgcaattaaattcatcttatttatccacagcgatggcaatctcttggtcacaaagcatatgtgatcccagaagtaaaaacgaggcatgaatgacagcaacacatcagccacaaagaaagctcgctgccccgctacttcagtcttcaaccagctgatgatcgatcgatcgaatttggcatctatcgatcacaaggcgcacacgaagtccccgctgttctcgatgtcaatgtcgtcgatatcgtcgatgtcgtcgagatccatgctccccaggcaggcgacctgcccggcgccggcgagcttcatggcgtcgcccggtttccgggcctcctgaatgatcgccatgacctcctccaggctctgcgacggcgtgttcatgtccgccagctgcatgctcctctggtactcgtcggtcatctcgatgggcaggttcttcaggaaccatgggtggttcttgatctctgggatagttatcctctgctcaggatttccaacgaaaatccgggacaggagatgtctgcagtccgctgaaactcgaacgtagtctggaattgaatactgtacactgagtatcctagtgatcgtcttgcggaagttccttgggtcatcagggtcctcaaaaggatacgcaccaacaagcatcacatagagtgttaccccacatgaccaaacatcagctacctttccatcgtattcctttctagagaggacctctggagcaatgtaagccggtgtgccaacagttgatttcggttgagagtgcaggacagaagacttggagtaaccaaaatcacaaatcttaagccgaggtgtgacactgccatccaagagagtattttcgagtttcaaatctctatggcatacttgcatagaatgacaatagctcactccagaaatcagctgttggaagaagaaccttgcctccttgaaccggattatgtttggatgcttcagtgatcggtggttcataatctccctttgaacatgttcatcaatcttgagtcccctctcgatgaacttgacggcgaagaggtggttggtggcgacgtcgcggacgagcttggccaccccgaagttcccggacccgatgtccctcatcacctcgtaccgctccat

SEQ ID NO: 101408 - DNA, 145 bp, Oryza sativa
  Clone ID: PAT_MRT4530_99031C.1
agtcgaacggaagagcaagcgaggattggtgggccaagtggcaacccgcgcgcgcacggccaacgcaccggctgcagccaacgtggcacggaacatgaaaggttacagactagaaatttggaggtgcgcgctcgagccaatgtag

SEQ ID NO: 101409 - DNA, 378 bp, Oryza sativa
  Clone ID: PAT_MRT4530_99032C.1
aataggcgaattttcagcattccggagaatcgattgatgaacatgttcaaagggagattataaaccaccgatcactgaagcatgcagacataatgcgcgttcaaggagttatggaatatgctgctggtggtgagctatttgaaaggatttgcaacgcacggagattcagtgaggatgaggcaaggttcttcttccaacagctgatttctggagtgagctattgtcattctatgcaagtatgccatagagatttgaaactcgaaaatactctcttggatggcagtgtcacacctcggcttaagatttgtgattttggtactccaagtcttctgtcctgcactctcaaccgaaatcaactgttggcacaccggcttacat

SEQ ID NO: 101410 - DNA, 756 bp, Oryza sativa
  Clone ID: PAT_MRT4530_99033C.1
atgtcacctttggcaaaaaaacgcatgatgttggacgccccgtcccctgtacagtaccgtgtacccccgcaaagtcctcacgccgggcgtgatggagatagctcacgtagtcacgtacccgcgccccgggagcagtgggggaaaaaggcgcaaaggccgtcaccgtccgaacgtactacgcctccccgcgcggccgtggtcccccgcgcgcgcgcttgccgccgccgccgcgtgacgcgccgaggccggcccaccgatcgatggctgcctgggccgcgcgcggtggtagcaatagtagtacgttgcccatgcgccgcaggtcgagacgggcattgtattcagcacgtacgtgtacgtccatcccgtctcggccgtgagcccctccttatcttttgcgttgtctccttccacccccatgtggtcaccggcgtacgtgttcctgttacggggcgctacgtggtcgtggacacgggagagaccgaccgcctcggccaggagaggatccagtccgctggaccacgcccaccgctgctccctccctgcacgctgcgcctctctctcattcgcatcgcaacaacactgctcctctgctgccggagtcacaagattcacgcgcgtgtacggggctcaggtcataaatcggggcctccgccccggcccgaccgatcgcaggaaaacgtgccgttacgctcatatgccttgcgtgagaagcctcagcctgcgctgctgcgctaccgggcccggctactgtgtgcc

SEQ ID NO: 101411 - DNA, 1585 bp, Oryza sativa
  Clone ID: PAT_MRT4530_99034C.1
caaatatgtagatcactcagcaagcacatcaaacctccgtgccctcagatccaacaacgacgagttcaaactcgaaacgttgcagagggacagggcccggagggaactccagatcgctttgtggggatcatcgacatcgacccccacaaacccttggttcttcacagcttggaggaccaagagtcttcaacatctcatactccacgcaaagtgaacgttattgaggagcaaggtacaagtactcgagtagccccggatcatacccgtacgcctacccagcacttggacatcatcaattctatattgatagaaggccctttcgatccagacctacaccacgacggcgatcagtgggtgcaacgattacggtccacagtggcaaatctcaataacgctatggaagttgacggcattgtcaatgctaccagcgatcatcccagctgtgatccaggccataatccccgcaatgcacgcgaacctcgtcagcagaccccaccgcctcatggcaatcatgacatacatgatcacttgaacgggcgccagcgggaaccacgagatcaagatgatacccatcgacatcagcgccggtctccgcatcgacgcaacaatgatggcaattgaggaggccgctcagacgagaaccgagatcgtgaggatcgccaaagccaccgcgatgacagtgaacgtggacggcgagctcagggcgacatcggttgaggtcgccacgatcacgatgacgacagacgacaccgagattcgtgctctccagattcccggcgggattgacaacaaggacgccaaccttgggaccgcatgcctaaccctagcgacccctcatcgtcatcgtcatcatcatcttcggctggtgcccctcgacgacaacacggacatcgaccacctctattgcctgggggcggatgaagggtgttcaccccaacactgcgagaagtacggtggcccgagaaattttgaccagtggcgatagaaaagtacgatgggattacagaccccgaggagttcctcgatatctattccacggttctttatgccactggggcatatgataacgtactcgcgaactacttgctagccacgttgaaaggatttgctcattcgtggctaattcatctcccgctccgtcatgggaagacctgtggcaacaattcgtcgccaacttccagggaactacaagcgacacgcgatcgaggacaacctccacgccttaatgcagaatccgggtgaatctttgagggactatattcggtgttttaatgaatgccagaatacgatccctgaaatcgccgacgcttctgttattcgtgcgttcaagtcaggtgtccaagatcgctacaccacccaagagttggcaacaaggcgaattaccttcgcacgcaagctgttcgagatcgtggatagatgcgcccatgcagatgacgccctccgtcagaaagatgggaaaggaaaaacgggcgacgagaagaaaacaaccaacaaggatacaccagagtctagcaagaaaaggaatagaaagagcggaaagtgcaaagcggcaaccgaggtccttgctacagatcaagcagaagat

SEQ ID NO: 101412 - DNA, 515 bp, Oryza sativa
  Clone ID: PAT_MRT4530_99035C.1
tttctttttttttttttttttttttttttttttttttttttttaggagctgccaattcgcatgaacccccaacatgactaaatatacagttcttatcacatccttcagctcttggaaaatctactagtagattatttggaacaacattggttttacatggtacaattggtggccctttaatcaatcgaatacttcatgcattcatgggcaataaaatgaaattgttacacagttataacttacattcaggaacctatcctatctcctcttaaaaactgggcttaccttgcaaacttccacatcaaaaccaaagtccatgagaacaagtttccaggcacgctgttggtcaaacaggtgggcccttggccctttgacccccacaaggttaacttcaccggcttctttttcattaaggaaaccccctaacagcagatcagggattccactggaccaacttctgtaatcgagggctaaaagccggagcaaaaatgccaagcgatggccaccggggcata

SEQ ID NO: 101413 - DNA, 253 bp, Oryza sativa
  Clone ID: PAT_MRT4530_99036C.1
atgctgaccgggcgggagagccttgtccgcctcatcgggcggcgccgccgctcccctctccccgccgccctcgccctcgccgtgcccccctcccgctcccttcaggatgatgcggccgatgcggagagggaagccgcggcgggtggttcttcgtcgggagggggcgacgccgccggcgcggcggggtgggtggcgtgccccgtctgcggcgagtccatccgcggcacggattactgcgtcaacacgcacctcg

SEQ ID NO: 101414 - DNA, 599 bp, Oryza sativa
  Clone ID: PAT_MRT4530_99037C.1
aggaattcggcacgaggtcgatccctccccctctcccatacgtcgtgtcctcctgatcctcctctctgtccgcgcgcacctcctcctctcgagaagctcgccgacaacagcggccaccgtggtcgggagaggcgaggatgtgctcttcgtcgccggcgccagggccagtgaagccgggagggcttcctccttaagcttcttcacctgccggctccgcggtgggacgcagaggcggctgcggccgcagctagaggtggtgggagacagggggcgggaggtggcagaggagctgccgcgagctggtgggtgagggcgcggttgaggcgcgcgcgcagagctcgtcgaggtgccgttgcttgcgcaaggccaccgagagttgctcccccaccagcgctctccatcctcgcaccgtcggcccctttcctcctcgttggggtgccttcctctcccctcccttgcttcctccccgctcctatatcaggccggaggaggggagcgacggcggtggcggccaccacaggcagcggagggggcactcctccctcccagatccggctggagaagggagtggcggtggcgaaagtggcgctctctcccag

SEQ ID NO: 101415 - DNA, 135 bp, Oryza sativa
  Clone ID: PAT_MRT4530_99038C.1
atggcccattggccagcgagtcgagactcgagagcaggttcatggaaggcctctcgttgcatcaggtttgtctatgttcatgatgcatcaggttatgaacatgtctatgttcatgaggcatcatatcaggtttaa

SEQ ID NO: 101416 - DNA, 2821 bp, Oryza sativa
  Clone ID: PAT_MRT4530_99039C.1
atgctgaccgggcgggagagccttgtccgcctcatcgggcggcgccgccgctcccctctccccgccgccctcgccctcgccgtgcccccctcccgctcccttcaggtttggtcaaacctcgcgcggcgcggcgaactcacccacccgcggcatcgccggttccaccgttctcaccgcttctgctccggctccttctgtgttctccaggatgatgcggccgatgcggagagggaagccgcggcgggtggttcttcgtcgggagggggcgacgccgccggcgcggcggggtgggtggcgtgccccgtctgcggcgagtccatccgcggcacggattactgcgtcaacacgcacctcgatatatgccttacaagaggaacaaaacggaagttaactcagagcacccttcttgatttcagtttcagtagaaaagccacagatgattacgctttgaacaatttgaacaccagtgatgaggcagagcatatggggcagaccgatggaaatgtagttagagatggagctctcttttcggtggataatgataaggtccgttcaaagggaactgctaatgcttcatcagctggctgcctgcatggctctcctgacatctcggagacatgtgatacctgtctaccacccaatgtattattaccatatacagaaaatactgcaaacaatggtgtagtcaagaagtgcttgtcccacatgccttcaactgatgcaacttcgagtactattggtttgctttcagtgacagattctagcaattcggtagtagttgacactgtcatagtgggcaggaggttccatgaaaacatagaattgcaagaaggctatgaatgtgaacagatgcttggatacttacctcgagagctggctaaagttttggctcctctactggacagacactacattgaatgcgagggatgtgtggttggcgtgcctgaacaacaacttgatcatgttcccatccagcttaagtgccagaaatatacagatgaaaatgagacatatgatgatctgaagcatccacagttcttatgggaaaatttcatatgtgctgttggaaatggaaatttgctgcaacctagcagttatattgacatgatatcctgcatggatgatctatctaactatgatttgaaggaggttattgacgtgctaagtgttcctgaaatgaaagaaattctaaaagagctccaaaagaataacgtcagctgcacacgccgacatgagcttcttagcacccttctgtatttatatcgtaatggaacctgcacaattctaccaaagcgaattctgaagtggacaggaacatgcataagaacttctgatgtggctgatgaacttctgtggcgtgtccagagactcttttttctaaatggtgatcaagatctctcattctttctgttagtggatcttggtctggaaataagtgatctactacagtatgaagaggttaaattttcatcttacttttgtttccaccccaaaaatataacttgcctcttcgcgattgtatttactatctatactgcattcaggctattcaagtggcacaggtatactgatgcaataagagttctaaagagactactcagtactgttgcttcggatagaaagcgaggatattgggctttgagactatctgttgatttggagcacatgaatcgttccaatgagagcctgtcaatagctgaagcaggggtaattgatccatgggtccgtgctggttcaaagattgcactgcaaaggagagttgtgcgtttaagcaaacctccacggcgctggaaagttcccagttatgccaatgctgttacgacaaatataaaagaggtaaatatagaaggaagaccgttaaattgtgaaacaggtgcaaagaatgtattttacggatacgatggtgagctttgtggggtagaacaattggctttacaatattacgcagatgaaggagggggttggcgaggtacccattcagaaggtggcatttggatgactatctttggccttctaatgtgggatgcaatattttcagacgtaccagatgttttccagactaaatttcagacagcccctctggacctggaaactgatgaattctacagatcaagaaaggaccttatagagtcccagctgaaaaagattcaagatggcattgctgaagagattcttatcagctcctgggagctacaccaggggacatcctgcaggggtgttaactgggaccggcattccttgacagatctacgagctgccgtcgtatgcaccggtggccatcgcttggcatctctgctccggcatctagccctcgattacagaagctggtccagtggaatgcctgatctgctgctatggcgtttccttgatgaaagaggaggcggtgaagctaaacttgtggaggtcaaagggccaagggaccagctgtctgagcaacagcgtgcctggatacttgttctcatggactttggttttgatgtggaagtttgcaagctcgagccccgctctccgcacgtagcctcatggtctcctcatcatctccttgaagaggaaccgatgaaccgccgatcggttgaggggccatccctgttggccgaggctgagctagcccaccgggaacagcagcaggcgcatactggccttcctgaactcccgcgccactactaagaggagataggataggttcctgaatgtaagttataactgtgtaacaatttcattttattgaccatgaatgcatgaagtattcgattgattagagggccaacaaatgtaacatgtaaaaccaatgttgttcaaataatctactagtagattttac

SEQ ID NO: 101417 - DNA, 1617 bp, Oryza sativa
  Clone ID: PAT_MRT4530_9903C.1
atggagagcaatcctaggagggtggcggcggcagagaggggagagacgatcggcaagcccggccaagctccaccgctgcctctagcgcctcatgacgagaggagggagcgggggagaggggaggcggctggcgggagattggggaggggagaggcacaatcacggggatggcgaggcaatgggggacggggggcgcggtggggtgacggggatggcaaggggacaagggatgggcacatgccgggcgggcgtcacgacggtgacccagtgcgatggggacggcaaggcgagcggcttggtgatggggaacagggcgcggggcaggcgggcgggcatcgcaaaccggcggtctccgtgggtgacgatatgctgctcgaggtggagcgacggtgtgacctgggggtcacccatgtcactgactgcttccaccaccatttcatggccaccgtcgctgctgtcccccgcgagcgcggcctgcgacgggcgctgccggcatgctagctgcgaagacgccgtccgtggcggtggcagcggttcagagagatggtggatggagctgtggcaggactggaacgcccacgcgtccgcgcctgccgccctccccctcgcttccgcgcgcgcatctgacgactcctccgcgaaccccgccaggccgggccacgaccgcgccgccctgtcctccgcgactgcgccccgccaagcacgacgcagccaagccaagctggcattggccatgctgtgagcattggccatgccgtgcaggagcactgggccgagccaatccggccacgccaagccgcgggagcgcctcgccaactccggggcgtgggcagcagccaaacaaaaacaagaagaaaaattaaaaagaagcaaacaacatcgctccgagcagctagccctttggtccgcgccagccgcatgctcggccacgccgtcgacagagcttccatcttgctccgttcctccacagagcttccctcgccgcgacgacgcacgcccgttgctccgcgatggccgcatgcccggccatgttctcagcagcacctccaccgcaccctcgtcctccgcagcgctgccctcgccgggacggctgtacctccggccgccgcagccgccctccctctggcagttgaagtaggcggcggcgacgggggagccgaggctgtagcaggcggcgaagtccctggtgttgaagttggagcgccaccccggcgcgtagatggactgccgcactgtctgccggaacacgatgaacaccaaccggtggatccccgctgtcggccgcgggctctcgtacgccaccacctccgtccctttactcgtatcgcctccttctggtacgtcagttaccaaccaatgaaggtattcccttttggaagggttgctggggctaggtgcatcagggtccaccattacgagcgtgtagagcgccctcccatcgcggcctccggtgatctggacggccggctcgccggcgacctgcgacggcctgagctccgacccgctcgtcatctcgcggtggttgtagaacagcctcagcagcgccgacgcgccgaagtggtccaccacgtcgccgacgatgctccccaccaccagcgggtccctcgacatgctcat

SEQ ID NO: 101418 - DNA, 627 bp, Oryza sativa
  Clone ID: PAT_MRT4530_99040C.1
atggagcagttccacgacgggcaccacgtgtggctgcggagccgcgccaacggcctgtacctctgcgccgacgacgacaggagcggcgtctccctgcagcaggaccgcgcgtccgtgcacgcggcgtgggcggtgcacatactccacttcaacggcggcgacgtcctcatgctccacagcgccgcgaacgggcggtacctcgcggcctacagggccgagggatcgtggaacgtcgagcggctcaacctcaaccggctgccgtcgctcaccttcagctggtacgctctggggtcgagatacggggacgacgtcctgctgcgtcacttcaagagcatgttcttcctccgagctcttttcaggagggatcgtatcagcaatagcggcgccgtcggcctttgcgcgatggaccggggcaccacgaccatgcagtgggtggtggaggccatacccccaagagagtccatacctacccttccagatcctttgccgcccagttctttatccggtgtgtaccgcatctggtatgtgcgagcaaatcctgatgggattatctccccaaacgactggaggctgttcttattctacgctgctgatcggttgagataccccaatgttgatgctgcctag

SEQ ID NO: 101419 - DNA, 2601 bp, Oryza sativa
  Clone ID: PAT_MRT4530_99041C.1
atgggatctacatctacatcaagcattgacgatttcgtcttccctctcgggcagacattccgcttcggtagcctcgacttcatcactaatagcttcggcaagatctctcttctcaactcggattcgaaccagtcgggaggagatggcatctcggccccgttcgcaattccccactccaccgccgacctctgggaggcgaagtacgaggtgctcgtcgcatcgtcccgcaccacgggcgggaagccgctcacctgcatcccacaggcggcggctgacttggaggtcggagtcatcctccaaccactcagctcttgctcgacggacgaaattgccagctatcttagctcccctaacatcggatctcaagcgaaaccagaaatcgtcaactacaacaatgacttcgacttcgataacttcgcttgctacaatgactactacgacgactactacggtgacctcaacgatgactacacttcgctgtacttcggcgtctttatgaccaacaatgagacagacgagcagagggcagcacgactggcagacgaagaacggacaaggagcgccactgttgtagatgacaccaacgtgtttctcacacctcagcagaatgcagtcggggcaatcaccctcatcgacaccatcctgcctgaggccccagactacgtgacgccaactctcaacaggatgaaggccatgatcgcggcaacacttccggacgattatagtggcactgttggcaatagagggccccgagtagatcacgagcagcagaagtcttctcatggcctggttgatctcagagaagccttgaatgcaagacggagagcgagacacggacgagggcaccaccactccacggagtgcattgatggcaatgatgaaggagtcactgcattcacacgtgacctgcgtcgagtgaattggccggccagcttcaaaccgactggcatcgagaagtacgatggcaagaccaaccctgagtcctggcttatcgtaaactggctcgctgggttactgcgaggcacaatcggttcccggggcgagcttcgcgaccacttcatcgccaactttgaagggaccttcgaacggccaagcactcacttcgagctctacaatgtgatacagaagcctaatgagcccataagggattacatccggcgcttttcagagaagcgcaacaaaatctctaacatgaccgacggcaatatcatcaccgccttcaccaagggagttcgcaacgagctactcattggcaaattcggacgcaaaccacccaggacggtcaaggaaatgtttgagaaggctaacgagtacgccaaggcggacgacgcagtcttagcttcgaagcagtccggcagtggctggaagcccaagaaggacagtggcaacaacggtgcaagtagcagcaacactcaccacaaggatcgcaagtgtaagcccgaggatctggattcaaggaaggagctcaaccacatcttcggagggccacttgcctacgagtccaagaggaagcagaagctgaccgaccgggagatcaacgcagtccagccagaactcaagagaacccttattgatggcggaagagcgctcaatatcctcttcgccaagactctcgacgaaatgcagatctcgaggatcgagttacggctgaggaatgcaccctttcacggagtcttccttgtgttttcatctacaccactcggccaaatcactatgccggttacctttggcactggggaaaactttcatacagataatgtctgctttgaagtcgccgactttgagacagcttatcatgcaatgcttggacgaccggcgttagccaagttcatggccatcccacattacacctacatgatgatgaagatgccaagaccacgaggagtcatatccctgcgcagcgatgtcaagcaggctatcacctgcgacaaggaaagctgcgagatggcccaatcttgcgagcaagcactcggccgagaagaagtctgtctagctacatctacttcaccagagggagacgtgcccgctaaaaatttgtccaagtcaagagaaaacgacgccaagaccaagaagattccactcgatcctttagatccttccaaaactactgtgataggcgttgagttagatttaatgcgccatttcatcaaggaggtctttcatcccgactggttggctaacccagtcctggttcggaagaaaactaggcaatggcgcatgtgtgttgactacaccgacctcaacaagtcttgtccaaaggaccccttcggcttgcctcgcattgaccaaaggcgtttcacaacccaagtcggctgcaatgtagaagcatatgtcgacgatgtcgtcatcaagaccaagcacaaggataatctcatcgctgatttggaggaaatgtttgccaacatccgagccttcaggatgaagctaaatcccgagaagtgcaccttcgaagtaccgttagggaagttgattggctttatggtgtctcacagaggcatccaagccaacccggagaagatcaatgccatcctcaacatgaaaccgccgagctcccagaaagacgttcaaaagctggctggatgcatggcagcgctcagctga

SEQ ID NO: 101420 - DNA, 2166 bp, Oryza sativa
  Clone ID: PAT_MRT4530_99042C.1
atggaggaccccaccggtgctcggagaaagacgatttccggcggtgattggtggcacacaagcggtggccgagatggcccacgtggcggtgatgctaacggcggcggtggcttggcgcggcagaggccctatcggcgacggcgcgtggccggagatggtggcggcggcgggggagctcgggtgctcggcgcgagggcgatagaaggcgtgggagaggatggcgaaatgggggaaacgagagagggagctcggatgtatgtagttgtgatttgtgaagatgattttgttgtagttgggaaggagtgtaaaaatcagtacttgcctgttagatttcactttggtggtgatttttttaacaatgggagggaaacattttatgttggcggatctgagggaatgtcattcatagaacatgataaggtgtatttgcctgagattattggccatctgaaagatcactgtgatgtgctccctggtatgcttctgcactggttgtttcctagcaaaggacttgtagatgggcttagggttttggttgatgacaaggtttgcgattatatgtcaatctgtgttgtggatagtggagtggttgaaatatatgtggagacagtaatggcagatgaggccaatgagtctggtagtaaggatgatagtgactttgaagatgaattggaggacatgtcccctgtggatgatgaatgtgatggtggccatgatgacagtgatgatgaagtgtttgaaccagtaagagagattcttgtgatagcatctacaccagagaagaagagatatagaaaaaaagaagatgaagaggtcaagcaaatcaggaaggattgcaatgagtttaagaagaagttgaaggatggtgagctaggaaatttggatgatgtcatctatatggggtcagcaagccaggcaaatgaaagggctttggttcagattgatggtgaggatactgctagcccatatgagaacagtagtagtgctgatgatgattcatatgaagaaaatagtgatggacagttagtcacgaagaagtcaaagtaccccatatttaatcccaacaagcccactgttacacttgcccttggaatgaaatttgattgcaagaaagattttaaggaggcagtgataaagcttgcactggaaaatcatagatttattaggtttcccaagtatgaaggttgtaggactagggctaagtgtgactggcaaacctgtccatgggtttgtttgctatcaaagaacagcaggacagatagctggcaaatagccagccttgttgatgagcacaattgcccacctaggaaggataatcacctggtcacatataagaggattgctatgaagtatgaaaagatgatcacagataacccatcttggagtatacaaagcatgcagtccactgtttcaaagcaaatgtttgcaaatgttagtgtctcccaatgcaagagagccaaagcatatgttatgaagaagatatatgagtccacaaggggtgaatactctaaaatatttgactacctattggagttgctaaggagtaaccctgggagcatagttgtagtgaagttagatactgaccaaccagccccagttttcaaaaggatatatatttgcctggcagcttgcaaaaatggattcctagtagggtataggagggttgttggtttagatgggtgctttttcaaaggggcaaccaatggggagctcttatgtgccataggtagagatgccaacaaccaaatgtatcccatagcatgggttgtggtggaaaaagagacaaatgattcatgggattggttctgtgattgttgttcaaggacttgggagttggtgaaggtgatggctgggtgttcatttcaaactagcagaaaggaaccaagttctgaacatagaaattgcgcaagacatatttatgctaattggaagaaaaggttcagcaagaagcagtggcagaagatgttctggtggtgtgccaaagctctcaatatgatgctattcaacctagccaaggcaaagctggcacaagagactgttgaaggagccagggctatagtcagtatagatccaacacactggagcagggcatggtttaggtttggctctgattgtgactccgtagttaataacatatgtgagattttcaacaaatgtatagtttag

SEQ ID NO: 101421 - DNA, 340 bp, Oryza sativa
  Clone ID: PAT_MRT4530_99043C.1
aaatcgtcaactacaacaatgacttcgacttcgataacttcgcttgctacaatgactactacgacgactactacggtgacctcaacgatgactacacttcgctgtacttcggcgtctttatgaccaacaatgagacagacgagcagagggcacacgactggcagacgaagaacggacaagatgacaccaacgtgtttctcacacctcagcagaatgcagtcggggcaatcaccctcatcgacaccatcctgcctgaggccccagactacgtgacgccaactctcaacaggatgaaggccatgatcgcggcaacacttccggacgattatagtggcagtcg

SEQ ID NO: 101422 - DNA, 4393 bp, Oryza sativa
  Clone ID: PAT_MRT4530_99044C.1
tctacatctacatcaagcattgacgatttcgtcttccctctcgggcagacattccgcttcggtagcctcgacttcatcactaatagcttcggcaagatctctcttctcaactcggattcgaaccagtcgggaggagatggcatctcggccccgttcggtctcctgaactcggctgagatctactccaagaacctatccctcgagttggtttcaaaccactcgagagactccgcagaagattcctccatggcatccagcaactataagaaatatccgcctatcactatgcgcctccctgacgatctcgcggccattttcggctcaaggaaatcgtccccctaggtctcgatctaatctgactttgagctagatcagatctagctccagggaggtcggagtcatcctccaaccactcagctcttgctcgacggacgaaattgccagctatcttagctcccctaacatcggatctcaagcgaaaccagaaatcgtcaactacaacaatgacttcgacttcgataacttcgcttgctacaatgactactacgacgactactacggtgacctcaacgatgactacacttcgctgtacttcggcgtctttatgaccaacaatgagacagacgagcagagggcagcacgactggcagacgaagaacggacaaggttagaacaagaacgctaggagcaggagtggcagatattggaacgtgagcgtctggatcaggagcgccgtacaagagaggaagaagaacaaagacggagagaagaaaagggaaggcggagagatttggctcaatgtggacgtcgcactcgacaactcattggtcagactgttgtagatgacaccaacgtgtttctcacacctcagcagaatgcagtcggggcaatcaccctcatcgacaccatcctgcctgaggccccagactacgtgacgccaactctcaacaggatgaaggccatgatcgcggcaacacttccggacgattatagtggcagtcggtaacccaccacctcggcgcatcatcagttaggaagccgagctagttggtctaattctcgcgcttcgcactcaagttgggggcttcgagagcagttggttcactctccagctgttggcaatagagggccccgagtagatcacgagcagcagaagtcttctcatggcctggttgatctcagagaagccttgaatgcaagacggagagcgagacacggacgagggcaccaccactccacggagtgcattgatggcaatgatgaaggagtcactgcattcacacgtgacctgcgtcgagtgaattggccggccagcttcaaaccgactggcatcgagaagtacgatggcaagaccaaccctgagtcctggcttatcgtgtacactctcgcaattcgcgtagcaggaggagacaacaaggcatggcgaactacctgcccgtcgcattggctaactaggccagaaactggctcgctgggttactgcgaggcacaatcggttcccggggcgagcttcgcgaccacttcatcgccaactttgaagggaccttcgaacggccaagcactcacttcgagctctacaatgtgatacagaagcctaatgagcccataagggattacatccggcgcttttcagagaagcgcaacaaaatctctaacatgaccgacggcaatatcatcaccgccttcaccaagggagttcgcaacgagctactcattggcaaattcggacgcaaaccacccaggacggtcaaggaaatgtttgagaaggctaacgagtacgccaaggcggacgacgcagtcttagcttcgaagcagtccggcagtggctggaagcccaagaaggacagtggcaacaacggtgcaagtagcagcaacactcaccacaaggatcgcaagtgtaagcccgaggatctggttgccgccacgtccacttttcagcatcaacgaattcgtgtcaacacctaagacaagatcatgaatgcgccatgttcacttcacccgaactccaagcacgctgccaaagattgtttcgtctacaagcagtttgccaagcagtacgtcgctcaattcaagaagccgacttaaggggaaactgacacgtcaacatagaagaaggacgacaccgagccagctcaaggcactttgcaggattcaaggaaggagctcaaccacatcttcggagggccacttgcctacgagtccaagaggaagcagaagctgaccgaccgggagatcaacgcagtccagccagaagtaccacaattcctacaatggtctgaggttgcaatcgattcgatcgctcggatcatcccaaccgagtggtccacccggggcggtacccccagtactagacccagtagttcgcaacgtgaagctcaagagaacccttattgatggcggaagagcgctcaatatcctcttcgccaagactctcgacgaaatgcagatctcgaggatcgagttacggctgaggaatgcaccctttcacggagtcttccttgtgttttcatctacaccactcggccaaatcactatgccggttacctttggcactggggaaaactttcatacagataatgtctgctttgaagtcgccgactttgagacagcttatcatgcaatgcttggacgaccggcgttagccaagttcatggccatcccacattacacctacatgatgatgaagatgccaagaccacgaggagtcatatccctgcgcagcgatgtcaagcaggctatcacctgcgacaaggaaagctgcgagatggcccaatcttgcgagcaagcactcggccgagaagaagtctgtctagctacatctacttcaccagagggagacgtgcccgctaaaaatttgtccaagtcaagagaaaacgacgccaagaccaagaagattccactcgatcctttagatccttccaaaactactgctaataaagatatatttgcgtgaaaaccatctgatatgcctggtattcctagaaagaagacgcgaaacctattaggcaacgactccgctgatttgcgcaagacagaagagatgtgatcaagaaagagttagccaagctgttaatgcgccatttcatcaaggaggtctttcatcccgactggttggctaacccagtcctggttcggaagaaaactaggcaatggcgcatgtgtgttgactacaccgacctcaacaagtcttgtccaaaggaccccttcggcttgcctcgcattgaccaagttgttgattcgacagccggctgcgagttgctaaactttttgaattgttactcggttaccatcatatcagcccgaagaagtccgactgcttgaagacttcattcatcacgccattcgggtcttattgctactttatcatgccttttgggttggagaatgcatgagctacatatctacgcatgatgcagaggcgtttcacaacccaagtcggctgcaatgtagaagcatatgtcgacgatgtcgtcatcaagaccaagcacaaggataatctcatcgctgatttggaggaaatgtttgccaacatccgagccttcaggatgaagctaaatcccgagaagtgcaccttcgaagtaccgttagggaagttgattggctttatggtgtctcacagaggcatccaagccaacccggagaagatcaatgccatcctcaacatgaaaccgccgagctcccagaaagacgttcaaaagctggctggatgcatggcagcgctcagctgattcgttccaagactaggcgagcagtggatgccttttttgaagctgctcaagaagacagaaaactttcagtggacccctgaagcctagaaagcttttgaagacttcaagaatttcctcacaactccacccgtattggcttcaccacacccacaggaaccgttgttgttatatgtctcagtgacatcccgggtggtgagtatggtgttagtcgtcgagcatgaagaggagggctacgtccaaaaagtataggggccgatttacttcattagcgaggtgatggccgacaccaaaacacgctatccacaggtacatatgttattatatggtgtcttaattactgtcaggaagttggcccattactttcagagtcactcggttacggtggtcacaaccgcggagctactgggcgtatcactaagtgggcattagagttgatggcattagacctaactttcaaagcccacacctcgatcaagtctcgagccttggtggattttgtggccgagtcccagacagatgtacctgcggagaagctggagtactgcactatgcatttcgatgggtctaagagaatttcaggcacaggggaggagttgtgctgatctcccctgcatgcctcctgttggcacgtgctatgctgtttgcatctgaaatcatcttgaacg

SEQ ID NO: 101423 - DNA, 491 bp, Oryza sativa
  Clone ID: PAT_MRT4530_99045C.1
ggagcccttatggtgtctccatttatatcagcagcaaataagatgattaagccaattatattatttgtctctcgtgcatgtatggatattcagtcattttttattttatggcttttatgtttaattctttttttcagatattgttagagttagagtttgtagtactatttacattcaagaatctatcactatcaattccaggaaattaagaggatctggtagacttctaaggcaaagcattaaaaaaatattgacctctttgtattctacgccgctacgcgaaagctatagtatattctgaaagaaatcagaatagtgcaattttagaacataaagtagtagtcatttatgtgtttatttttcaacaacattggtatgatgaccaggaaagttaggagggaatctttgcttgaattgtatgagatgcaatacgttttgctgttattcacttttgtgctatctgaacatgtgttaataccttatcttctatg

SEQ ID NO: 101424 - DNA, 809 bp, Oryza sativa
  Clone ID: PAT_MRT4530_99046C.1
gacagtgctaggacctcatcagtggcctcatagttcacagcattttccccattttatattgatcctcaattgataactctcttctctgttttcttgtattccagtagcagtgatcactggtcagtagacttagctgtatgtcctttctcaaaactatggtcccaactatatgggaacaaagaaacaggctatattcttttgtccctttgtccttagccttgtctaatccaaattaagaagaaaaatgttctttggctcttatagaaaaaaaaacttttcaatgctaaagatgacataggctttctcatggtgcttcttgtggtgatttaacgtagtatttaggagctgatgtacactaggaggagggaaccccaattgcccttaatatacaatttattctgcttcaattctttgtttcatgtttcacatgggcaattctgaaataattttgcatgttagtagctatatttctattacatggactgcatgttctcacacattgtttttcccttgggattgattttttcaggtccaaatcgttttagagaacttagaaaccaagaaaattgttcttgttcatggagaagggtttggtgcttggtgttggtacaagaccatttctctcttggaggaagctggtcttgatcctattgccttagatctcacaggttctggtatagacaatgctgacacaaacagcatagctacattagcagattactccaagcccttaatcgactacctcaataaacttcctgagaatgagaaggttattttggtcggcatagttgtggaggtgcaagtgtgtc

SEQ ID NO: 101425 - DNA, 1602 bp, Oryza sativa
  Clone ID: PAT_MRT4530_99047C.1
ctagtaaaactgatctaaacccgcgataacacgtcgcaaattgccggggagcttccgcatgacaccgaccaagaactccatgaagcagacggtgtgcagcgccgcttcctgccctttccgcttgtgcatctcgttcaggggcgtcacggcggcgagcacatccgccgcgatgtcgcggcaccgctgcttttcctggtcgaactcgccgacgatgctcgccggcgtcacgaccgtcggcttgtaaccccagcagatccggtagtcactcttctccggcgacgcgtcgggcggcgggttcagccgggacacctcgcccgtcgcgtcgtcgtacatgaagatggagctctcgtcgtcggcctggatgacaatgagcagcgcgccgccgcagtcccagacgccggcgacagtcgccggccagcaccagtcgttgcggaacgcgcaccgccgcttccaccggcgttcggtcgtgatgagcagccacacggcgttggtttccctgtcgccgtcgtcgacagtcgccacgcacacgcgcccggacatctccatgagatacgatttgaggtgcgaccgcggcttgccaccggcgacgcgctcgccgggcaaggcgatggaggcgatggtctcgtcgtcgacgtcgaaggcgaggaccgtctccttgtcggcgttgaggaggtacaccgtgccgtccatgtaaagcgagcggcagtggatcatgtcgccgtccagcccggcgagcaccgttcgcggctgctccgccgcgccgccgccgagcgagtaaacaaccaactcgtcagctcgccataggtagtaaggtgcaccgggaacgcgtgctatgccgccattgctgagtcttttgaagttggcgacgctcttgtgcttgcaaagcagtagcttgtaggttcttgtccttgggccgtagccgaagcccgagatgtgatacttcgtgtcattgtccggcgaggaagggacgacggagactttcctctcgccgtcggcgatagccgggttcaggaggaagccgacggagggctccttgtcggcgaggagtacgacgccgttgcacgtgccgacgtacttgtggttgtcgtacttctggccggcgagcgctcgcatcgggttggtaccgcctcgacggccggcagcggcggcggcgccggcgacgtggaagccatggtaactcaacgagcggtgcggcgccgcgtcgtagctcgactgcgaggcgaaggccccggtcgagaagccgcgggcggctcgctggtgcgcccatctctcgagggagtcgacgcggccggcggtgtcgcggtgggcgacgacgtccgcggtggcgacgtaggcgacgtgcgggcgcggcaggggcgcgccgtggcggcagtggaggcggcggaactcctcgccggtgatcaggcggcgatggcgcctcgacagcgccatggacgcgacggcgtcgcgggccggcaggcgggcgaagatgttgcggacgacgtcgtcgcagacgctgccgccctccgacgacgacgacgagtccgcgcgcgccgcggcggtcgtggtctctccatccgcgacggcgacggcggcggcggcggcttctctcttcctcttcat

SEQ ID NO: 101426 - DNA, 391 bp, Oryza sativa
  unsure (1)..(391): unsure at all n locations
  Clone ID: PAT_MRT4530_99048C.1
atctggggtgtccggcggcttgcctcctccacccagcgccagtggccttcgtcctcgggctagcggcgtctcctctcccggttcgacgacgagggccgcgcggggaaccggnntcggatctggccgcgtaggcccagatccggcacctctcctgcagctccgcaggtcctggcgtgaggccagtgcaaaccgacggtggtggagttcgggtggcgccggcaagctccgccggtccggcgtggtggctgagcaggtcgtcaacaatgtgcaggtgaaagccttactcggcttgctgatgctaacaacggtgacgctctcatgcaccgttcaccttcttgaaggcattgctattggagccctcattcaactccacatcaaggggtttctccgg

SEQ ID NO: 101427 - DNA, 711 bp, Oryza sativa
  Clone ID: PAT_MRT4530_99049C.1
atgcagtcatcggccttcgctatcactggcttattggcggttttaagttggggatacggtaggaaggaggaaagcctgccaccttcctcacgctgtgcagattttctggcaatttgctcaactgagagtttcccacctcctcgattacgctcccgcatcgccgtccccgtgcgaccccgcctacgccgtgttctcccgtccatcctccccggcgaccgctctcaatgccgtgccctttcttgctgtcacgccgggccggccaacattctccgcctctacgcctgcgaggactcctccctttgtcgcgtcagttgcaaagacgttgctacctgcggccgcgccgcggctagtgctaagtcagagtgctgctatccactgtccgacagcagcatgtgggctttcacagagttcgaatgtcgggagtttttgagctgggtcaagaactggtcggccgcggcaggagcggcgctaggtgttgtgaggggggtcgaggtagagtgggacgtgccgaagggcagcgagatggtgacttgcgccgatggtgcggtcctcgtcaatgccacggcggtgcgcggtggcatgtggtgtgcatacgacgccggcctcatcggggacggttttgcacggggcactgtctgctcaaaaggcacaccaattctgggcaggaaagtgacgacagggagtgttttttcacctggaaggctgaagtaa

SEQ ID NO: 101428 - DNA, 5379 bp, Oryza sativa
  Clone ID: PAT_MRT4530_9904C.1
atgtcgtattacgtagatcctcgtaccagcgtaccccaataccctctatatccggtctacgggtatcccctgtcgacagtggcgcgccaggtagggggacttggtgctcaaggttctactactatgtcatccaacttcgtcgacaacagcgccaacaccaaccttaaccaaggagttcctacttcaacaatgctggtgtggacacaagtcggcgaaatagtcttcccggtttataccacggtgccaatctcggctggtctatcaatggctggaaacgagaacgcagtggctgcaacccaggacgactccatgtcgaaggatcctcccgccgaagcggagatcggaacgtcgacgacatccgagcccgagaaggatcctagtgcggccaaaccttgtcttttcgacaagaatcacgagccgacgaggatgacttccgaggtgacaaggtcctggtgtcctatccacaaaactaaaaaacataccttgcaagcctgctgggtttttctcaacatccacgctgaaattcgtgactgcaaagagcgtggaattcagcgtacttctccaactcgtgatgtctattgtcctattcacaagacaaagaatcacgacctctcaagctgcaaggcctttctcagcgccatgaaaacgtcacctcctaaggtccagcagtcacacatccccctcagggatgaggacaaggaacaaggagcgacgccgatttcagatcgatttgttggggtaatcgacatcgatcctcacgaaccatcagtcttgcacctgctcgaagactatggctcatcgtcaacgagtacgccgtgcgaggtactggctatcgacgagaccggcacgtcagcgtgcgccaatgcggaagcggagaatcaagtgactacaccgacccagcacatcagggccgtcaacgcaatactgagggaaaccccctacgatcccgttctgaacgacgatctcgcacgatggacagaacggttacaggaatcagtgaccaacctcagcaacgcgttcgaagaggccgctgctgcagcgcacccggaacagccaccaactggcgatgcaaatggtgaaaaccctgaacagcgggaatcgcctcatcgagccacccctccacctcgtggcaccggcgatctccgcgatcacccgaatggccgccgagaggcgcgacacacacgagacaatgagaaccgttcccgacatcgcgtctcttcacggcgtcacgataacgaagaacgaggaggccgttcgagcgaagaccgagaccgtgataaccgccacaaccgccacgatcacgacgatcgcgaacggcgggtgccgggcgatactggtctaggacgtcgccataatgacgatgatgatggagatcgacgccgagataacaacgggagacgacgacaggattctcgagaacccggccgacgtcctcgtaatcgtatgccggaaccaagcgacccatcgtcatcgtcgtcatcttcctcatcctcatcatcagatagacatccacgaaggacgtacgatcgccgacaacccaccgcccccaacgctaggtgtagagctttcggtcgttcacttcgagatgtccgatggcctgaaagattccgaccaggagcaatagagaaatacaatgggagtactgacccagaagaattccttcaggtttactccacgcagttcgtcgccaacttccaaggaacttacaagcgccacgcgatcgaagacgacctacatgcgttgacacagaacccggatgaatccttgagggattatgttcggcgctttaatgagtgcaggaatacaatccccgagatcaccgacgcttatgtaatccgcgccttcaagtccggtgtcagagatcgctatactacccaggcattggcaacgaggcgcatcacgactactcggagattattcgaaattgtcgatcgatgcgctcacgtggacgacgcactgagacacaagaacgacaattcgaagaccggaggagagaagaaaccagtcaaagacgcacctgagtcgagcaagaagaaaaatcgcaagagtgggaaaaggaaagctcaagcggatgttctcgcaacagaatacgcggactctcccaagcgcccagacccacaaggcagcgacatgaagaaaacatggtgccctatacacaagtcagacatacactctctagaagattgcctcgtcttcaaaaagtcgctcgcaaaacacatggcattggaaaaaggcaagcgagtacgtgtggtcgagaaggacgctgaggcggctactcaggaatcggactcagcatacccaaactcagatctccatgtctcgcacatcttcggaggttccgcggcatactcaaagcgagaatacaagaaggtggaacgtgaagtctgttcgacgtggcagggggctgcgcccaagatgaagtggtctgagcagaagatagaattctcagaagaggaccaccccaagactgctgtcatcccagggcgatatccgatcgtggtcgaacccacttttcggaatatcaaggtcgcacgagttctgatcgacggcggtagctcaatcaaccttctcttcgctagcaccttggacgcgatggggatcccacaaagcgagttgatacccaccgatcaacccttctatggaatcactcctcagtcatcgtctaaaccattgggcaaaattacgttgcctgtgacttttggccaagcaaataacttccgaacggaacagatcacctttgatgtcgctgaattcgatacagcatacaatgccatcattgggagaactgcactcgcgaagttaatggccgcatctcactacgcgtatcaagtgctcaagatgctgggaccgaagggaacaatcactattcaagggaatgctaagctggtagtgcaatgcgacaagcggagcgtcgacatggtcgagcacacgcccagcccacccgacacagccgagccacccaagaaactgagcaaaacaaacaagacgccgaaaccggacggcgcaatcaagatcgttccactctccagtgccaaccctgacaagaccccgtccgacatgccgggggtacccagggaggtgattgagcacaaactcatggtgcgacccgacgccaagccagtaaagcaaaaactgcggagatttgcaccagatcgaaaacaagccatacgagaagagctcgacaagcttctcaaagctggtttcatcaaagaggtactccatccagagtggctagccaacccagtcatggtgcggaaggccaacgggaaatggagaatgtgtgtcgatttcaccgacctcaacaaggcgtgtcccaagaatcacttccctcttcctcggatagaccaactggtggactcaacagccggttgtgagttgttgagcttcctcaacgcttactccggctaccaccaaatcagcatggcaaaagaggacgaggagaagacaacattcatcacgccgttcggggtattctgctacgttaagatgccgttcggactaataaccgcaggaaacactttccagcgcacggtccagggcgcacttagcgaccaactcggaaacaatgtcgaggcctacgtcgacaacattgttgtcaagaccaagacaagcgactcattaattgacgatctgcgggaaacaggaatagaagcaaatcccgagaagatcaaggcaatcgagaacatgaagtcgcctacaagactcaaggaagtacagaagctaaccggatgcatggcggcactaagcagcactgtcattgttgtcgagagagagaaggtgcaacgaccagtctactatgtcagcgaagctctccacgacgcaaagacaagatatccacagatccaaaaactgctttacgcggtaatcatgacatcaagaaagctacgccactactttcaagcccacagggtcacagttgtatcctccttccctctcggtgaagtagtgagaaacatagacgttgtcggccgcattgcgaaatgggtagtcgagctaagccagtttgatgtccgatttgtgccacgaacaaccatcaagtcccaggtacttgccgacttcgtagccgattggactatgcctgataacaggtcagacaaccaaatcgacaacaaaacgtggacaatagcgttcgacggcgcactcaacagccaaggagcaggggcaagattcatcttgacatcacctctgggagatcaattcaagcatgcaattcacctcaacttcagggcgactaataacacagcagagtacgaaggactaatcgccgggataagtgctgcagctgcactcggagtcaggctactgatcgtgaaaggggattccgaactagtcgcgaaccaggtgcataaagattacaagtgctctagccccgagttatccaagtatctcgcagaagtcaggaagctggaaaaaaggttcgatgggatcgaggtccaacatgtataccgcaaagacaacatcgaaccggatgatctagcacggcgtgcatccagacgagagccacttgaacctggcacctttctggacgtcctgaccaggccatcagtgaaagaggcaagcggcgaaggtagcccggtcgccctcaacatcagctcgggggctacagaggcagagcgcgccgttgccgatatcgggaccacagacgactggcgcaccccactcattaaattcataggcagtgaagagttgcccgaggacgacgcagaagccgagaaaatattccgtaaagcaaaagtctactgtatgatcggcaacgatctatacaagaaggcaccaaacggcagacacctcctcctcaacatacatgaagggatctgtgggtcacatgccgccggtcggacattagtcggaaaagcttttcgacaagggttcttctggccaaccgccctcaaagacgcctatgacatggttcagcagtgtgaagcctgtcaattccacagtaaacacacaaggctaccagcgcaagcactccagactatccctctcacttggccgttctcgtgttgggggctagatatactcgggccattcccacgaggacagggcggctacaggttcctattcgtggcgatcgacaaattcacgaagtggattgaagcgacacccatgagggaaatcaaggccgacaacgccatcaaattcatcaaagggatattctgtaggttcggattgccccaccgtatcataacggacaacagctcccagttcattagtgctgatttccaggattactgcatcaggctgggagtcaagatctgcttcgcctcggtttctcaccctcagagcaatggacaagtcgagagggcaaacggcatagtacacaccgacaacgtccaataaggagacacccttcttcctcgtgtacggctcagaggccat

SEQ ID NO: 101429 - DNA, 765 bp, Oryza sativa
  Clone ID: PAT_MRT4530_99050C.1
atgattatagaggggagcgtcaggatctccgaatccccatgatgttcctgtgacttccatgtcgctcgccctagctgtgccagcctgtgcgcgcgggggctccccggccgcttctcgcttgtgttgccgccgccagcgaggccgccggtgatggtagtgctggcgacggcggcggctccctacctcttcccgtctccttcttcatcctttctcttctctccctccctccttttctccagatctggggtgtccggcggcttgcctcctccacccagcgccagtggccttcgtcctcgggctagcggcgtctcctctcccggttcgacgacgagggccgcgcggggacggtcggatctggccgcgtaggcccagatccggcacctctcctgcagctccgcaggtcctggcgtgaggccagtgcaaaccgacggtggtggagttcgggtggcgccggcaagctccgccggtccggcgtggtggctgagcaggtcgtcaacaatgtgcaggtggttgtgtgcatataacagataccttcgatgtgcaagtggcatttggtggcttccattgcggttactttgtttggatgagactccaaggtgaaagccttactcggcttgctgatgctaacaacggtgacgctctcatgcaccgttcaccttcttgaaggcattgctattggagccctcattcaactccacatcaaggggtttctccgggtgaaaatcctagattcgtaggatcggacaatgtcgccgttcggtcggc

SEQ ID NO: 101430 - DNA, 431 bp, Oryza sativa
  Clone ID: PAT_MRT4530_99051C.1
tgttgatggtcgtatcgatcagtttcgaccgtcaatattactaaaacaggagagaactagtgatgcttgcaatgcataaatatgttagaataataatattccactagtatcaggtctactaactttttgcaaagaacgacaataaagtggaggagaatcgacatcaacaccaacgataaatcaatcggacaatgtcgaggaccagacttatgtatgaatgggctaaaaactcagaattgacacaacgaattgggccaaaattcacaagtctatggagtggagcaatagaggaggccaccagccgaaattgggctggattgggccagccccaggttcggcagaacctggtggttcggttgaactaatcctggcgccgttggatgcaggttttggcgtggacgtctaggattgcatcctaatgacggttggag

SEQ ID NO: 101431 - DNA, 408 bp, Oryza sativa
  Clone ID: PAT_MRT4530_99052C.1
cgggcggcggcggcacctacggagggagtgccctcctagtgcttcgagaagctagcactgattgccgagtttcttacgataacccgtcataatcatccaaccggggctaaacacggaggagtaccctccgcaggaaagtaacttaggattatatatacacgtggaggaatactcatactgagctgtcaccattagcagcccacctcgacaaattcgcattatataaccccaaataataatatccagcaatctaaacaccacgcttaacttaccaaatactactataatatcatcgtcatgacatagaataatcgtatacacgatcattatacccacaccattgcatttcccagataagctagcatcataatcaatataatttggatatataataaagttggtattcat

SEQ ID NO: 101432 - DNA, 449 bp, Oryza sativa
  Clone ID: PAT_MRT4530_99053C.1
ttcatttctccccacctcctctcctcctcctcgttacatttgaagccacgcgcggacgggagagaggggaaggacgcggccgcggctcgcctctcccccccctccttgcttgccgccgatcggcgatcggtgcggcgggacgatccccggagggagcagccggcgcggagtccggaagcagatttgtagcgtcatccaattggcttccgctatctgcaacagtttccaccatttgtcaataaattactgaccttgtacttgaggatcgtcaacctcaagttgtaaaacattgatttttaatgggtgatgctttattacattgaacttatttaagtacctcataagatatccaaggaagacagtaaagtttcgatgcatcaacataggatcactatgctatcttccttagaacatgtcaccttggtctagttcgacaaccaagccatgga

SEQ ID NO: 101433 - DNA, 1247 bp, Oryza sativa
  Clone ID: PAT_MRT4530_99054C.1
ttgtcatctgctaacttcaacttctccaattgaatcccaagagaagtcagtgaagacgacgactgtggtggacggggatggcggccgctgcaaaggcggacgagggtggtaggacgggtgtgtgtgaggacgacaggatggatgaggacgaggatggcgcggcgcagcggatgtgggcgaggacagcgggatggacgaggacgaggacagagcggcggccgcgcgggcgacgatggcagccacggcgtggctgatgcaggcggccgggctggacgagaaccacaacggcgacggccaccgccgccgtggacgaggtccgcagccgaggcggtcgcggtgggcaagggccactgccaaggcgagcagaggcgatggagacgacggccatggcggacgagggtggcgacaacggtagacgagggcgatggagacgccggccatggtgcacgaggtggcggcccggtggagcgcgacgacggcagatgagggcgacggagacgctggccatggtcgatgaggcggcggcccggtggagcgcgacgacggcagatgagcgtgacggcaacaacggggaacacaagcggagcgaacgcgctggtggtgataccggcggacgcgggccgagtggatggcgatgcagacgcgctgggagtaggcggcgtcggcgacttgcttcgtcggcctggagttgctccgcgggaggcggcgggatccgtgggaggcggcggcgacttgcttcgtgggagatggcggcggcgtcggcgagttgcttccgtcggcgcctacttgctttgtgggaggaggcggcgtcggctgatccgtagccgccggcggcggctgatccgtttgaggcggcggcgaggtgctccgtgggaggcgaggcggcggcgggggaggcgaggcgacggcggcggctgatgtgtaggaggcggccggcggcgaagtgctccgtgggaggcggaggcggcggcggcagcgggttgttcgtggcagcgaggttgtggcgggcgcagtggtgcctggcgcggcgaagccctggtgctgcggtgctgctggtggcgggcgcggcggtggcctggtggcggccgcgttcacgaggtggcggcggcggctggtgcgtgggcagccttggctgcgaggtcgtggcgtgcgcgatggtgccggccgcggtgacgaggtggtcgtcgcaaccggcgttgtggcggcagcgggtttgggctttgcgcggctgcagtggcgagcggtag

SEQ ID NO: 101434 - DNA, 545 bp, Oryza sativa
  Clone ID: PAT_MRT4530_99055C.1
tttgttttatcaaatttgtaagaacaggtgctcatttgaagcagtagttatttacaggttacaagccaatcgtgtggtaaaagttactccaatgtctaagaacagaagaatttttctgttcttctaaactgcacctctagtgtacaaaacacaaccatctgtacaggctgcaagacctgtagtcctgcagctcttgcgatacttgtgttaatagatgaatttccagccttctccaagccaatctatagcatcaaaatataggtactcaaattcttccgcaaagttcatgccacctagcactatacttgagacatcagtaattggaatacagtacatggagatgccactcaattatccaggcaaaccccacagctgcgtgcacaaaactgttgtttgccagttgtagcatcagcattctagctctatgtactgctgaattgcacaggttaacaaggctgcagtactgcaccagactgtttaaaatgttgcagatgcagcatcagcaaaactggtatatgaagatgattgttcagtttctctgggct

SEQ ID NO: 101435 - DNA, 456 bp, Oryza sativa
  Clone ID: PAT_MRT4530_99056C.1
tcgcgatggccgcccttttgttttttttttatttttttgatgttgagtaatacagacaagtcgatcaagctttgatctggcccaagagagcacctagctgcccgattagaggctcctccaggttgtacttcttaggctgcgagaggtcgttctccagaagggcgataatggcttggcgatgagcagccagcacttgagggttgttgcttgccaggaagagaagggctttcagagcagagggctcttcttcctcatcacccttgaagggtaggtaggggataagtgtgtccacgaagacctgaagaggcatgggtgggttgatggtgtagataatcctgcagatggcagccagtgcgttatccttgcagggctcggaagaactgggattatcgaagatctgcttgagaagcaacaatccattgggcagatggttggcgaagtacttgggtgaatttt

SEQ ID NO: 101436 - DNA, 323 bp, Oryza sativa
  Clone ID: PAT_MRT4530_99057C.1
ggggtgggggtttttttttttttttttttttttaaaaaggaaagacaaccttttttctatttaaatcacccaaaggttcacatggcacaaatgaagaaatctgagcctattttaaacctccgaaccactataccggtaaaacccattacaagacaccggcaagggtggtaatgggaccgggggcaccaaagtacccaggggagataccaaatctagaaggcacgttaaaagccaacagagcctgagcctgagccagattccgatcaaaggagagatcaccaaactgctggagttggaagctgctggcgctatggccccgaaca

SEQ ID NO: 101437 - DNA, 695 bp, Oryza sativa
  Clone ID: PAT_MRT4530_99058C.1
ccacgccgtccgaaatattgtatgataaatatttagctgtgtcctgagtccattcctcctcttcatgctaaatatcgatgctttctcccgatgctctgcgagtatcaagtatgcaggctttcaatcccggcgcggcgctcaccacgatatcttatcattatccagtactcatgcggattatcagggctttcatcaggggggccgtccaattcatctggtggctcatatggattatccgggcattgatttgatctttcgattcagaaaacattggtcgatcttggctgggaatgagatctatatagggcatatatgcagggtaaacaactaatttgtcctccgtcaacatgatttcatttgcagctcctgacatcaggcgattggtgtcttcctggtgtttatctttcctactcccatcagtatttggatgagcgaagctttaggtattcttcagtctgccccattggctggaaactatattgggcatattacagggttcatggttaatttgtccttcggctacatgatttgatggtagcttcaacattagccgattgcatggtgtcttctttgtgtttaccgttcttaatcccatcagttttcaagtttttgatcagaaaaaaattccacaggggaggattcgatccaggttggggcgtagcgcagtgaatattgtggggatttgtacccctttt

SEQ ID NO: 101438 - DNA, 1336 bp, Oryza sativa
  Clone ID: PAT_MRT4530_99059C.1
ttccgccgcgcgcgactcctcccttccccatcctgcgctcgcttcctccacatcgcgcgctccatgtgcgggcccgacgccgaccgctcgcttccttccccaatcgcgcgcgccaggtgcgggcccaccgccggcagctctcgcatcctcgcgccgcttctcctccaaccctctccctcccggcgcttctctccacaccccccctccggcgcttctcctcccccttcccctcccccctcccctggcgctgctccgtttgctaaatatcgatgataaatatttagctttctcctgattccattcctcctcttcatgctaaatatcgatgctttctcccgatgctctgcgagtatcaagtatgcaggctttcaatcccggcgcggcgctcaccacgatatcttatcattatccagtactcatgcggattatcagggctttcatcaatttcccgtccaattcatctggtggctcatatggattatcagggcattgatttgatctttcgattcagaaaacattggtcgatcttggctgggaatgagatctatatagggcatatatgcagggtaaacaactaatttgtcctccgtcaacatgatttcatttgcagctcctcgtctcaggcgattggtgtcttcctggtgtttatctttcctactcccatcagtatttggatgaggtacattttctctccccttattctcctacgttgagttcattggctcgatcccaaatttatcagcttttggttaagctgatgtctatactgtactctctttttttttctccccttacatcaaatagcgaagctttaggtattcttcagtctgccccattggctggaaactatattgggcatattacagggttcatggttaatttgtccttcggctacatgatttgatggtagcttcaacattagccgattgcatggtgtcttctttgtgtttaccgttcttaatcccatcagttttcaagtttttgatcaggtgcatgttttcttccgttctccaatgctgagtttattttctcgatccccaaattggaacatagctattaggtgagttgatgattgtactcatttttttctgcctttttgtaaaatagcatgcatgtgttcttctgattgccccatttttggacatataacttgataatatcgctatgttttatcttttgtaatgtcacttacatgatcgatctgaccctaattgacgaggtaaattttgattagacatttctacctttgtattcaattctgttctgattcctgaagagaattttacgtttccaagaaacgattgctgacgataacttagttttcctctccatgaga

SEQ ID NO: 101439 - DNA, 2235 bp, Oryza sativa
  Clone ID: PAT_MRT4530_9905C.1
atggagccgagatctccgcggccgtttcctccctctccggccgcgctctccccctctcggcgctatatatttgctccccgtgcctctctcctccgtttccgccgctcgccgctcgctctcgccgtcggattcgtgctagcgccgtcctcctctctctccgccgtcgccgccaaccttcggttcgccgccgtcgtcactccggacttcctcccgactcggcgccacctccatcggcttcgccgcgtcgtcgtcgaccccgtccgctcctccgtttcgcccgccgactgccggagcaccgtcgccctcgtcatcccgaaccgcgccgccgcctctcgccgcttcggtcgtcgtttccgccgccctcgtcgtcccggggtgagccgaggaccgccgttcgctttccctcttctctccgctctctcgggcgccgctccgccgcgccggtggtcgccggcggtgaccatcggggagcgggtgcgccgcctcccgtcggccgtgccggcgaggccgccttcggccgcctcccgcggctgccaggtggggcccggccgtcagccgcccgcgcccgcgggtgcggctgacttgtgggacccacggcgccgaccgccgccagccgcgtgctcccggtccaccgtggaccgagaggctgacgcgtgggccccactcccgtggacccgcctctcggtccacggtggaccgggagcacgcggctggcggcggccggcgccgtgggtcccacgcgtcagccgcacccgcgggcgcgggcggctgacggccgggccccacttggcagccgcggggcgcgcccgaaggcggcctcgccggcacggccgacgggaggcggcgcgcccgcgccccgatggtcaccgccggcgaccaccggcgcggcggagcggcgcccgagagagcggagaggagagggaagcgaaagggacggtccacggctcaccccgagacacgaggacggcggagacgacgaacggagcggaggaacgcggcggcgcggttcgggatgacgagggcgacggagctccggcggtcggcgggcgaagcgaaggggcggacggggtcggcgacaacgcggcgaagccgatggaggtgacgccgagacgggaggaagtccggagcgacgacggcggcgaaccggaggtcggcggcgacggcggagagagagacgctgtagcttcggaagatccgctcttcgtggaagttgaagacgcacctcggccatataaggaccggtcttcgggcctctgttgcaaagcactaccgtacttccacatgtctagtggggcaaatgaaggctacacgagctgcggcccggtagtcgagatgtcatggcagagggttggtgccctgctgctaggggctcagtcctgcctgcctgtcccggaggttccggccgtaggcgggattgggtcggccccgggcgggtttgagtatctgtatgtcgcgatcgacaagttcactaagtggcccgaggcttatccggtcgtcaagatcgataagcactccgcacttaagttcattaagggcattacagcccggtttggggtgcctaaccgtattattacggataatggcacccaattcactagtgaacttttcggcgatcactgcgaagacatgggcatcaagctctgcttcgcctcccccgcccaccccagaagcaatggccaagtggagcgcgccaatgcggaaatcctcagaggccttaaaaccaagaccttcaacatcctcaagaagcacggcgattcgtggatcgaggagttgccagcggtgctctgggcgaaccgaaccacaccaagccgagcaaccggggaaacgcctttcttcctcgtctacggcgcggaagcggttctcccatccgagctcaccctgaggtcccctcgggccaccatgtactgcgaggctgatcaagatcagcttcgcagagatgacctcgactacttggaggagcgaaggcggcgcgcggccctccgagccgcgcgctaccagcagagcctgcggcgctaccatcagcgccgcatccgggcccgatcactctgcgtcaacgacctcgtcctacgccgcgtccaaacgcgtgctggattgagcaagctctcaccaatgtgggagggtccgtatcgagtgatcggcgtcccccggccgggctccgttcggctagccgcgggcgacggcacagagctgcctaacccgtggaacatcgaacaccttcgtcgcttctacccctaa

SEQ ID NO: 101440 - DNA, 186 bp, Oryza sativa
  unsure (1)..(186): unsure at all n locations
  Clone ID: PAT_MRT4530_99060C.1
atggcgaacgccggatgggagtgcgcncccaagcggtggcgggagcggatcggatggggcgtggaggacaggaagatcggatggtgcgccgcggttgggtgcacgggtnggcggggaagtgaggggagggggaaaagcggtcacggggacagggcagtaaacggtatggaaaccgggagaccataa

SEQ ID NO: 101441 - DNA, 309 bp, Oryza sativa
  Clone ID: PAT_MRT4530_99061C.1
ctctcctcctcacatccgacggccggcgtctgcgggcaggtggccagcgggcggcggggcagcacgcgcggcgggcggcggggctgcgcatagggcggcagcgcgccaaccatggtgagtggcggcaggcgggcggcagtgcaccggttctcctctccttttttttaataatttgtgattgagagatgtataatttcttttattacaatttgtgattcattggatggatctgagatgtgtaatcgatttgtgatgcatttaatttgtgtgtaatttttttaaaatttgtgatgtaaaaaaaaaaaaaaa

SEQ ID NO: 101442 - DNA, 318 bp, Oryza sativa
  Clone ID: PAT_MRT4530_99062C.1
ttctcttctctccgatcgatccttcccctctctctctctctctcaatccagataggaaggcggcgagcgagagcgacacgatgcaggcggtgagggaggaggagcaggtggtggaggaggtggcctggcaccttgctttcgctcaggttgtggtgccgtacaactgggtcgtggtgcactacaccgagggggccgaggttatcgagtccgtcctggaggtggtccgccaggaggccgtttactgccactgtttacaaggattccaaggttgccattgattgggcggaggctctttatcttgttcggggaaccattttt

SEQ ID NO: 101443 - DNA, 425 bp, Oryza sativa
  Clone ID: PAT_MRT4530_99063C.1
actgatctacaaacgggaaaagctttaatagaaatgattacagaatacaaacggcttgggggtaaccatcttaagaagaaagctactaagagatctccacctatacccaaaagctgaaacattaagccaacacaatcctatccaacaaactgtttttttatatcactctgagcatatgctagctaacattccttacatagcttccactttttcagctacagaacaaaaggccacacttatccctgtccacccgtcaagcagaacaatgctccaggactgcaagagaatgaatttataaagtatcaaatcagacttgtagggaatttcttaactaccaagtagaccaaatacagaaaatacaaacaataccaagggttggcaaggcttttgaatctttgacaataaagaaaattgtcagatgcttg

SEQ ID NO: 101444 - DNA, 382 bp, Oryza sativa
  Clone ID: PAT_MRT4530_99064C.1
acatttttcaggaggtctatgaagctgactggaaggggcgattttttgatgctggaatccggtatgagcaccgccttattgatgacatggttgcgtacgcgcttaagagcgaaggaggctatgtgtgggcttgcaagaactactatggagatgtgcagagtgatttcttagctcaaggttttgggtctttgggtttgatgacatcagtgttggtgcgccctgatggaaaaaccatcgaagctgaagctgcccatggcacggctacccgtcatttccgtgtccaccagaaaggaggcgataccagcacgaaccagcattgctttggacctttgcatggacaagagggcttgcccacagggcaaagcttgacgacaacgctaga

SEQ ID NO: 101445 - DNA, 1509 bp, Oryza sativa
  Clone ID: PAT_MRT4530_99065C.1
atggcgaccaccgcctcctcctcctcctccctctccttcctctcgccgcaacccatccacccccgccgcgtccgcctccccaatcccccgccctccaccgccgcgccgcccactccgacggccgtacgctgcacgcccgcgcccgcggcggcgccgtcggcggcgtctgcggcgtccgcgaggtcaatcccgccgccgaagctggtgcggtgcccggcgctggaccgccaggcggcgcgcgccaaccgcctccgcttcgcccgcaagctcctcgtcctgctcctctccaagccgcgccgcttcctcccgctccgcgtgctccgccgctgccaccgctacctcggcctcccgccgcaccgccgccgccgcccgctggtcccgttcgtgctccggtacccggcgctgttccgcctcttccaggcgcccacgtcgcacccgctctcgcccaacctctccaccctcgccgtcgcgctcacccccgccgcggaggcgctcgccgccgacctcgccgcgctccgtggctcctccgagctcgcgccacgcctcgccgccaagatgcaccgcctcctccttctggcacccgggcggagcctcctcgtgtccaagattgctcacctcgcacccgatctcggcctcgccatggacttccgcgccacgctctgcccgcagcaccccgacctcttcaccttcgtgaacacctcccacggccacgcactccagctagtcgatcccccgccgccaccgcctccgccgctcccgcctttccgccccgcggcgccatccgaccgcctcattgaccggccacgaaggttcccccacctcaagctccggcgagggctcaacctccgccgcgcgcaccgggattacctcttgcggttccatagcctgcccgaggtgtcgccattcgagccactcgatgagggcgcaagcttggagatgatggagcgacgggcgtgcgcggttgtccgggaggtcctggccatgactgtggagaagagaacactggtggatcatctcacacatttcaggcgtgatttcgggctaccgaaccggctgcgcgcaatgctagttcggcacccagagttgttctatgttagtgtcaaggggttgcggcactcggtgttccttgtcgaggcgttcgacgatgacggtaggctacttgtggaggatgatatgcttgttgcgagggatcggcttgaggagcttgtccgcgaggggaagcggatgaggcgggctaagaagaagggccttcttgctcttgcggatgacagtgatgaagatgatgaagaggaggatggggaagaacaggattcggtacaggtcgatggtgaatcttgggacttgttagaggatggtggcattggcgaggactgggaggaggtgggtgatcttggtgaggggagcgatgacgatgctgatgctgaattggatgcgttggaggagttttgggtgaagaaagctgtggccgaggggttggttgacactgggagcgagcttgatgcttggtga

SEQ ID NO: 101446 - DNA, 208 bp, Oryza sativa
  Clone ID: PAT_MRT4530_99066C.1
tcttattcaaatcaagcgttggtgagaggaagaaggtaagctaagcaaagcacgcaaagctcgagagaatgtgacagcagctttggccatgggcgagcttgcgctgctggacttctgggcgagcccgtacaggcagcgttgcctgatcgctctggcggagaagaagcttccctatgactactccgagcaggatctactcatcgccaag

SEQ ID NO: 101447 - DNA, 462 bp, Oryza sativa
  Clone ID: PAT_MRT4530_99067C.1
acccacgccatgcgtttcgttgaccaacaagtccatagtactccccagactatatccttgaagctgaaattcagatcaagaagctttgccgatggagcaggttcatcatacaaatcaagaattactactgcagtagggaatgacatgaactctgaacatgataaaggtcatatgctgcatgatgagggttctgcccttaatcaacatacgaatgatggcatccttactgtgtcgaaaagtttgccggaacgcacagataaaagcactagtctggatgattcaaaaaagtggcacttagatcctgcaaagacatatagtgcagtttacaaaagatcaaagacaaataagcacaagaaaaatttggattcagatgcatatggaaatggggagagcacttccgtatccaatgatgatgacgggtatcaacctacagattacagtcctgttaaacctgatagggct

SEQ ID NO: 101448 - DNA, 270 bp, Oryza sativa
  unsure (1)..(270): unsure at all n locations
  Clone ID: PAT_MRT4530_99068C.1
ctcgangttnnaaaaaaaaagtttggaaaacacccataaattcgnacccgattcattactgaacaaaatccaatcggcaatcaaccanttgagaaaaaggacatgaagaagacaaaaacatcaccgggaagncaccaacatcgtcgtcgcaccagatccgccacgaggcgcatcggtgaagncggatcggcgntttctacgntgccnttggatccgccncagaangccgtcggactngatctgnccaagggaaaccaccgccgccgtcga

SEQ ID NO: 101449 - DNA, 675 bp, Oryza sativa
  Clone ID: PAT_MRT4530_99069C.1
atggaggtttggcccagagccccagacttcaggaatcaaacctgttatttcttttgtatgttcgcttatggtatgctgttgaaatttgtgtcaggccttgtgtattgcatggattacttggagaagaatatcgactggcttgaggaaaagttgaaacctcttattgaagatcactatctgttatttgatttcccgggtcaagtggaacttttctttctacactcaaatgcgaggagtattatttacaaacttatcaaaaagctaaacttgcggctgactgccgtgcaccttattgatgctcatttgtgctgtgatcctgggaagtatgtgagtgcattgcttctttcactgtcaacaatgctacacatggagctgccacacatcaatgttttgtcaaagattgacctcattgagaactatggaaacttagcattcaacctcaacttctacactgatgtcgaggatctgtcttatttgcaacgccatctagatcaagatcctcgttctgccaagtacaggaaacttactaaggagctgtgcgatgtgattgacgattttggcttggtcaattttacaactttggacatccagacagcagtgtcgttgagttcagtaaaattgcagcagcgccacttgactgggattactacagatatcctttactgtctcttctag

SEQ ID NO: 101450 - DNA, 279 bp, Oryza sativa
  Clone ID: PAT_MRT4530_9906C.1
gtgggaagggagggggaggccgaaggggaggtgctcgacatggaggccggcacggtgcggtgcgcggcgaactacgcgccgctgacgccgctcagcttcatccagcgcgccgcggcggtctacggcgaccgcgccgcggtggtgtgcggggagaggcggcacacgtggagggaggcgcggcggcggtgcgtccgcgtggccgccgcgctcgccgcccgcttcggcgtcgcccgcggcgatgtggttgctgtcctgagcccaaacgtgccggctatgtac

SEQ ID NO: 101451 - DNA, 1031 bp, Oryza sativa
  Clone ID: PAT_MRT4530_99070C.1
tttggttgtcagcatgagttggtcgttgagcttgagcatggtggaggcgaggctgcctcccgggttcagattccatcctcgagacgacgaactcgtggttgactacctctcccggcggcggcgccgccggcgccggctgcccgacgccgacactgatcgacgtcgatctcaacaagtgcgagccatgggacctcccagagattgcttgcattggagggaaggaatggtacttctacaacctcaaggacaggaagtacgcaagagggcaacgaacaaacagagcgactgaatcagggtactggaaggccaccggaaaagaccgggagataacccggaaagggtccctggttggcatgcgtaagacgctcgttttctacagagggagagcccccaagggtgagaggactgattgggtcatgcatgagttccgtcaagaattagaccatgccaatcaccatcatcatctcaagtacatgcaggagggttgggtgctgtgtagggttttctacaagagcaggacagaagctgttgcagcaccaacaatggagtctactcttcctcctcgttacatcaatggcggcacatcaagatctccattgccacccctcgttgacagctcgatctccttcaatcatggaggttatgaggaagttcttccctgcttctctagctctcatcaccagcagccatcgccggcgtcgatgaacgcgtcggctgctaaagcaaccctccctcgacctctactaggaaaggaaaggaaacaaacacaaaaggggaagtatatgggcctcagcttggcccatgtaaagtttttgcataggcctcctgagcggcccaactactacacttggactctttctctctcattccactctgagcggaactcttcttgctcgccaccgccgccggcgaaggggatcgatcggatgggaacgtcggtgcaggtgactccgttgagtggggcgtacggtgagggacccctctgctacctactcgccgacctagtgttaggtcaaagatgttgggcatgc

SEQ ID NO: 101452 - DNA, 1263 bp, Oryza sativa
  unsure (1)..(1263): unsure at all n locations
  Clone ID: PAT_MRT4530_99071C.1
nnnnnnnnnnnnnnnnnnnnnnnnnnnnnnnnnnnnnnnnnnnnnnnaaaagtcaatggtgtcaaacattttaaaatggagagagtacatttctcagttccagtttgcatgtcacaacatgttacatccctacctgagcggcatgggggcaaatggagctctcattcaagcatagcaaggtcacatgtcaagcattacaaacaaattcagtttcatcgcgtcttgcttgtcttctgcacgaattcgtcgtctttcatgtacttctcctgcacctctgctgttctgtagtaatcccagtcaagtggcgctgctgcaattttactgaactcaacgacactgctgtctatagatgaaaatatatagccattgcttttgtcaatcaatttcacaagattgccgacgctttccttgtcctggatgtccaaagttgtaaaattgaccaagccaaaatcgtcaatcacatcgcacagctccttagtaagtttcctgtacttggcagaacgaggatcttgatctagatggcgttgcaaataagacagatcctcgacatcagtgtagaagttgaggttgaatgctaagtttccatagttctcaatgaggtcaatctttgacaaaacattgatgtgtggcagctccatgtgtagcattgttgacagtgaaagaagcaatgcactcacatacttcccaggatcacagcacaaatgagcatcaataaggtgcacggcagtcagccgcaagtttagctttttgataagtttgtaaataatactcctcgcatttgagtgtagaaagaaaagttccacttgacccgggaaatcaaataacagatagtgatcttcaataagaggtttcaacttttcctcaagccagtcgatattcttctccaagtaatccatgcaatacacaaggcctccatttggaccaagcgaatgctcagacatgacatcactcagttttatgaggtcctcaatgtttatggcgcattcatatggcaacgcatcattcgcaggatcgagattgataaccgcaactttcctgccgacgagggagaggaactgggacatcccgttgcagtaggtcgtcttgccggagcccggcggcccgatcaccacctgcccgaacaccatcctccgcccggctagagcctacctcctggcgctcgctggacgggtgcaggtagggttttcgccggagatggcggtggcggcggcggtgtcagcgccggcgacgcgaagagaaatcttctagaacagccccggccgg

SEQ ID NO: 101453 - DNA, 206 bp, Oryza sativa
  Clone ID: PAT_MRT4530_99072C.1
ggccggccgggcacccattactggaataaatgacacatcatcataacagctataagcaggttctatcactacatcacatacgcaggaatagccctgacatccattgtctcctcgccctcctagggagcagcgcctcgaggcagcatgatgcttgcacctatgcccaatgccagcagcaccacgaaatgcaaccgaggataaacccg

SEQ ID NO: 101454 - DNA, 1242 bp, Oryza sativa
  Clone ID: PAT_MRT4530_99073C.1
atgtctcgggtggaggacaaagtagctgctcttcatgctattctcaaggctaaggggctctgttacacttgcggtgagcgttggagcagagatcataaatatggtccaactgtgcaacttcatgtggtggaagagctattggaattccgggattcttcttctaaagagaggggtgatgaggagaaggattctgctgttattcctaactctgaatatgaaggtgaaggtttaccaccagctggatatttgatcactctattcctctactgccaggagctcatccagttaaccttcgaccttaccgatataatcctgctcagaagaatgagattgagcatcaaacacttaaatgccattacagtaaagaatcgttaccctcttccaataatcgatgaactattggatgaattggctgcttcttgtttattcacaagtttggacttgcaagctggatatcaccagattaggatgcggcttgaagatgtgcacaagactgcactgaaaacccacaatggtcactatgagtttcgggtgatgtcatttgggcttactgctgcgccggccacttttcaagagctgatgaacacaattctatctcctctactgcggaaaggagtgttggtcttcattgatgatattctagtttacagtacatctttggatcagcatgtgtctttacttcgccgcgccgcgctgtggttgtggtcgccgtcgccgcttagcgtcatcaccgtcgggttcacgcggaggaggagcacctcggccgcccctttgcagccgccgaagaccgtcggagagccgtcgtcgccgtcaagtcaagccgagccggcgttggagttcgtcgccggccttcgttcgtcgttgttctttacaccgactgagaagcggcgagaagtccgtgggggtcgctggggagtccatgcctctggttatagttatagagggggtgattatgatccaggaatggtgcactgtgcttccattggattgcgctattcatccggtgttatgtctctcagcttcgtcaagcatcttaccccgctcaacctactgatgttcgtcttcctcctgctgttccacctgaagatattgttcctgtggaaattcttgaacgacgcgtggtcaaaagaggagatcatgcgacagaacaggagggaggaatgtcacggcagcgactactcatacgtctactgtggacaatccgacaacagagaacccggtgaagcattgagttcgacctga

SEQ ID NO: 101455 - DNA, 1623 bp, Oryza sativa
  Clone ID: PAT_MRT4530_99074C.1
atgcggggcccaccggtcagcggctcgggagagggaggaaggggcgccggcacgcggggcccaccggtcagcgactcaagggggagggcggaggaggtgttggaggcgatcaggagggaatctcgtcgtcctgagacaagttccagcagtcggactaccaatttttgttcggccacagtgtttccagtgggacaacctcgtaccattttggcagctggaactcgttctgataagcgcatgtctcgggtggaggacaaagtagctgctcttcatgctattctcaaggctaaggggctctgttacacttgcggtgagcgttggagcagagatcataaatatggtccaactgtgcaacttcatgtggtggaagagctattggaattccgggattcttcttctaaagagaggggtgatgaggagaaggattctgctgttattcctaactctgaatatgaaggtgaagtgtgtcagatttccaaagaagctatgcaaggcactgagacaagtgagggattggccgataaatggactcagcagcgacatgttttgtcacctatcaaggtcaaagttgctgatggggggtttaccaccagctggatatttgatcactctattcctctactgccaggagctcatccagttaaccttcgaccttaccgatataatcctgctcagaagaatgagattgagcatcaagtgtctgatatgttacagcagggagttatacagccgagttctagccctttttcttctccagtgttgctggttcttaagaaggatctcacttggcgtttttgcattgactatagacacttaaatgccattacagtaaagaatcgttaccctcttccaataatcgatgaactattggatgaattggctgcttcttgtttattcacaagtttggacttgcaagctggatatcaccagattaggatgcggcttgaagatgtgcacaagactgcactgaaaacccacaatggtcactatgagtttcgggtgatgtcatttgggcttactgctgcgccggccacttttcaagagctgatgaacacaattctatctcctctactgcggaaaggagtgttggtcttcattgatgatattctagtttacagtacatctttggatcagcatgtgtctttacttcgccgcgccgcgctgtggttgtggtcgccgtcgccgcttagcgtcatcaccgtcgggttcacgcggaggaggagcacctcggccgcccctttgcagccgccgaagaccgtcggagagccgtcgtcgccgtcaagtcaagccgagccgccgttggagttcgtcgccggccttcgttcgtcgttgttctttacaccgactgagaagcggcgagaagtccgtgggggtcgctggggagtccatgcctctggttatagttatagagggggtgattatgatccaggaatggtgcactgtgcttccattggattgcgctattcatccggtgttatgtctctcagcttcgtcaagcatcttaccccgctcaacctactgatgttcgtcttcctcctgctgttccacctgaagatattgttcctgtggaaattcttgaacgacgcgtggtcaaaagaggagatcatgcgacagaacaggtga

SEQ ID NO: 101456 - DNA, 493 bp, Oryza sativa
  Clone ID: PAT_MRT4530_99075C.1
aaaaaaaaaaattttttttgtttcctttttggaaaaatttgggggggggccccccaattttggaaaaagcaccctctccggccccttggctataaaaaaacccctaaaaggcctttaaaaaaatttggggggaaaaaattttcccggtcccaggggtgggaaaaaaaaacaccccacccccccggggggccttgctccctaaagaagggggggggaacttgtttttcctcccgggggccctaaagaaataccgggggggaggggcgccccccccattctggccagctttttttttgcgggggttttacaaaagccttttaaaaaacgggtttaaaaaaaaagacccgaacaccccccgggggccaaaaaaaaactttggccaaaaaaggtcaacccaaatcttttgggtggggggtataaaccggggtttaaatggcccccataacttattttttaacgacggggggggaacaaaaaaaaaaaagtccctttt

SEQ ID NO: 101457 - DNA, 363 bp, Oryza sativa
  Clone ID: PAT_MRT4530_99076C.1
atggagctgcacgggaggtggacggcagcgaggagggccgccaccgccgctcatccctttcccctctccttgtctttcgactccctctcctttcctgcagtgcggaggcggtggttgaggtggagaagacggtgcggcggtccgggcagagaaggtgacggcgtcggtggtggtccgaacggacaaggtcacaacgagggagagggcgggtggtgggcacggcgaggagggcaggcggtgggcgcgacggggagggctgccggcctcaaggtgagctcggcctcaatcactcatcgcctgggcgtgctccgcctccaacatcggccgcccggtcatgttccgcctcagtcgcccgccgcctag

SEQ ID NO: 101458 - DNA, 441 bp, Oryza sativa
  Clone ID: PAT_MRT4530_99077C.1
atggcgaagatgtgcgtgggcgccagtggtcctccttgtcaccgtgccgccgcccctccaccatcaccgcctatcctcctcgtcatcgagccgacaccatccctcttcctcctctcctcctaccatatccgtggttgccgccacccctccgcagccgccgcctccattcgccaccgccggcaatcctcctcgtcgctgagccgacgccaccctcctacccttcatggagctgctgcttcccctctgccgagttgtcaccgcctcttccaccaccgccagcggtcctccttgtcggcgactcaatgttgcctctttgccatcgctcctaccctccgcgaagcagccgagggccctccacagctgttgccatgtggccgccaccgctcctcctgcccatcgcgctttggacagagagaggagagagagcgggataaagaatga

SEQ ID NO: 101459 - DNA, 722 bp, Oryza sativa
  Clone ID: PAT_MRT4530_99078C.1
acctgcttcctactctattttcccaatacctatttaaagggtaagcctctctctgatatgtccagtaatacaagtatttgtcaattctaggctgatttaacaaagtaaacaaccattttcttaggtatggatcctttaaatgtgctaatgggaccaaaataagattttggaaagacatgtgattgagaatgctctcaaagatcaataccctactttatataatgtggctcgaaagaagtagtctaccgtggcagaggttttgagcacaacattgttgaatgtttcttttaggagagccacagcttaccaaaagctaatcgggtggaatgatttgatcctcatgctagctaatataactttatcaaatgaaaagaattactttgtatggttgcttcataaaatagccaatttccagttaactctaagtataccgtgtccatgaaatctaatattatgatccataagaggaatctatgggacctaaaggttctactatcaaggtttttttgtggtttcttcatatgaaagtaatcctaacaaagataacctgactaatggaaaatagggggagacaaacatgtttttgggatactatatgcacaatagtgctatacttttggaatctgtatccaaggatgtcttattctatgggtggtgtagttccattacaattgttggctaaaaaatctatccttcggttattccagcaaaaaaaggtgagt

SEQ ID NO: 101460 - DNA, 505 bp, Oryza sativa
  Clone ID: PAT_MRT4530_99079C.1
gctgacacccccacaggacgtggacgctgggctggaagacaacaaagctagccggaacgcaagttctagatctgcagctatggtgacatcgggcatggaagtggcagccccggtggcgaacgcgggcggaggtgaagcgtcggccatgccgaccacggtggcagccatggtgacggacaggagcacgatgggagctcgacacaagcaaggaaagaagaggaatagcagacttcggctcgttcactttgaaggagagaaggactggaggaggagggaaaacaaaggagggatggctacgagcagctgcgtggctgtttcggagccgcacggcacgacggccattggagatcggcgcgtggttggcgcgaggcggcacgaggctgcacaaggcggtcatgagttgggctcagggtggcacaaggagcagcgtaggcaggtgcaaggcggcacgcagctagcgcgtgcggacacgagcaggacacagggcggcacgagcggcggctag

SEQ ID NO: 101461 - DNA, 1145 bp, Oryza sativa
  Clone ID: PAT_MRT4530_9907C.1
atgaatagagtacccactagttggggttttattttcctagggtgaacaaggccgaggagaggggcgcgcggaccgggtccatgggagtggggcccacgcggcagcctcacggtccacggtggaccgggtgcacgcggcttacgccggccggcgccgtgggtcccacgcgtcagccgcacccgagggcacgggcggctgacagccgggccccacatggcagccgcggggcgcgcccgaaggcggcctcgccggcacagccgacgggaggcggcgcgcccgcgccccgatggtcgccgccggcgaccaccggcgcggcggagcggcgcccgagagaggggagggaagggggaagcgaaacggcggtccacggctcaccccgggtcgacggcgacgacgggaacggctaccggagcggaggaaggcggcggcgcggctcgggtcgacggggacggcggcgttcgggcggtcggcgggcgaaacggaggggtggacgaggtcggcgaggacgcggcgaagccgaaggaggcgacgccgaggcgagaggcggtccggggtgacgacggcggcggaccggagctcggcggcgacggcggagagagagagcgacgtcgcgagctcaaatccggcgaggaggaagggcggcgagaggcggaaccggacggaggaggtgcggggagggtttaaatagagccggggcgagagaggctggccggggaagggaggaaaccagcgcgggaggtcggccgccatcaatggcgccggcgagattaggggagcggtttccaaccgaatccgagggagagagggagggaaaaatggggggaaagagagagggaatcacggggagtgatttccccctctttattgcgcgcggggacggcgggaggcggcgggattcgcggcggcggcggcgctagggcacgggcgaggcggcgggagcggcgggaggatagggatgacaggtgggccccacccgtcagcgagggtggcgggcgggcccgcccgtcagcggcacgcgcgcggggaggaggccgattgggccgcgggggagaggagagagagggagggaggtgggccgagccggcccaagagggggaagggggaaaaaaggactttttagggcttttctttttataaaaccattt

SEQ ID NO: 101462 - DNA, 120 bp, Oryza sativa
  Clone ID: PAT_MRT4530_99080C.1
atggaggagctgggcaacatcaccaagcttgaaaaacagcgccatcacgtcatcgggcaatatgtggtcggccaaaaatggactgagtttggagctaggatctgggagctggagctctaa

SEQ ID NO: 101463 - DNA, 261 bp, Oryza sativa
  Clone ID: PAT_MRT4530_99081C.1
atgaacacaagccctcgagagtgtgagagtgtgcaaggggtgtatgcaagtgaagcaagcgccaagagagaggcaatcattgagccccctcagcccagccggtcagaccaccatagggcggccggtcagaccggcctcggctcggttagaccgccaccagctcggtctaaccggctgcggccctggcggctctggatcgccatcccagagcacagccgccagccaccaggcggccggtcagaccgaggtcattacccctag

SEQ ID NO: 101464 - DNA, 480 bp, Oryza sativa
  Clone ID: PAT_MRT4530_99082C.1
atggtgacatcgggcatggaagtggcagccccggtggcgaacgcgggcggcgtcggccatgccgaccacggtggcagccatggtgacggacaggagcacgatgggagctcgacacaagcaaggaaagaaggttggggaaaattctcaccagtgagaggtgatcctgctggtgctatggtgaggaggcagaagaggaatagcagacttcggctcgttcactttgaaggagagaaggactggaggaggagggaaaacaaaggagggatggctacgagcagctgcgtggctgtttcggagccgcacggcacgacggccattggagatcggcgcgtggttggcgcgaggcggcacgaggctgcacaaggcggtcatgagttgggctcagggtggcacaaggagcagcgtaggcaggtgcaaggcggcacgcagctagcgcgtgcggacacgagcaggacacagggcggcacgagcggcggctag

SEQ ID NO: 101465 - DNA, 699 bp, Oryza sativa
  Clone ID: PAT_MRT4530_99083C.1
atggacctcacacctgctggcggtgagcgtgacattcctgacgacttgttcatgtgctctgagctctacattgcagcgttcgaggggcacaccgatcaggtcatcggacttttagaaggaagccgcgcctccgcggcagtcgccgggaacggctggtcgtcgccggcggcacaaccaacagctaaacaccatggaaactgtaacattcacgaggtgaccgccgagcgctggacgctgctccacatcgcggcggcgcaggggcacgacgacctgatcgacgagctatgccgccgggacagcggcctcctctccgcggcgagctcgtcgggggacacgccgctgcactgcgcggcgagggcggggcacgccggcgcggtccgggccatcgaccggctggcacgcgcgaacgtggaggaggacaggctgcgggaggcccttcgcgggaggaacgaggccggcgacacggcgctgcacctcgccgcgaggcacggccacggcgaggccgcggaggcggtggtggagscggcgccggagacggcggccgatctgaacggcgccggcgtgtcgccgctctacctggcggtgatgagcgggtcggtgcgcgccgtcacggcgatcctctggtgcagggacgcgtcagccactggaccgaaatcacagaacgcgttgcacgctgcggttctccagtgttcaggttaa

SEQ ID NO: 101466 - DNA, 1224 bp, Oryza sativa
  Clone ID: PAT_MRT4530_99084C.1
atgacgggcgccgccgccgccgtctccccgctcgtcgcgtggccccgctccgcgcccgcctcgcggggcggcaggcgtgcggcgcgcgcgtcggcgttccacccggacgtgtcccgcgcggtggagtcgctgcaggcggagttccgggaggtggaccgcgcgctcgccctcaactccgcccgcgtctccgccgccttccacgccgcccacgtcgcgccgcaccatttcggtggctcgacggggtacggccacgacgacgggggcggcagggaggtgctcgactccgtcttcgcccagatcgtcggcgccgaggccgccattgtccgcccccagttcttctccgggacgcacgccattgcctgtgctctgtttgctcttctgaggcctggacacgagctcctggctgtcgctggtcctccctatgacaccttggaggaggtgattgggatcagggggtcggccaatgtgggatcgctcaaggattttggagtggcataccgagaagttccgatgcaaaatccaaactgcatggttatggttgacaattgctatggtgaatttgttgagacgtcagagcctccaatggtgggagcagatttgattgcgggtagtttgataaagaatccaggtgggacaattgcaccttgtggtggctatgtcgcagggaagaaagatttggttgcggcagcagcagctcgcctgtctgcacctggacttggggtagagtttgggtctacacctggacatgtgatgcgggcactgtttcaaggcttgtttcttgctccgcaaatggttggagaagctgtcaagggaggcatgcttattgcagaagtcatgtcaaccaagggctatagagttcagccacttccaagggttcctcgccatgatattgtgcaggcagtagagcttggcaacagggagagactcatagcattctgcgaaatagtccaacaaacttgcccagtaggatcatttattaaaccaactgctggggaaactcctggttatgcttcagaggtcatttttgctgatgggacattcatagatggaagcacaagtgagctatcatgtgatgggcccttaagagatccatacgctgtattctgtcaggtgaagttcataattctgcttggtattgatgttgtcagttctgaaagttgtcaactcataattgggattactgacttaatgcaggaaacaaacatggcgcacgtctttggttga

SEQ ID NO: 101467 - DNA, 828 bp, Oryza sativa
  Clone ID: PAT_MRT4530_99085C.1
atggcgccctccttccggctctcttctgcacccgagtcggccgacgaagcaacagctcataataaggagatatacgaccaactccgacgagtcgcagagacctttccgtcggctcccagcctcatcggcctcccgtgcagtcgccacccggacgggtggtacacgttcacgaatggggttgtgagctccatggtgatcaaggagcacctgacggcgcgcgccaccgacatcttcctcaccaccttccccaagtccagcaccacttggctcaaggcgcttctgtactcgactctccaccgcggaactgacgagctggtggcgcacagcccgcaccagctcgtccctttcctcgagtcccaggtgttcgccaatgaccggatccctgacctgagctccttaccttcgccgcggttgtttatgacgcacatcccatcccagtcactgccagactccgtcgctgcatccggctgtaatgtgtttgggccgttctgggagcatatcctcggctactggaggtggcacgtcgagaagccgaaccaggtgctcttcttgacctacgaggagctcgtcgccaacacgctcggccagttgagacgccttgccgagtttgtcggatgtccattcacgacggaggagcagaagcacgggactacacacacttcatggcttcctcctcaactgccgaagcggccgacggaacgtctcacatggaaatctatgaccaactccggcaagtcgtggagaccttcccggcggcagtcagcggcatcggccaaccatactgtcgccaccctgacggatggtacatgtccaggcggggggttgtga

SEQ ID NO: 101468 - DNA, 342 bp, Oryza sativa
  Clone ID: PAT_MRT4530_99086C.1
tttggaacaggttcatgccgtgggacatcgacgaggcgcaccggcaattctgcgatggcgctcgcagtttgggccgttctgggagcatatcctcggctactggaggtggcacgtcgagaagccgaaccaggtgctcttcttgacctacgatgagctcgtcgccaacacgctcggccagttgagacgccttgccgagtttgtcggatgtccattcacgacggaggagcagaagcacggcactgtcccaaacaacacggtcttccggcgtggcgtggtcggagattggagaaaccacctgacgccagagatggcaaggaggattgatgagattacaaagagcaa

SEQ ID NO: 101469 - DNA, 456 bp, Oryza sativa
  Clone ID: PAT_MRT4530_99087C.1
atagaaggaattcccgaaactagaagaggaagagaaaaggaattcccgaaactagaagagaggtgaggaggacctgcctcatcgcggatcgtccggccggcggcggaggccatggctgccggccacggtggcggccgtgtcgtcgggccgcaacggcgcgcgaaggcacgcaaggccggtggtgcggcggaggtgcaccgggcaacggggggcctgcaggggaggcggaggcgcgcgggtccgcgcaaggacggcagaggtggaggggcctcgcgctcgtccaccgcctcgtcaccgacggcgacccacactctaccccatggtggacgcagctatgctccgacgtcgccgtcgtgctcgccatcctccttgaccgcttcttcgacatggaacaccgccaagcaaaccgacgacgtcggcctcgcgcggttggtggactttgccgacgtcaagcgc

SEQ ID NO: 101470 - DNA, 1435 bp, Oryza sativa
  Clone ID: PAT_MRT4530_99088C.1
atggcgccctccttccggctctcttctgcacccgagtcggccgacgaagcaacagctcataaggagatatacgaccaactccgacgagtcgcagagacctttccgtcggctcccagcctcatcggcctcccgtgcagccgccacccggacgggtggtacacgttcacgaatggggttgtgagctccatggtgatcaaggagcacctgacggcgcgcgccaccgacatcttcctcaccaccttccccaagtccggcaccacttggctcaaggtgcttctgtactcgactctccaccgcggaactgacgagctggtggcgcacagcccgcaccagctcgtccctttcctcgagtcccaggtgttcgtcaatgaccggatccctgacctgagctccttatcttcgccgcggttgtttatgacgcacatcccgtcccagtcactgccaaactccgtcgctacatccggttgtaaggtggtgtacctttgtcgggaccccaaggactgcttcgtctcgctctggcacttttggaacaggttcatgccgtgggacatcgacgaggcgcaccggcaattctgcgatggcgtctcgcagtttgggccgttctgggagcatatccccggctactggaggtggcacgtcgagaagccgaaccagaaaaaacaactttttttgcaaggactacacacacttcatggcttcctcctcaactgccgaagcggccgacggaacgtctcacatggaaatctatgaccaactccggcaagtcgtggagaccttcccggcggcagtcagcggcatcggccaaccatactgtcgccaccctgacggatggtacatgtccaggcggggggttgtgagcgccatggccatcaagaggcatctgatggcgcgcaccacggacgtcttcatcgccaccttccccaagtccggcaccacatggctcaaggcgcttatattcgtatcatggaacattgatgtggctgtccggcaattctgcaatggcatctcgcatttcgggccgttttgggagcacgtcctcggctactggcggtggcacgtcgagacgccaagccaggtgttcttcttgacctacgaggagcttgcagctgacacgcttggcctattgagacgtttggccgagtttgttgggcacccgttcacggttgaggagcaagaggctggagtggataggaagattgtggagatttgtgccatggagagctcgtcgaggttagatgtgaatctgtcggggacaactgactttatcgagaaagacgtaccgaacaacatattcttccggcgtggagtagtcggagattggaggaactatctgacaccggagatggcaatgaaaattgatgagatcatcgagatcaagtttgaaggaactggcttgttgtttcatccacagcttttacgacaaaaaggagaatag

SEQ ID NO: 101471 - DNA, 2271 bp, Oryza sativa
  Clone ID: PAT_MRT4530_99089C.1
atgcctggatggatcattaccttcctgctcatcctacagtttatttcgtcgctccgtggattggtaatcttcagcttcgttgctcattttttcctcgtcttcttcgctggactccgccgccatcaaccaaccggcgtgcggatgttcatcctgtggggagcgaaccagtttgcccgttgggctccggtcaccgtgctgggcacgctgtcagtcggcagcacgccacagaaagagcagctggtgacgctctgggtggcgttcatgctgctgcacgccggcatgcctgacaacttcaccgcctactccttggaggacaccgttctctcgaggcggcagcaggctggcgtgtggtatcagctgcttggatcggcgtcaccattccctttcctgctgaagaacatctccttcatcatcagcaatggcggcgacgccatgctcggggtctcctcgctcgtcttgttgatggccatcggcaagtattgggagggagcattccaagcgctgatgcagggcaacctgaagagcatgcaaagctcgagaaagaagatgaagatgaagaacaacagtacaaaatcagtacgaaacagcctccagatcgctaggcgtggaggcagggagccgaatgatgagcaaatccttctggctgctcatgacatgctagacatcaccaaggacgccttcatcgattttctggaccaaaataatgcggatgaacaagaagcactctctgctacatgggatgagaagctgtacagggtggtcaacatggagctctccctcatgtacgacctcatctacaccaaggcggccgtggtgcactcatggaaaggctacatcctccgtttcgcctctccgatcgccgcgacggcggcattcgtgctgttttggctccacagcaaggaaggtcaggcgacggccgacgtcgtgatcacctatgtcctgctggccggcatggtcgtcctggacatcaaatggcttctccgagcggtggcgtcgacatggttctactcgttccttgatgagaggccacgatcgtggcttcatcatgcacttctgtgctcagggaaatggcgactgatccgtcgcctcatcgtgtctgatctgaatctgtttcggatccttgacaataataagaagccaactagatacaggatgtggtcacaaaccattggacagtacaacttgttgcacgagtgcactcgctacgagagcgaggcaaggaccaagaactggaagagcggcatgttcaagcggttagcaccggaggagaactggatggagtacgaataccagcgcatgaggggcaatcatattgattcaagagatttcagggacgagttgttcaactctatctggcaagtcttgaagaaacccttcccacaacgacgaccaccacgacaaataatagtgacggaggcctggaggcctgcaccggcggctcctccatttacacatgctcatcaggaagcagaccttgccctgaagttcactcctgatttacaagagaccattcttatcttgcacatcgccacggacatattcctcttctcagcggaatcagaaattgaagcatcgcccaagtccaaaaaggatgtggaggtgatcaaggcgttgtcagattacatgatgttcctcgtcgcggtgcggcccgggatgctaccgggcctcgtcctcagtagccgatatgaagctgtcagtgaggctcttgccggaatatggaaggagaaagaaggtagtgatccttccttgcgtactagctcaatgatgagagagaaacgtcttgccgagatcctgattgccaacgaagatgaggagggaaattacttccaggtggacgattcgaggccccaaagcggctttctgagtgttctttacgacacgagtaatgttctatcagagggagctatactagccatgtttctgctacctaggataagaggtcctaattttagaaagaatatcattgaaaaagttggagaacacggcgacggcgagcccccaatactaaagaaatttcaccggcagtttccggatttgatggaattcgctaagaatgtctcttttccatcaatcgcaatgacgacggatgccatcatcggggagtgggcacgtcagctgattaacgtgtccatccgatgtacaagggattctcatgccaagcagcttgcccgtggtggtgagctcacgaccgttgtgtggatccttgctgaacatgctcgcatacttcgcatcaaaacagaaaagaaaccagctagctacgacgcagtatag

SEQ ID NO: 101472 - DNA, 179 bp, Oryza sativa
  Clone ID: PAT_MRT4530_9908C.1
tctgtttaccatggtttaaaccaagatagagtgcgcagttacattttctaccttagttgtcaattgcgaccgtgactgtgcacaatatcgtatagcttgactagtagactttaactacatgaaacgtgcattagtgtaaagatagaaagtagccaggccatagagaagtacacaaatta

SEQ ID NO: 101473 - DNA, 385 bp, Oryza sativa
  Clone ID: PAT_MRT4530_99090C.1
ccggccgggatgcttacttccacagcattgacgttgtcgacctacaacatctctctactgtccagatcatagtcatggaaattgctgtcgtgctcgctctggtcatcctcgcaacaagagagcgtctcggtgctgtttgctgcttgcacctatgagatagtgtcagcagtagtcgattatgctaccgatgatgaacccgtgcattgagttggtaacgcaacaatgcagtcctatcagcctaccttgtgagcagtcacgctggctacaactgggcacctgccacgcgatgcgctagcgatgctctccgcacatgatgtcgctgtgtctacaatatcattgccaggctatttgcaccacgatcgctcctatcatgctccgagtgcaa

SEQ ID NO: 101474 - DNA, 562 bp, Oryza sativa
  Clone ID: PAT_MRT4530_99091C.1
cgtgggcctgcaccgtcaccgaggccctcgctgatcgcatcgacgccaaagaagtggcaagaggcgctccagtgtcttccagatgctcaaggagcaacctttctatcatcccaaagagggcactttcatgaagctcctcctgctgctgggcaggtcaggccagccttcccgtgctcgctacctcttcgatgagatgctgcagcaaggatgccagcccaccccggagctctacacggccttgattgctgcctactgcaggaatggcctcctcgacgacgccttccgccttcttgccgatatgaaggcctctccggtttgccagcctgacgtctatacctacagcaccatcatcaaggcttgtgttgatgcctcaagatttgacatagtcgatgctatgtacaaagatatggctgaccgctccatagcgcccaacacggtcacgcagaacattgtcctcagtggctatggcagggctggaaggttggatgacatggagaaagtactctctgcaatgctcgacagcacaactagcaaaccagatgtatggactatgaacattata

SEQ ID NO: 101475 - DNA, 473 bp, Oryza sativa
  Clone ID: PAT_MRT4530_99092C.1
atggcatcagattaccaacagacatctgttggtaaaaataaacaatcattgatagactgtatgttagtaaaagcttttggcaaaccatatgtcagcaatactcatatgtcagcaatactatgtaacaagatatgttatatgttggcctttgctgacatatctgtagcaggctaccttgtgacatggaactttcggaataattacttgactggtcccattccaccattcatcgggaaatttacttcaatgcaatacttgtcattatctttgaatccactatctggactacttccaaaggaactaggaaacctcaccaatcttgtttcattgggcattggctcaaacaattttacaggaggccttcctgaagaactgggtaacttgaccaaacttcagcgattgaaagcatcagataatggattcaatgggaaaatacctgaatatttgggcacaataactaatttggtagaaat

SEQ ID NO: 101476 - DNA, 258 bp, Oryza sativa
  Clone ID: PAT_MRT4530_99093C.1
atggcggaggctgtggcggcgtggtcgtgtgcgcggaaacgcgggctgctctgtgcgacgaggcctagccaggtggtggccatcgcatgtgcaagcggcattgcgcggcgggaccaaccagagaccgtgggagggcggcgttgtgcaataagtccgggcggaagccaggccggcgtggacgctagtggtgccgcgcggcaggggcaggatgcgccgtgcgatagggtgaaggttggagccatgccacggcagggctag

SEQ ID NO: 101477 - DNA, 369 bp, Oryza sativa
  Clone ID: PAT_MRT4530_99094C.1
atggcgatgccgtcgtcctcccggatctgcgctggccgcgccgccccccgatccatgcctgccgccgaggaaggaggccggacggtgcgccatacggggagctctgcccggtgcggtctaagcttggaccgcgccactgcattgccgcctccggccccgatgaggagagatggaggcgtggagctcggtgccgccgctactccaccggcgctcgggcggcgacgtcgccgccttcagccccgacgaggagaggtggaggcgtggagctcggtgtcgccgccgctttgcttcgtccgtccaggagagagagtggtgcggaatgtaacgaacggtgagtgccccaagcgctttggtgatactccagtgtga

SEQ ID NO: 101478 - DNA, 174 bp, Oryza sativa
  Clone ID: PAT_MRT4530_99095C.1
cccgcgcacttcctagacgatgttgtagcacaatagcactatccgtatcccacagagaagaagctaggacggctctagctaccacacgcgggagatgatgtctatggtcatcgtctcaactcctacgtcatgcctaccacgatgctatcctacgacactatctgtgatgtccat

SEQ ID NO: 101479 - DNA, 1434 bp, Oryza sativa
  Clone ID: PAT_MRT4530_99096C.1
atggccgccgccgccgccgcgggggcgacgccggcgacggcgaggaaggccctgctcacaacaaccgccaccctcctctcctcctcgctcgcgcgcagccggcgcagcctctcctgctccgcggccgctgcctccgccgccccgcgcatcgcgcctcagccgccggacctgctccgatgggtgcagcgggagggagggttcgtgcaccccgccctccgcgtggtcgaccatcctgagcacggcctcggggtctccgccgccgcggccgagggagacattccccctggcgacgtcctcatcgcgctacccggccgcctccctctacgactccgccgccccgccggcgctgcggacgcggtcctcgtgcagctagcggaccaagtgaataaaaggtgtcgcttccttctcgagtttgaaaaagaagtgaaacataagcttggtacagtgcccttggaagatcatcctttttgtggacaagatgtaaactcatcttcccttggatgggctatgtcagcagcatctactcgggcattccgtttgcatggtgaaatcccaatgctgttgcctcttattgatatgtgtaaccatagttttaacccaaatgctaggattgtccaggaaggaaatgtggatagccctgatatgtcagttaaggttgttgctgagacaaaaattgatcaaaatgctgcggtaacactgaactatggttgctaccctaatgatttcttccttcttgattatggatttgtaataacatcaaattcgtatgatcaagtggaactgagctatgatggaactctcctagatgctgctagcatggcagcaggagtttcttcgcctaacttttcagctccagccaagtggcaacaggatatcttgtcacagctaaatctgtatggagagggtgctattctaaaggtcagcataggaggtccagaaatagtagatgggcgcttattggctgctttaagggttattattgcagctgatccggacgctgtgagtggccatgacctcaagactttgatgtctcttaaggagaaagctccattaggcccagctgttgaagcttcagcactccgaactgtccttgcactttgcacctttgctctacaacacttccacacgaagataatggaagacgaggccatactaaaaggagaaccacctcttactactgaactagccgtgcagtttagattgcagaagaagctgcttctcctggatgtgatacagaatcttagtcgcagaatcaagatgctagctctagacaaatccaccgtgtaggatttttcacgttttggaattgctttctcggacaatcaattaccctattgtactgattctggagatgacaataaagccccaaattttgtccaaaaaaaaaaaaaaaaaaaaaaaaaaaaaaaaaaaaggggggggggcctcgtgccg

SEQ ID NO: 101480 - DNA, 723 bp, Oryza sativa
  Clone ID: PAT_MRT4530_99097C.1
atggcttgccatcaaagatcttcaagtcttccttcagggcctcactcaactgtggccaaagttgaagaagaactccagggtctaaaagcacacatctcttcgccttccgtgaccgtcgccgcaatatgtgatggcttgaggaagcttggagatgtgtacaacagcatagaggggatcatgtgcttgcccagcaaccaagttggcctctccttgccccagcagaagcaaatggttgaggaagagcttgacaggtcccttgttctgattgatctgtgcaactccatgcaagagaacttatcagagctgaagatgagcatcctggaattgcagctggtcctcaagagaggagatcatgcagctattcagctcaagtttgagtcttttgttcgtatagcgaggaaggcgcaaaagcctttcaagaagacaggcagcaaggcaactgctgaatgttgcaatttggttargataatggctgaagccagagagatggctgtctctttgcttgataccacatcaggcctcttggtgaagaagattggtgcacccagttcaagcaaatggtctcttgtctccaagaggttccagaaaaaaaatgttgtttgtgatgaggaacagttgcaagcactagagcgtgaaattggagatcttgagaatggagctgagttcctcttcaggagattgatccagaccagggtctctctgctgaacatccttagctcctag

SEQ ID NO: 101481 - DNA, 246 bp, Oryza sativa
  Clone ID: PAT_MRT4530_99098C.1
atggcggcggacgccctctccggcggagatcgaggtggaagcggcgacgggaagggcgcgcgcggctacggcggaggcgatgcaagagtagcggcgctgcggcggcggaggcttctgctttgggtggaggattccaactgcgaacgctgcgccctagccgactccacccacgagacgtattctccaccgtccgatcgagcaatcagccgcgattttgctgatgtggcgctgacgtggcaatgttga

SEQ ID NO: 101482 - DNA, 1024 bp, Oryza sativa
  unsure (1)..(1024): unsure at all n locations
  Clone ID: PAT_MRT4530_99099C.1
ggagccccctctccactccaacttgagctctagctctcgcactcgcaagcaagggaaagcgaggcggaaggaagctatcgcctagcagcggagaccgggagatcgagatgtcggcggggctcgtgacggaggaggtgatggtggggcggctggtgcggatccggcggacggtgatgcagatgctgcgggacagagggtacctggtggtggagcacgagctcgccatgggccgccgcgacttcctccgcaagtacggcgagtccttccaccgcgaggacctcctcatcaacaagtacaagaagaacgatccctccgaccagatatacgttttcttccctaacgatgacaaggtgggaatgaaacacataaagaagtacgtcgagatgatgaaagctgagaacgtctccagagcggtattggttcttcaacagaacctcactccatttgcaaggtcatttcttcaagaattagagccaaagatccacttggaaattttccaggaagccgaattgcttataaatatcaaggaacatgttctcgttcctgaacatcaagtgcttaacaatgaggaaaagaagacattattggagcggtacactctaaaggaaactcagcttccaagaatacaaattacggaccctattgcaaggtactatggcctcagacgaggacaggttgtgaagatcatcaggcccagcgagacagccggcagatatgttacatatcgttatgttgtataatagcagaaaaatgagatggagagcaccataaatctggtgatttttgcaggtatacatacatgaccatatgcttggagaaatcatatttctaaggagaagccatgttaatgatcccatggctgttatgtaagtgaattctcgtgagttaagcatatggaccatacataattcctcatgttgtacactttgtttcaagaactgtataaacagtacagaataaaaaccccagttttccgaggctcaaaaaaaaaaaaaaaaaaaaaaaaannactcgagactagttc

SEQ ID NO: 101483 - DNA, 1010 bp, Oryza sativa
  Clone ID: PAT_MRT4530_9909C.1
cggacgcgtgggcggacgcgtgggcggacgcgtgggcggacgcgtgggctgtgccattcaagaatattgtctacaatgtaaagatatagagcactgtcgtgccgaaattagggattttgatgcttttgatttgcgattgaggcttcctgctgtgattagcaaactgcacaagcttgtcaaccataatggtggggtaacatatatacactgtaccgctggacttgggagagctcctgctgtgacattggcgtatatgttctggattcttggctacagtcttaatgaagggcatcagctactacagagtaaaccggcctgctttccaaagttggaagccattaaattggctactgctgacattctgacaggcttatcaaagaattccatcactttgaagtgggaaagtgatagttgttcttctgttgaaatttctgggcttgatgtcgggtgggacagataattcctttgacatacaacaaggagaaaagagcttggtatcttgagagggagttgcctgaaggaaggtatgaatacaaatatatagtggacggcaaatgggtgtgcaatgacaatgagaagaagaccaaagcaaatgctgatggccatgtgaataactacgtccaggtctccagggatggtaccagcgatgaagagagagaattaagggagcgtttgactggtcaaaatcccgatcttacgaaggaggaaaggctgatgattagagagtacttggaacagtacgttgagcgatagagaattgacattggattatcgactcgttttgggctcgctgtgcaacagggaagacctgctgatgatcaacaacagatcatggagcttcccgatgaacagagtagacggagcttccaaatgttatcatcttgggtcgccatgtcaatactattaattaattagttcaaatcaaccctgtaaatgggttactcatgagtaatcacgagtcgtcgctgtaaacaaacgatgcataagacgagcaatatgcgtttgctcat

SEQ ID NO: 101484 - DNA, 130 bp, Oryza sativa
  Clone ID: PAT_MRT4530_990C.1
gtcatgcagtagtgcgctgcagaacgaagagcagatgattgccctctagtcagtgggtcacctcggagagcctcccctctccatcgcctccagggagacctccttggccggagttaccaggttgagcttg

SEQ ID NO: 101485 - DNA, 330 bp, Oryza sativa
  Clone ID: PAT_MRT4530_99100C.1
aatcaaagtatcaacccagtagtactatgattatatattaagctctaccaaacaaatctgagaaggttccagaccaagacaggaaatatatggctgggattgacaaggcaacactatgctacaaagtacaaaggatcacactacagaaacgaccaagtgcttgacatgttctccctcattggagttgacaacccagacaaacaacaggaatacatgatttaaaagaatctgaaacagggaatgtcaacaagaacacgtatagtagatcgcctcctatgaactacagatagctttacgacctcaacgactggaaaagagcattcgaaaacg

SEQ ID NO: 101486 - DNA, 1101 bp, Oryza sativa
  Clone ID: PAT_MRT4530_99101C.1
ccacgcgtccgggaagaggatgctcgggttcaggtcgcagacgccgtggtcgggggcgggggcggagccgatttgcggcgacgcggcggcggccgtggtggcggcgcggaaggggatggagacgccgctgacggcggtggcggaggcgttcgaggagctggcccggaggatggaggccgacggcggggagctccgcctcgggcccttcggcgacacgtgcgcgctcgtctccgtcctcttcagctgcctcggcatggccttcaggttcgccgagatcgagtacgtcgccaaggtgaacgacctcatcggagcggcgaagtcgtacggcacgctgaacgacatcctggacaaagacgtcgagaacgactgcgtcaagaagcagggcagccactcccgcaacctgcgcagggtccgcctcggcctcggcctcatcaaggttctcttcgagcagttcctctccacccaggaatgttcgctgtatgatgctgctacgacagcttacgggcaggtttgcgcgccgtttcacagctgggcggtcaggaaggctgttggtgctgggatgtacactcttccaagcagggagcagctgatcgtgaggctcaacgaaactgattgctccgtgcagaaggagatgaggagatacatcgatgcctctagccctatcatagactacatcgacaaccttttcctctcgaggagcattagcctagactggtggaggagatgaaggcgccttaggttaggaacgacgtcaattggttctccggtgaccggacatgggatcgatatgggttggaggagtcggggaagggagggaggtggaggatggcgatcagctcagggaaagatggggaagaaaacggatctgagaaatggatctggaaaacagtcgtgctctattatattgagtcattccgttagtattgttcttttcatagctattatgtagccttgggtgtggttgtctggtggatgctcaccctgactcccttcgcagagtcatgtgtaatgtataactgtatggtgattcagtacgatcatggataacctgttttgccagcgattgggcacagaggaaaggtggttggatggtgctatgtg

SEQ ID NO: 101487 - DNA, 659 bp, Oryza sativa
  Clone ID: PAT_MRT4530_99102C.1
ccacgcgtccgcccggctgtggctgtaagtcgagttgagatcgaacctttcccctcgtccgactggtctacccagagaaaccctaatactcgcagatccccttcgccttcatacacctccatccacagctgatggctaccatggggtctgcaccttcctatgtcgtgctggaccgcgtggttcatctggacaaggaagccgtcaaggaagaatcggagtgggcgatcatggagtgtagagatcggaagacctacctgcgcaacgaccacgtcggcgacgaggtggtgtatggcttgtcactcctagtgcagatcgccgagccgccggatctctccaagctgtccatccgcctcagcgaaccccccgtgcaagtcgccgcccgaccagaggagatcctcgacgatggctcctccgtcttgcagctcttggacttgcctaaacgggccctcaacctgcacacctccgtccagtccgtcgccgacgacctcatcgtcttcacctcctgcctccgcaatcgcacccaccgctacctagtctacgacgccatcggcaagtcactctccatgatcccttgcctgcccaaccgttggcgatccctctggcacgttccagcctctccctcttcgtgccggcgccggcggcgactacaccattgccct

SEQ ID NO: 101488 - DNA, 227 bp, Oryza sativa
  Clone ID: PAT_MRT4530_99103C.1
ggcacaatccataacctctcgcgagagcaacatcctgaggaaggggataggaaggaaggatatctcctatctctcctggggtggtgggtcccccgtaagcaatcacctatggaagggctctccattcaacacgccctcccgggaggccgacttccctcccccgaacgggcttcattggaaaaactccggccgccgaaaccatgctccccccttcctccccgtccaaa

SEQ ID NO: 101489 - DNA, 387 bp, Oryza sativa
  Clone ID: PAT_MRT4530_99104C.1
ctagtggcgcgcgcgggaatgcaatttccccatctttatcttactagggcgcctctccaaccttatcctcctcccagagtaacacctttcacgcatcccttttccctttctccgcgtcggcgcgtccaaatcctcccgctcctcctccccttgaactcctcgccggagcaacggatccaccggctctgacgccgacgaacgcgggtcagctagatccagcgccacctgctccatactcccccgaatattccacttacgagccctgccgccacgtctggaggtcatgttccccacttcggtgctgccgccgtacttgcggctctcccccctcttccagactgccggcgatgagtccggggcagccagatccagcgccacctcacccat

SEQ ID NO: 101490 - DNA, 219 bp, Oryza sativa
  Clone ID: PAT_MRT4530_99105C.1
atgccccctcgccgcccatttgcaggcggcccccccccacagtacaaaatcgtcctagcggagggcggcaagggggccgcctccaaaaatccatgcccccccttcgccgcccatttgcaagccggcctcccgcacagtataaaatctgccctagcggagggccgcaaggggggccgcttgcaaatttcgttgacggccgttcccccagagcgaacgggc

SEQ ID NO: 101491 - DNA, 173 bp, Oryza sativa
  Clone ID: PAT_MRT4530_99106C.1
gcacgagctcgtgccgaattcggaacgagtttctcttaggagcctgatggaattggcgggaaccgccccatggcgatctctccccttcaccaaatccggaaagagggaaggccgcgacagcccatcgacccggggtggtgcccccgccccaccggcacctgtctctttatttt

SEQ ID NO: 101492 - DNA, 467 bp, Oryza sativa
  Clone ID: PAT_MRT4530_99107C.1
gaaccgatcttcatttggtggaggattgtttattttgttcttattttatgagggattctcatttgttttctgagcaaactaattttgggaaattatcaaaacggtggcacaacccccttggggaaaagcgttttttttgggagtaaaaacttttttagaagggggagcggtttagttcccccccagccttgcgggtttgttttaaattgccctgttgacaaccacaatggttaatgtttgagaggcttttttaaggaagggggttgcgattttttccaccttttggaggatggaggtattgttggtgtcaatgaaccagataaggcccaacaccccgtggggattccacccctgggggttgttgtttatgatgggggtgaccccggtgctctctgggaaaattcttttgccgaagatggccatggtgggcccctgaatcaagaacattgcaaataagattgccccgg

SEQ ID NO: 101493 - DNA, 3174 bp, Oryza sativa
  Clone ID: PAT_MRT4530_99108C.1
atgtcgtcgtcggcgtcggagcagccgcgcggggaccaggtgtggtcgtcgtcgtcgccgccgcggtcgtcgacgcctcccccgcagccgctcgtggggggcctgatcgagtcgctctcgttccggagctgcgggttcggccgcgccgccgtctccgcgttcgagaaggaggacctccgcgcccgcgccgcgctgccgcagcggctccgggccgcggtccacgcggcgctgcgtgccaaggacccctccgcgggggcgttcgcctacgtcgccggcaacgcggctgcccggggtgggcgaggaggcggcggcagcggcggcggccgcgaggtgtcggcggccaacccgtggttcgaggtcgcccacgacgacgcccccgagtcccccctcgtcgcgttcgtcaacccccgcagcggcggccgcctcggccccgtcctcaaaacccgcctccaggagctcatcggcgaagaccaggcggcgctggtcacgtcggggtggctgcggcggagtgccgacctccacaacgcgctcatccgggcgctcgcggggtccgcgcgcccgcacctcgcgctcccgctctacgcgcacctcctccgcgcgggccaccaccccaccccgcacaccctcccctccctcctcaagtcgctcgcgctctcccccgccgtccccggcgcgcggggcctcgcgctcgccgtccacgcccacgccgtcaagctcggcctcgcggggttcctcctcgtgagcaacgcgctcatccgcgtccacgcgggcatcctcggccggctctccgacgccctcgtgctgcttcgcaccgcggcttccgtcgacgcctccacgttcaacacgctcatcacggcctacgcgagggccggccgggtcaccgacgcccgcgcgctgttcgacgaaatgcctgcgaggaatgctgtgtcgtggagcgccatggtgaatggctacgtgcaggctggggacgggagggaggcgctggggttgttcgcacggatgcaggccgatggtgtccgcccggatgacacggtccttgtcggtgtgctcgcggcatgcgcgcagcttggcgtgctggagcagggcaaatgggtacatggttacctcaaggcaaataacattaggatcaccgtgtttttgggcactgcattagttgacatgtatgccaaatgtggtgagatgcagctcgccatggaggtgttcaaggtgatgaaggaaaagaatgtgctggcttggaccactatgataaaaggcctggcaatgcatggtcgaggatcggaggcattggagttattctcccagatggagagattaggtgtgaagccagatgacattgccttcattggtgcattgtgcgcatgcacacacactgggttggttgacaaggggcgggagctttttgattctatggtgaggaagtatggtatcaaaccgaagatcgagcattatggatgcatggtggaccttctggcacgaaatggcttgctcaacgaagccagagagatggttgagaaaatgcccatgaaacctgatgccttgatctggggtgctttgatggctggctgtaggtttcataagaatgttgagttggctgagtatgttgtcaagcattggattgaactggagcctgataaaagtggcgcttatgtgcttctgggtaacatatatgctgcctctggtaggcatgcttctgcaagggaaattaggcacctaatgcgtgagaagggagttgataagacaccaggatgcagcactgtggagattaaaggagttattcaccaattcattgttggagatctgtcccatccttttatagaaaagattttgtctaaatgggatgagattgatagtaggataaggttggaggaaggttatgtgcctgataagaaggaagttctgcttgatattgaagaagaagagaaggaaaatgcactcagccgtcatagtgagaagatggcaattgcatttgctttgattaacacaagtgatgatatgcccattcggatagtcaagaacctcagagtttgccatgattgccatcatgtcaccaaacttatatctaaagtttttgatcttactgttgtgaagccttctgactttgtgcaatatgttttgggttgcttggaacaacttgctgacgctggtgatcacagtgcaaagtccattcgccataatctaagagtcatggttgcaggaggtgatggtacagtaggttgggtgttgggatgtttaggagacctttatgttcagaacagggaaccaattcctccagttgctgttataccacttgggacaggaaatgatctttccaggagttttggctggggtgcttcatttcctttcggatggaaagcagctgctaaacgatctctgtacaaagctatttttggttcagtttcttgtttagacagtttgatgatgatacatcagtatttttgttatgttaagaaaccttatttgagctggttaagtccgcatagttggcatattgttgtttctatgccagaacgaggagatgaagaggaagaactggattttcctcactcccttaggaatcttggagagtgtaccttttatgatgacggcactgctgaaggggagttgcctgaaacagtttcttgctttgatggcgtattctataattacttcagcataggtatggatgctcaagtggcgtatggatttcaccatctacgggatgaaaagccattccttgctagtggtcctttatctaataagttaatttacgcagggtatacctgcaagcagggatggttttttacacaatgtgtcagcgaccctgaactgagggctattgttgcattaaaccttcacaattatgcaagtggaaggaatccatggggaaacttgaagcctgaatacttggaaaagagaggatttgtcgaagctcaatcagacgatggtcttcttgaaatatttggattgaagcaagggtggcatgcatcccttgtgatggttgaactaatatctgcaaagcacatagctcaggcagcagcaatacgattggagatcaaaggtgggcaatggagggatgcatacatgcaaatggatggggagccatggaagcaaccattggaccacgagtactcgacgttcgtcgatatcaagaaggtcccttacccatctctaatcatcaatggtggggatcgttag

SEQ ID NO: 101494 - DNA, 670 bp, Oryza sativa
  unsure (1)..(670): unsure at all n locations
  Clone ID: PAT_MRT4530_99109C.1
ccacgcgtccgggaagaactggattttcctcactcccttaggaatcttggagagtgtaccttttatgatgacggcactgctgaaggggagttgcctgaaacagtttcttgctttgatggcgtattctataattacttcagcataggtatggatgctcaagtggcgtatggatttcaccatctacgggatgaaaagccattccttgctagtggtcctttatctaataagttaatttacgcagggtatacctgcaagcagggatggttttttacacaatgtgtcagcgaccctgaactgaggggattgacgaacattattcgtttatcaataaagaagttggacagctctgagtgggagaacatccctgtaccatcaagtgtcagggctattgttgcattaaaccttcacaattatgcaagtggaaggaatccatggggaaacttgaagcctgaatacttggaaaagagaggatttgtcgaagctcaatcagacgatggtcttcttgaaatatttggattgaagcaagggtggcatgcatcccttgtgatggttgaactaatatctgcanagcacatagctcangcagcagcaatacgattggagatcanaggtgggcaatggagggatgcatacatgcaaatggatggggagccatggaagcaaccattgg

SEQ ID NO: 101495 - DNA, 846 bp, Oryza sativa
  Clone ID: PAT_MRT4530_9910C.1
atggttcgtggcgggagtcgccgatcaaacactgtcaaaaccgcatccggggcgtctacttctagcgccgagagtggcgcagtggaggcgggcacggagaaatccgatacgtacagcaccaacatgacgcaagctatgggagcagtgaatagttgtattccatccttaaccagttcagatattttggagttgacatctgtgccattcaagaatattgtctacaatttggcgtatatgttctggattcttggctacagtcttaatgaagggcatcagctactacagagtaaacgagcttgctttccaaagttggaagccattaaattggctactgctgacattctgacaggcttatcaaagaattccatcactttgaagtgggaaagtgatagttgttcttctgttgaaatttctgggcttgatgtcgggtggggacagataattcctttgacatacaacaaggagaaaagagcttggtatcttgagagggagttgcctttattgatttgccatatctgttacacagttggactcgattttacagtagctaacttcacactcacttttccttatacatttgccttgtgtttcccgaaggaaggaaggtatgaatacaaatatatagtggacggcaaatgggtgtgcaatgacaatgagaagaagaccaaagcaaatgctgatggccatgtgaataactacgtccaggtctccagggatggtaccagcgatgaagagagagaattaagggagcgtttgactggtcaaaatcccgatcttacgaaggaggaaaggctgatgattagagagtacttggaacagggttttgctgattatgcttatgcatga

SEQ ID NO: 101496 - DNA, 612 bp, Oryza sativa
  Clone ID: PAT_MRT4530_99110C.1
agccgggccaccatgacggagtacaccaggcgcgttgcgaagccgggggccaaggaatgtgaccggcccagcttcctcgcggcgtccacggtccacacggtcagggtcttcgccccaaagatgagcccaaacgagtggacacgggccccacggcggcattgctgcagcacgaagaggacgaggtttggcactgagctggaggtgcggatacgatactgcggccgaggagagctcaccacgccgtagctctctgccgatgatcccgccgcagttttgccaacagcacggagggctagatgccaagattttagtagcggctagtgccatgacaccgaactgactgaagaggacggcagggtgaaacaccgtatttcgctgcggatttttggacagattctggtttgtcttcgttgtgcacgtacaagtgattatacggctcgtcaggccgcagacacatgctgacatgcatacgcatgattgcataccccgggtaacacagtaatccgtttggctcgagcgctctttttctgtaaagagctgtaaagggagtggtgatcagacttaacgatttcgaaaaaaaaaaaaaaaaaacagagcggccgccctcgtgcc

SEQ ID NO: 101497 - DNA, 599 bp, Oryza sativa
  Clone ID: PAT_MRT4530_99111C.1
tttccgttaaccaccaattaggattcactgtatactcatttcaacttttataatgtttgccaagattttaacccacaatttaatttaaattgcatgcaaaccaccatttattaattgaaccatctgatgttagatttacctttgaataaaatggctatacgaccaataaagtaactttgaacaagtaagaatacaatgcactagtggcttaaggatcttaatgtttgagatgagctaccacaatctcgtgatgaactcaatgacttgttgctgcccagggcaaaaatgtacaaatgacatgccaatgccgaaaactgattatgagttttgatgagggtgaaaaaaaaactgattgagtttgatggtgatgattgaattgaatgttgatgatgctgaagtgatgctgatgcactggactgggaaatgatgatgcctgaatgaaacctgtaacaaccgtgatgaacatggtgattttgagcatcactggttggaaagcatcagcagcagcctcatcacctcatcaagcctctgttcctccttcctgcctgccgcaggacccaggaaaacccaaccatcaccccccaaaaaaaaaaaaaaaa

SEQ ID NO: 101498 - DNA, 186 bp, Oryza sativa
  Clone ID: PAT_MRT4530_99112C.1
atggcgcgtatggatgatggagtcagtaacccgcttagggtttccatctgcgccctttatatagagctaggaccaccggtgcctagatgcatgggcctagggcacttggcccatcccatgtcgtgcggcccaaaggccgagcgcggatttttcgtcaacagagtgatgaaggaagccttgaggtag

SEQ ID NO: 101499 - DNA, 436 bp, Oryza sativa
  Clone ID: PAT_MRT4530_99113C.1
ggaggaaaacagcccaccgaaacattgacaacgtacgggggagggccaaaggccgaacaaattttattacaaaggcaacccaaagggggaggcggggggttcaaacgggccctaccctaaaggcaaaacaagagtcccccgggcaagggcctaacaggagaaaactaaaaaccttttaagcatcagcaaaccccatttcggaaagcttggggggggcccccttggagtcttaaaaaaaagccttctaatttgcagaaaatttttcaacaagggggcggaaggcagggccactcaaaagggctttgtcactaagaagctaaaaaaggccctccttggcaccactaaaaagctccgggaagaaaaagttgtcaaacggcaaagggttttttggccaaggtccctaaaaaccaaatttttccttggggcaccttcccag

SEQ ID NO: 101500 - DNA, 480 bp, Oryza sativa
  Clone ID: PAT_MRT4530_99114C.1
aattcggcacgagctcgtgcsaattcggcasrggacgactacccagcacactacatbctggctacatttatctctcgtgtaaacaacatcttgtggcagttaaggtcgtcctctctcgagaatttcatagtaaaattccctctccttgggagagatgcacatcacattgacagatgggttagcttttctgctgcttcaagagctaggcaaattgttctttatctctgtccagaagaagaggacactgacatgaatgacatgtacagtttccccctgcatatcttctctggcgacaattgcgtcastctctctccctagggttcgtctccctgacactgcctcctcatctcagtggcttcacaaacctgaagragcttgggctgcacatggtgtccatcaggggagatctgcagtgcctgctctccagtgtgatgttatggagtggttaagcctgacaaagtgttcattgcaacatcgaag

SEQ ID NO: 101501 - DNA, 523 bp, Oryza sativa
  Clone ID: PAT_MRT4530_99115C.1
tataggatagctggacgcctgatgtaccgctccggacttaattggctgcgaccgaccgcatgccgttctgtttcctatcctatctgaccatacacggcacattacctcggatggcctcatgctgggagctggaccaataacaattgccaccactgtcacgatggacgactccagccttacaaagaccactgctattttcatggaccttcctacgatgccaccttcaaaatattctgccaagactactaagggtactgacaagcctgacgctacgagaacagctcgctttgccatactaacccgttctaaaagggctaacactgacacaaggacatgcgctctagccacctgatcaatgtctaacagggctaacgcttgttaagactgggacacaaggatacctaatctcctgataatggaataattctgacttgcacaagcggaacggttaccacagcgacactcgagagaacttacgaaatgagctctatgacatgagattgaacatgagaacagaagctgc

SEQ ID NO: 101502 - DNA, 339 bp, Oryza sativa
  Clone ID: PAT_MRT4530_99116C.1
atggaggccgagcggcatagggggctcgtcaaccttccctcctccctccttgagcttctcgctgatgcccatagccaccttgccttcctcttcctcaacggcgcaacgagtggcacggtggtggcgatggccacagcaaaagaagcgagggaggggaatttccactggcgctcgccaacgagggagctcgaggagggaggagggatggccgggaggaagaagggagaaggaggcgccaccatccgtggagatagagaggagtgccacgtaggacgaggatcaagtcaaaccagccacgtggacgtcacatcagctgaaattactatccaaaccatttag

SEQ ID NO: 101503 - DNA, 2010 bp, Oryza sativa
  Clone ID: PAT_MRT4530_99117C.1
atgcatggatcgaaccgaagaaaattggttatggaggtgagagttgaggacgtgaactacaacatcatggcagacgactacagtaaattcatcgaggatctccggaaaaagctcgccaatcatccgcataaggagatgatccatgatgttcccgtgctggcaaggcaacaatctcctagacagccggctaggtggatgtatattaatctggtgggcaggaagaaggacagggcaaccgtagccgttcgggatgacaatgtctaccttatgggcttcaggaacatgaacggagaatggtttcacttgggcttttcgaagtggagcgtgcccattcttccggaatcatccaagtttttagaatgcgacgtcgcttatagaaacttacttgatgtaccacaaggagaacaggtcatgagtaggttggtggaggtggagctgcggaagacggtggtgctagatgccgtccataggttgtcgcgctacacacagcgagggcaagatgatcgtattgatcgattcaccaaacgggatctggcacgcctgattatcgtgatctgcgagtctgcaaggatgaggccacactacactacggtaaacaagggcttcgttcacgacgagacaaccagcctcaccaagctgcacgtattctacttgtggaactgggggcttatgtcacgggcgctgcgccaaggctggcggccatggcccatcagacttgttgaagatgcccgggcagtagtccaactgctgctcaacgctgcggccgcgatgccgttgcgaatgaccgaaacggaggctgcctcctcgtcctttgccaatgacatgccttttgcctcctcggcctttctcgatgtcatgcattttgcctcctcgcccgatgagatggcctttgcctccttgccctttctcgattggatggattttgattactccaacactaaagctaaagccactgaagcaaacgagcagcctgcagccatagatgacatggcgccagtaaacgacgaggagcccgcagtgacgactgatgacttggcttgggaataccatgaggagtcggcagcgagcgatgacattgatgacctggcgtccgaagaccatgaggagtcggcggcgtccgatgacttcgcgcccgtagtcgacgaggagcctgcagcgacggattacgaggacgaatttacaggtcaagtccatggccgacgattagtggagttgttggccgtgagttccgacttcgacagctttatgataagtatctttgacgggaaacgtggccagatcgtctacaatcaccaccaaggacatcatactgtcatccacgactctcaacgcaatttggtgctgactggaccatatagggccatctcagctgacgggagctttctaattgaagttgataccaacaatgaggatgtccatcctgataagaaaagaaaaaacaatgagagcgaggtctcatctgatgatgttgatggcactctgttctgggacagctataacgattacaactacactaggtctgacaggatattggctcacactatcaggacaagccttggccccgttgaggtgacctacgcggtgctgaccaacgccgtggaggccaccgtgcaggtcaagctcctgcttctcactggagacggcgccgccacgtttgctggcagtgacaccctcttcgtctacggtgacatcacggtgcgcagccactgcttcgacgtcgcgagcatgctcttcagccatggctcgcagaacaaggttgcagtggcactcacctctgacaccgcgaccattccactgtcgcggtgtgttgttgcggtgccactccaccatcgggttgagatagaggcgaagctgtatgttgaaacttccaacgaagaagagagtatcaattacacttgtttccaaggtaagctggacttcgccgccggccgtgaccagcagatacaacagatatcccacggcgacaaccctgcagtggttgaagtcacctggtcgccggacttcttttga

SEQ ID NO: 101504 - DNA, 363 bp, Oryza sativa
  Clone ID: PAT_MRT4530_99118C.1
atggtggcgcctccttctcccttcttcctcccggccatccctcctccctcctcgagctccctcgttggcgagctgccgccaccttcaaccatagcagccgagcatggaggccgagcaccaccgcaccaacaacatggaggcctaccgccagtggaaattcccctccctcgcttcttttgctgtggccatcgccaccaccgtgccactcgttgcgccgttgaggaagaggaaggcaaggtggctatgggcatcagcgagaagctcaaggagggaggagggaaggttgacgagccccctatgccgctcggcctccatgtgagtgccacgtcactaccacataggacgaagatcaaatcaaactag

SEQ ID NO: 101505 - DNA, 2108 bp, Oryza sativa
  Clone ID: PAT_MRT4530_99119C.1
tttttttttttttttatagaaagttataaagcatagtaaccatttaggatagtttcagcaaacaaacattgcagaagcatttctcaggcgtcataacttgccatgacactgcctccaaataagtaacatatatcaaatttataacattcttatccggaaaaaaataatgtccatccaaggaaacactgcctatgtaagcgctgaagcattacacaacttgactatttatgcccgtatatcaatgaaaaagagatgcagccttcaatccagtcttggttccataagcaatatttcaaagcctctctccagacacatacaacagacagaagtactgtgtcctacaagttcctttgggaaaagagtcactcactaatattatcacttggcaccgtcccttcatcaacactctcaactgcagcagcaatacttgcctcagttccagcattatccatgtagcgaaaatctggataatttctgctgttcaacgaatgcaaccagagagctacagctccctccttgtgctccattgcagcgatatgagggaatatatacttgagcttaaactcttcagcctcctcagaataaggttccatagaaaccgcctcatgtgaatccttccatttcttgttatatgaagtgaacatgcattcatctaagtacagcccaacctcaggcgcagtaggcacattaagattgacatccttgcggaacgctacatcatagattgactcaggagcacagttcctcatcacagcaacagcaaggccaatcatcttcctaatctgatggagcatgaaactctgcccaacaacctcgcacctgataaaatcaatcccatccaaattcactacacgatcagcagcaaaggaaatgatgaaccttttggctgcaggatcctccgctttagttctggtggtgaagttgtggaaattgtgtgttccaacatattttttgagaattctattaaacctctctttgacttcatgagtgtaagaaaatgcacttctcaggggcatctcttctagactgctgccttcataatccacatcttgtttcttttcatcttcagtaacaacatccatagcttgtttctttccatcttcagtaacaacagtctcaatactacctttcttttcagccacaaatgaaggatcaacatcaactgaatctgaattcgtgttggaatctgaattcaggatggggcaaacagtctcactattgctagctggtacagcttcagaacagagagtaccacctgacagttgaacatcacatttttctgcaccatttgatctcatttcagtgatttgggtattggtttcattatcagggataggtaaatcaacactacgatcgccagtgcttgcaggatcacaatttgcatcctcatttgaacccactgcagcttcctcccgggaagcctcaacagatttctcctcctgaagggcaggatcgggtaccttaccctcccggcccatgacaccgggcaccttcctacccctctctgagcactcaaggcacttcgtaagctcgctcccactcccaacgctcgccatgacggcctcacggtcggggtgcgcgctggggtcgagcgcgaacacgggcagcaggtacacatacctccggcggtcgcagaacttcttcgcgttgaacgagttggtgacgcggacgtagccgaaggcgcggatctggggcgcgagctgcgcattcaggcgatcagtgaagacgggcgggtcgacgtagaagcggccggagacgacctgcgccgcggcgctgacgcccttgtcggtgcgcgccgcgcgggcccagtcgtagcggcggggcgcggcgcggtcggcctcgggcacggcgccggcccggtagagcgcctcctccaggtccccctcgatggtgcgcgcgcccgggttcttctgcatgccctggtaccccgcgccgcagtagccgagcaggatggccaccttgcgacgcttgtaccggggggcgcggggctgcgcgccgtcggcgccagcggcggaaggcgaggtgggctcctggtcggggtcggaggaggaggacatcttgcggcgcttggggtgaggcggggaggccggtggcgaggcggcggccat

SEQ ID NO: 101506 - DNA, 1055 bp, Oryza sativa
  Clone ID: PAT_MRT4530_9911C.1
gcacgaggcatacttccaacttcttgggccttcgacttcgcggttgccatcgcgcggtctagatgagtgtctgcaacgggacgacatagcgccctgtcgtgccgaaattagggattttgatgcttttgatttgcgattgaggcttcctgctgtgattagcaaactgcacaagcttgtcaaccataatggtggggtaacatatatacactgtaccgctggacttgggagagctcctgctgtgacattggcgtatatgttctggattcttggctacagtcttaatgaaggggcatcagctacaacagagtaaacgaggttgctgtccaaagttggaagccattaaattggctactgctgacattctgaccggcttatcaaagaattcaatcacttcggatctcgagggattgtaccagcgatgtagtgagagaattaagggagcgttttattgggtgaaaacccgatattcctaagaaggaaaagatgatgataagagagtagtttcaacagtacgatgagcgataaagataagttgaaatttattcagactactagtattgtgttgcaggggttttgctgattatgcttatgcatgaacatatcattcggattggactgcactaagctgcagaattgacattggattatcgactcgttttgggctcgctgtgcaacagggaagacctgctgatgatcaacaacagatcatggagcttcccgatgaacagagtagacggagcttccaaatgttatcatcttgggtcgccatgtcaatactattaattaattagttcaaatcaaccctgtaaatggtttactcatgagtaatcacgagtcgtcgctgtaaacaaacgatgcataagacgagcaatatgcgtttgctcatagtaacactgtggccgtataacaaggtagaattaataaggctgttagactgtaataagggctgttaattaacataacaggttacaaagttgtgtaacatatatgttattaatgctgactcgtgaatggaagacaaattaattttgttacggacaaaaaaaaaaaaaaaa

SEQ ID NO: 101507 - DNA, 225 bp, Oryza sativa
  Clone ID: PAT_MRT4530_99120C.1
tcaggttgggagcaaatttggggagaacacttcaagatgggggtccataatctctgatgggcaggttggcaaactcagcgacattcttcctggaccagcagctgggttcttctcatctttcacatctggggctcgatatgatccatagtcactgtttaatccttgatcttcaccccatccttttacgtgccgtgcctcgcctcgactacatcgccccgccgccat

SEQ ID NO: 101508 - DNA, 336 bp, Oryza sativa
  Clone ID: PAT_MRT4530_99121C.1
atgcgtcagcggttagaggcggcctgtgctgccaacttggccactttgcttgctaggccggcgcatgggcttggtgagatttggttcggccagagggagagggaggaagggaggccggcaggaagaggcaaactagacttcgcgatagagaggaatggtgtgacaacacctctagctaccgagcatgcgtcgacacgcctctttgaccgccacaccgacaaccgcaccctacttgccgccttcgccacatgtcaccactatgccaccgcctcgctcactatcgcgacgtctacaccgaatcgcatgccaccacctgtctcgcacgtctacatctga

SEQ ID NO: 101509 - DNA, 1932 bp, Oryza sativa
  Clone ID: PAT_MRT4530_99122C.1
atggctcaggaaggcaatgaagacactgatgacgattttgatatcaatgatggagaaagcaatgaagacactaatgacgatgttgatattgatgatgaaagcaatgaagatactgatgttgatattaatgttcgagttgaaaatggagcacctgaaacacgtggcaagacaaaactgaaagatgtttggaacctttcgacaaaactgaaagatgtttggaaccttccgaaagggcttagaattgtggttcaatgcaatgatctcaatcaggcggtaggggaagaagctggaattttgggtaaatttcttggaatggtagctaggaatggtagtctgtgtagcttaggctacacagactggagatatgtaataggaaagagagagaaaaatacaaatgaactaaaagttaaaaaggacatacttaagcaaatgagattcctttatgctcctcggatggaagagttcatattaaaaaaaattgtagaaagatggtggcaatataaagcaaaactaaaagatttgtattttgatgtgaatgagactaaggaagctaattgcaacaatgtcctagaaggtgtgctttctgaccagtggattgctcttgtcaatcattggatgaacgagaaatcgaagagacaaaaagatcctgcaaagaagaaaccacatagagctgttgtttatgtccacacacacaagcgcaaaagtgacaagaatataaatgggcatgtggataatttgaagagacttatagctgaacaactagctttagcggatgctagtaaaggaaagactgcttggaaaggagatgcattgaaccaaatactaggagatgacaagcctgggcgtgtgcatggtcttggactagttccaaagcctaaacaagtgcttgatgtgccaacttcccgacgtttgcagaatataaatcttactacagtggaggataactccagtgaagatgtaatggctattagactgcagatggaaaagttagaacgccatgttgagaataatgatgctgaacttttacaattaaaagagaaggcaaccaagttggaaaaggcacaaaagaatcagagagtgtatggtgacaacccctcgcaagaaatttgtatgtttgaggagggaaacattatggatcagcaggacaacagtttgatgaatacacaaagccatgtgcacgatgagaatttgcaaccaccaaccaagcattctactgtttacaagaatacacagtctttgggccagaatcacagtgggaagcaaaggaagattacttcctgtgcaaacaagcgcaaaggaaatttggaccagaatgagcttatgcaaccagggaagagtatttctagtgcatacaagaacaaagagaaccttacccgcaagcttgttagaccaagcctaaacaagtatagtactgcttctaagaaacgacaatgcaacacaatggactttttaactgacaattcaacagtgaaagtgtatggtgacggtcccttgcaagaaatttgtcatgttgagcaggaaaacattgtgatgaattcacaaagccatgttcaagatgaggataagacaccaccaaccaagcatgctactgcacacaagaacaaacgaacctttggcctaaatgaccatgggaaacagatggagattatttgtgccaagaaacaacagtgcaacaaaatggactttatcactgacaattcaatggaggttggaactaaagtattcttaaaaagttggaaaaatcggaatacaaacgtggctcttgccactattgtaagctgtgatccaacacacagagttggaggtgttgagctaggaaatgaatttttaatggttcatgtcgatcttgcattggcaaaatccgaagatttgattaggccatacaaaggctacaaaattgttggtcatgttgtaggacttgaaattgcgtag

SEQ ID NO: 101510 - DNA, 2226 bp, Oryza sativa
  Clone ID: PAT_MRT4530_99123C.1
tcacccatttatcttgtcaacgaaaattgcagaccacgcaatttcaagtcctacaacatgaccaacaattttgtagcctttgtatagcctaatcaaatcttcggattttgccaatgcaagatcgacatgaaccattaaaaattcatttcctagctcaacacctccaactctgcgtgttggatcacaacttacaatagtggcaagagccatgtttgtattccgatttttccaactttttaagaatactttagttccaacctccattgaattgtcagtgataaagtccattttgctgcactgttgtttcttggcacaaataatctccatctgtttcccatggtcatttaggccaaaggttcgtttgttcttgtgtgcagtagcatgcttggttggtggtgtcttatcctcatcttgaacatggctttgtgaattcatcacaatgttttcctgctcaacatgacaaatttcttgcacgggaccgtcaccatgctcttccactgttgaattgtcagttaaaaagtccattgtgttgcattgccgtttcttagaagcagtactatacttgtttaggcttggtctaacaagcttgcgggtaaggttctctttgttcttgtgtgtacttgtaactttgtgtgcattcaacatatagttgtcctggttgtcaggtttattgttcttgtatgcactagaaatactcttccctggttgcataagctcattctggtccaaatttcctttgcgcttgtttgcacaggaagtaatcttcctttgcttcccactgtgattctggcccaaagactgtgtattcttgtaaacagtagaatgcttagttggtggttgcaaattctcatcgtgcacatggctttgtgtattcatcaaactgttgtcctgctgatccataatgtttccctcctcaaacatacaaatttcttgcgaggggttgtcaccatacactctctgattcttttgtgccttttccaacttggttgccttctcttttaattgtaaaagtttagcatcattattctcaacatggcgttctaacttttccatctgcagtctaatagccattacatcttcactggagttatcctccactgtagtaagatttatattctgcaaacgtcgggaagttggcacatcaagcacttgtttaggctttggaactagtccaagaccatgcacacgcccaggcttgtcatctcctagtatttggttcaatgcatctcctttccaagcagtctttcctttactagcatccgctaaagctggttgttcagctataagtctcttcaaattatccacatgcccatttatattcttgtcacttttgcgcttgtgtgtgtggacataaacaacagctctatgtgggttcttctttgcaggatctttttgtctcatctcttctcttgtgcgagcaaaactctttgtccctgctgtgtgaattgccttcttcttttggcagtttttcttattctgctcacttattctcttcgatttctcgttcatccaatgattgacaagagcaatccactggtcagaaagcacaccttctgggacattgttgcaattagcttccttagtctcattcacatcaaaatacaaatcttttagttttgctttatattgccgccatctttctccaattttttttaatatgaactcttccatccgaggagcataaaggaatctcatctttacttgcttaagtatgtcctttttaacttttagttcatttgtatttttctctctctttcctattacatatctccagtctgtgtagcctaagctacacagactaccattcctagctatcattccaagaaatttacccaaaattccagcttcttcccctaccgcctgattgagatcattgcattgaaccacaattctaagccctttcggaaggttccaaacatctttcagttttgtcttgccacgtgtttcaggtgctccattttcaactcgaacattaatatcaacatcagtatcttcattgccttcatcatcaatatcaacatcgtcattagtgtcttcattaccttctccatcattgatatcaaaatcgtcatcaatgtcttcattgccttctccagaatcatgacatacagtttcttgttcagatggtgtggcaagctgtggaagggtattttcttcttcaatctgttcctctgacaaatattcctcattgctctgaacaatacgccttcttctactccttgccat

SEQ ID NO: 101511 - DNA, 3131 bp, Oryza sativa
  Clone ID: PAT_MRT4530_99124C.1
acttatgaagacgaaaaaaacatctcccaagtaattaataaaaaattgtaattaaagagaattttttgtattacatggaaaatcatcctcataagtcatgacattaaattttgttcagaacatcatgcacaaatgtaatctaaactatagaaaaaaaaacatgcatctgaagttgccactatcattgccaccatcttccacattacagtcatcatcatattcacaagggatctttagatgacagttgtccaccttgtagtaaccatattgccccagatcatgatccatttatcttgtcaacctgcaactttgcgtgttggatcacagcttacaattgaagcaacaaccacattcttatttcgatttttccagcttttcaagaatacattagttccaatctccaatgaattggcatccataatgtccactatgttgcactgttgtttcttataagcattagaattattcttcccttgttgcatgtgatcattctggttcatgtttcctttattcttatctacagtagcatgcttggttggtggtgtcttatcctcatcttgagcatggctttgtgaattcatcacaatgttttcctgttcaacatgacaaatttcttgcaagggaccgtcaccatacactttcactgttgaattgtcagttaaaaagtctattgtgttgcattgccgtttcttagaagcagtactatacttgtttaggcttggtctaacaagcttgcgggtaaggttctctttgttcttgtgtgtacttgtaactttgtgtgcattcaccatatagttgtcctggttgtcaggtttattgttcttgtatgcactagaaatactcttccctggttgcataagctcattatggtccaaatttcctttgcgcttgtaaacagtagaatgcttggttggtggttgcaaattctcatcgtgcacatggctttgtgtattcatcaaactgttgtcctgctgatccataatgtttccctcctcaaacatacaaatttcttgcgaggggttgtcaccatacactctcctcctttttgaattaggtacgtcatcacaaatagcttttttatttgtagatgctccatctaaacctccctgattcttttgtgccttttccaacttggttgccttctcttttaattgtaaaagttcagcatcattattctcaacatggcgttctaacttttccatctgcagtctaatagccattacatcttcactggagttatcctccactgtagtaagatttatattctgcaaacgtcgggaagttggcacatcaagcacttgtttaggctttggaactagtccaagaccatgcacacgcccaggcttgtcatctcctagtatttggttcaatgcatctcctttccaagcagtctttcctttactagcatccgctaaagctggttgttcagctataagtctcttcaaattatccacatgcccatttatattcttgtcacttttgcgcttgtgtgtgtggacataaacaacagctctatgtgggttcttctttgcaggatctttttgtctcatctcttctcttgtgcgagcaaaactctttgtccctgctgtgtgaattgccttcttcttttggcagtttttcttattctgctcacttattctcttcgatttctcgttcatccaatgattgacaagagcaatccactggtcagaaagcacaccttctgggacattgttgcaattagcttccttagtctcattcacatcaaaatacaaatcttttagttttgctttatattgccgccatctttctccaattttttttaatatgaactcttccatccgaggagcataaaggaatctcatctttacttgcttaagtatgtcctttttaacttttagttcatttgtatttttctctctctttcctattacatatctccagtctgtgtagcctaagctacacagactaccattcctagatatcattccaagaaatttacccaaaattccatcttcttcccctaccgcctgattgagatcattgcattgtaccacaattctaagccctttcggaaggttccaaacatctttcagttttgtcttgccacgtgtttcaggtgctccattttcaacattaggactattaaacttagcagttgcctcgaacattaatatcaacatcagtatcttcattgccttcatcatcaatatcaacatcgtcattagtgtcttcattgccttctccatcattgatattaaaatcgtcatcagtgtcttcattgccttctccagaatcatcacatacagttttttgttcagatggtgtggcaagctgtggaagggtattttcttcttcagtctgttcctctgacaaatattcctcattgctctgaacaatattcttctattccttgcccttccggggaggattggtgcaggcctagcaggagcggggaccgggttccgttggcgatggacgctcagcccatctgactccaaacctgacaatacaacatctcaaattggtaagtattgtagtcctggaagggaattagcctccattgcaatttggcgactcagagaggtagtaagttctgctgtccgaggcagtgcctccggggcttggattcatggccgccggccgcgccgcctggtgctgagcgacctcggctgccggtggcgcgaggttcaacccgcggcgtctgcactgccccggtcgcccggcacatcggctggggccgtttccggcccgccgcccgccctccatctcccttggcccttgggggtcgcctgctcgtggctgctagatggacggaaggtgcggcagcagtgatggctggtacagcagccgacggagcggagcggtggaagatctaggagcgcctgcttggggcggtgggtcagtaaagcgcccggcatcttacctacagatcaacaccgatgaagacgaggaggagaaccgtagaacgacgggagagttcgtaggaaaggggaatcccacaacagaggaaagagatttactcagggagtcaggatagaggaaagagatttttagcccggcgatccactaatgtagtatagtgctgcaactggaattaggcccgagtgtgatttggcaacacagctgagcagtgaaacgtgtaggcctcg

SEQ ID NO: 101512 - DNA, 2430 bp, Oryza sativa
  Clone ID: PAT_MRT4530_99125C.1
atggacctctccttccggggagaaggagaacgagcgcccgtgtatctgtgtaacaagattaagaactttgtcatatattttgatcacactgaccatgtatcaggccgaaaccatgaagacatccttttgacaccagctgctgagctccctgaagtttttagccctactagagatgatcatcaggaaccaaatttgtcaactaatgaacatactgctgaggtgaatcaaaaaccaaaaggaattgaagaagaggaagttgaagagtatgatttgtttgagggcagtgatgatagctcagctgattcaaactttgtggacagtgactatgagtgggaagatgatgatgatgacctgtttgaggataatgttgatggtggtgttgtagacattggtttaggaaagaaaagattcagtcataagaaggcaacagaaagtaagttgaagggtaagcaagttagtacagaagattacactgagcaagtttcatcagatgatgaaggattgcagttgccagacaattcagatgatgaaggtgatataaccctgaggtttaagtctttcaatccagaggacatcaacaatccagtgttcaaggttggaatggtattcccttctgttgaggtgattagaaaggcaatcacagaatatagtctgaagaacagagttgatatcaaattgcctaggaatgatagggaaaggataagggcacactgtgcagaagggtgcccttggaatttgtatgcatctatggatagcagagtgaagtcttttgttgtgaagacatatgtggcacagcacaagtgcaaaaaagagtgggttctgcaaaggtgtactgctaactggctggcagagaaatatgttgacactttcagggcagactcaaagatgactcttagtagcttttcaagaacagtgcagaaggattggaatttgaccccatcaagaagcaagcttgcaagagctagaaggctagcactgaaggaaatttatggtgatgaagttgggcaatataacttgctgttggactatggaaatgaacttaggaagtcaaaccctaggagctcattttatcttagtctagatgacagcaagtttagcagactgtatttctcactggattcatgcaaaagaggatttctcagtggctacagacctgtcatttgcttggatgcttgccacattaagactaagtttgggggtcaattgctgacagctgtaggtgttgatcccaatgattgcattttcccaattgcaatggctattgtggagacattgaaggatgaccttggtattgtgaatacttacccttggaccatcatgacagacaaacagaagggtctcataccagcagttcaacaagttttctctgaatctgagcatagattctgtgtaaggcatttatatcagaattttcaaatgcaattcaaaggtgagaacttgaaaaaccaactttgggcatgttctaggtctagttcagtgttagagtggaatgctaacatggaaatgacgaaggacctaaatgaggatgcctataactggttaggagagatgtcaccaaatacttgggttagagcattttttagtgaattcccaaagtgtgacatactactaaacaatagctgtgaagtgttcaacaagtatatcctagaggctagagagcttccaattctgtccatgctggagaagatcaaagggcagctgatgagtaggttttataacaagcagaaggaagcagagaaatgggaagggccattctgtcctaaaattggcaagaaattactgaagaatgcagagcatgctaatatttgttatgttttgcctgctgggaaggggatattccaagtccaagaaaggcagtcctcatatactgtagatgtcatcggcaagcactgtgattgcagaagatgggaccttactgcgtatgagaagaaagttggcaaacccaagaaaacaagaaggaagcaccctacagaagtgcaaggcaagaatggcccaaaactcaccaagcatggtgtaatcatccattgcagttactgccatgagccaaatcacaacaaaaagggttgtccaatgaggaagaaagggatcaagcccaacatacagatcagaaagaagaaggatgtagctccaggaagtcaagagcccagtataactcaggaaatgatgggcacacaacctagaacaagtactggattgctaaatgaggttaatgacaatatgctcagtgtgatgatggcagagtcttcacagcccagtcagataactcaacagcaaggtccattgccaaattctgttttcattcagcaaaaccaaccttccacaagacctgtttgctctgaccactgcaaccaaagaaggaagagcaaagattaccaaggcaaagaagaaggtaggaagtactacaaagaagaagaagatataaaccagtga

SEQ ID NO: 101513 - DNA, 259 bp, Oryza sativa
  Clone ID: PAT_MRT4530_99126C.1
agctggcacatgtaagcctaaagcatttgatacaaaatgaccttgtttatgtatctggccttctgaattcatatcataaagttgatccaagtggagagaagcatacgttctacaagatacatgtcacagacctaaactatgttcttgatcaaaatcagaggcctcaaaatgatgagaattcttcagacaaatcatcaatgctgtctaccacaggtatttctgctgagttatcttgtacagttatattcttttctattat

SEQ ID NO: 101514 - DNA, 2541 bp, Oryza sativa
  Clone ID: PAT_MRT4530_99127C.1
atgccgtcaaaaattttacatttcccccctccatgcactgtagcaggcgaaatcccactgaaatccccaaatcggcttgctccctctcaatctcccaaatcggcttgctttcaagggagagaggagagtagggcgatcacgaccgtagtgacctcggagagcacggcgatcatcggcgcagcggggctccgcgagaggaggcgcgccgcagggctccgtgagggccggctcatgacggccccaacctcggcgagcatggcgatggacctgaccttccgcggagaaggaaaacaagcgcctgtgtatcgccctggttcaaagtatttatctcttgagtttcaccatggtggatttttctgtggtctgggagtaaatcggacttatattgatggaaaagtggattggtttgacaatgaggactctcgggagtggggtagggtattgcaccttccagatttcatagctatgctaggttatgattcaggaccaagtttaaaggtgtactggttgctgccagggaagacactagttgatggtttgaggattgttgacagtggggtggaaattaatgtaatgaattcagtgtgtaacaagattaagaactttgtcatatatttggatcacactgaccatgtatcaggccgaatccatgaagatctccttttgacaccggcagctgagctctctgaagtttttagccctactagagatgatcatcaggaaccaaatttgtcaactgatgaacatactgcaggttttagaactgctaaggaagatgatgatgatgacttgtttgaggacaatgttgatggtggtgttgtagacatatgtttaggaaagaaaagattcagtcataagaaggcaacaggaagtaagttgaagggtaaacaagttagtacagaagattgcactgagcaagtttcattagatgatgaaggattgcagttgccagacaattcagatgatgaaggtgatataactctgaggtttaagtctttcaatctagaggacatcaacaatccagtgttcaaggatggaatggtattcccttctgttgaagtgattaggaagacaatcacaaaatatagtctgaagaacagagttgatatcaaattgcctagaaatgacaggggaaggataagggcacactgtgcagaagggtgcccttggaatttgtatgcatatatgaacagtagagtgaagtcctttgttgtgaagacatatgtggcacaacacaagtgcaaaaaagagtgggttctgcaaaggtgcactgctaactggctagtagagaaatatgttgacactttcagggcagactcaaagactaagtttgggggtcaattgctgacagctgtaggtgttgatcccaatgattgtattttctcaattgcaatggctgctgtggaggttgaatcttataacatatggtgctggttcctgcagacattgaaggatgaccttggtattgtaaatacttacccttggaccatcatgaaagacaaacagaagatcaatttggaatggagggagtacatcctagaggctagagagcttccaattctgtccatgttggagaagatcaaagggcagttgatgagtaggttttataacaagcagaaggaagcagagaaatgggaagggccattctgtcctaaaattggtaagaaattactgaagaatgcagagcatgttaacatttgttatgttttgcctgctggtaaggggatattccaagtccaagaaaggcaatcctcatatattgtagatgtcatcagcaagcactgtgattgcagaagatgggaccttactggtattccctgttgtcatgccatagattgcattagagaggagaggctgtctgaacaagactttctgccattctgctactcaattgaggctttcaagagtgtatatgccaacaacatcatgccatgcagtgacagggccaactgggagaagatgaatgggccacaagttctgcctccagtgtatgagaagaaagttggcagacccaagaaaacaagaaggaagcaccctacagaagtgcaaggcaaaaatggcctaaaactcaacaagcatggtgtaatcatccattgcagttactgccatgagccaaatcacaacaaaaagggttgtccaatgaggaagaaagggatcaagcccaagatacagatcagaaagaagaaggatgtagctccaggaagtcaagtgcccagtataactcaggaaatgatgggcacacaacctggaacaagtactggattgctaaatgaggttaatgacaacatgctcagtgtgataatggcagagtcttcacagcccagtcagatcactcaacagcaaggtccattgccagattctgctttcattcagcaaaaccaaccttccacaagacctgttgttctgaccactgcaaccaaagaaggaagagcaaagattacaagacaaagaagaaggcatgaagtactacaaagaagaaggcagatctcactgagcaagaagaaggtgttgcttcaaggaagaagaagaggacttgactag

SEQ ID NO: 101515 - DNA, 1507 bp, Oryza sativa
  Clone ID: PAT_MRT4530_99128C.1
actatggatccccgggctgcagtcatggtcgtcgcatcttaatattcaagggcacctccttgtaggagactatcttttctgctgcccgtcttgagggcctcccaactgaagatcttctacctatcacctgctcgtcagaaggtttagtcgagcaactgcggtcgttttgcatatcatttttggtctgctcgatcaaagcatttgaactggaaggagcagacggggcaactgtatcttcctggacaatttcaaaagtgccatttgtgacctcccaaggtccagggtccagtcttgaggattttctccttgacaattttctcttttgttcatgctgaattggcacgcttgaagttgagtcgcatatggcattgatgcagtcctctttgttcgaggccaatcgactctcaaatgattccagcttccgtttgtttgcatcaatacgcattgattttcttggtggctctggatcctcaatatcaaatttatgcgcctcacctccagcaacgctggaacctgcttcttgtatctccttgagttctggagcctctactacttgcgctattgcatcacatggaagttctttttgcaatgacttcatcttgccaccacaaatcatatcttttccagcatttggttcctgcagctttggaacattagaactaggagccgaaggaacagtagcatcctcatgcaatttatcacagatctctgcgacctcaaaagatccagggttcaatctggcagaccttctccgtcgagtttttcttggatcatcatcatgcgatgacccattatattccacatgaggtctgcagctatgttgcactgtgttggtatccattgtaacttcacatgattctgacttccgcctatttgtgcacctcttgtttgttttatcctgtggaggctcatgacagctagtataagatggcacagctgattgaatttcaaccaaatgttctctaatagaacctgcagccatttgatgagccttagttggtgcgcatttggaagacctggtttttttctccaatatctttgctctattttgttgattgttagaagtcttactcatcttctcgagttcagaaccctttactttgagcacggctattgtgcatgcaagttcatgttgcaataacttgattctatcttttccttgatttatttccgcaaacatctgcgaattagcctgcacgagttgcaagttcttctgctgcatggcttgcagtgcgaggcggattttctgcaactctactctgctgacttcaatgactttgtttcgctcagcaagcagatgacgcaacttggcgttctccttgaggacgtcagcgatggcgtggacggatccagtagggttgggcctcccggtgttggtgatgtcggcgagcacgacgggtttccccggcgaccgaaggctgccacccttaccggccgggatcacaccgccaccgcgcgccgctgcccctgctgcggccgccggtgcggaagctgcagcggccgccat

SEQ ID NO: 101516 - DNA, 284 bp, Oryza sativa
  Clone ID: PAT_MRT4530_99129C.1
gggggggggggggggtttgtgatggttcaaccctaaaaccttgagaactacagaaaccatatcccactagtaatcatgtctacccaatcaatcctttacgttatcatgagaaaacagatggaatgttgacatcacaggggggggtactcccttctttttttaatataagaagttttagagttagacatggttattaagaaagtaggtagaagtgaatggtggagggttgtgattggatgagtagtggaggtaggtggaaaaagtgaatggtggagggttgtgct

SEQ ID NO: 101517 - DNA, 690 bp, Oryza sativa
  unsure (1)..(690): unsure at all n locations
  Clone ID: PAT_MRT4530_9912C.1
aaaaaacaataagggtgttttccataggccgggacagggggaccaacgggggggttgtgctaggacactccaaggtttttcataggctttaggcccacaaccgaatcccatcgattttgggtaagagcccctgaatagctataaaaataccttgaactactgaaaaaatctaggaatttgttcttagtttatgaagcccagaaagcgctcattgtaattggttccattgacgcaagcttccaanccgacaaagattgattttagttcgcagtcggaatttgtgttcgccttgaatgaagccgttgtaggttgaaagagttccaagaaagatcaagtggttgatcctccaccagagttggaatacattgcggcttttgaacaaccaaagaggcttgtttgaataaagaaattcgttcctcagctagttgtgatgactagtgcttctagccctatggacctctattgcgatatagtggtgccattgcgcaagccaaggaacctagatcgcatcaaaagttcaaacacatcttacggcggtattacctcattcgcgagatagtgggtagaggagatgtgaagatatgcaaaatacatacggatttgaatgttgcagatccgttgacaaagccactccctcagcctaagcatgaggcacacactagggcaatgggtataagatacgttcatgat

SEQ ID NO: 101518 - DNA, 188 bp, Oryza sativa
  Clone ID: PAT_MRT4530_99130C.1
tcgaaattcatgcgagctcgcgacgcgaaccccctacgccgcagccgcaggcggcctattgagctgctgctactacagacctccacgcgagcgtgccccggggtggaagcggaggcagcggcggctcgagcgcactctggaggcgggggagcgcgtcacgatggccgtaggcagctgcctaggcgtgg

SEQ ID NO: 101519 - DNA, 496 bp, Oryza sativa
  Clone ID: PAT_MRT4530_99131C.1
agaaagccaagaattgtgcgcttagaagaggaaacattaagaaagggtgtcgacagtatgtaacgcaattggaaagatatttaacccacatcctgatgtttttattggtcgaaaagcgatggacttgaaagataagtggagaaacatgatgaggtagggatcaatgacaaggcaccagagagagttctctttcattctagctgaagaacctttaagaagccctagggcatataattctggtggttcgatacgctgaagcaccaagcccttctactgctgaagactgagacattggtttgagcattctggctccaccgacatatccccagtagattcggcgagaattcgtcagattagtaccagatgcttacaagtcatggttttaaagcccccctttgtaaatttgggaacagattcgaatttcgtcgtagtatcattcagtgagatcgtaccactttcttctaatatcctcgtcgaatatcatcaaaaaaaaaaa

SEQ ID NO: 101520 - DNA, 1165 bp, Oryza sativa
  Clone ID: PAT_MRT4530_99132C.1
ggcacgagcaacgaattatcaagttcagagtttgtgcactgctgcgcgaggaggctgataccataaggttctcatcatccatccatgacaggctttgacacagcaatagccacgaactgttgcctgtatgagttatttctgcgatataatttccacaaagctactaaatttggttgggtttctcttgctttcaactactggttatgtgatggaatgatacaagagaacatagcaaaaagtattagcagtgcactacagcaagagataagatgggactgtgatgattcttcccttgacactgcccttaaagagttcatgaaagagcccccctttatggttgttaaagatgacaatgtatatggagctgggcaatatcactggatttcaatcacatccaaagatacagaagttagcagcatgcaggctctaccggctcccccggccgccggcttcctgacatttgaaacagcggatgattcaaacacaaaagctttaccagccagcttttttagacattccagcaaccttggagtgctagttctctgctattgtggctttgattttgcatctcctcctttcctcatatgccatggcctaaaattccttggattggaccattgtactaatgatagtacatgcgaaggggatcaacatgtggattggacagctttatctagtctatatgtgctggatctacgttacacagagtgggatgagatcacttctcaagaaaaaatagcactcatgtataaccttcaagagctaaacatagtgggattcagatgctggcgacactatgcaaggagactacaaggacagctaccttgcctccgtacgctccgagtggtcaaacctacggatcaggcagatatatcaacagacattgccaactcctttgtggagaagacacaactagaaatacttgatctctctggggacactagcatggaaactattcccaacagcatgtcaaatgtggatagcctattggtgcttattgtagatggttgtgataagttgaaaaatgttattgtgtctgatggtgtttttccttcactcacatccttcagttttgatggctacggaccaacataccattgggcatcaacagttgagttgcctccaaaagaaatgcgtccttttgtagataacaagagagatataa

SEQ ID NO: 101521 - DNA, 434 bp, Oryza sativa
  unsure (1)..(434): unsure at all n locations
  Clone ID: PAT_MRT4530_99133C.1
gttctagatcgcgagcggccgtcgcgcccacgcgtccgcggacgcgtgggcgccggcttcttaccggtcctgcattcatttagagtttgatatttcagggactggtcttacatatgagactggagatcatgttggtgtatatgcagaaaactgcacagagactgtagaggaggtagaaaatctgttaggttattcaccagataccttattctcaattcatgctgaccaagaggatggcactccactttttgggggttctttgccacctcctttcccgtccccctgtactgtggggactgcacttgccagatatgctgaccttctgagttttcctaagaagagtgctttaattgctttggcttnccatgcatctgatcccaaagatgctgagaggctaagacatctagcatctcctgctggaaagaggagtattt

SEQ ID NO: 101522 - DNA, 393 bp, Oryza sativa
  Clone ID: PAT_MRT4530_99134C.1
ggaccccagggcccaaaaattcccccaaacattttttccaaggaaaaaagggacagaaatacctccaggaagatttaaacaaaaggcaaggggaggggaggcatgtgaaacaattgggtttcaggaaaatgcccataagttataagcaactccaaaggcttatcacaatgaaatattgggcaaaagccacgggggggattaagctgggaacctaaaatttttcctactcccaaaaaaaattgggtagaaagacttttcccccctgggatcacaaaaaaataaccctgatacttgctacgggcgacttgaaaagggactaacttttggcaacaaaaatcgggggcaattccataatttaccatcagaaccaacttttaacagggtgaagaaaat

SEQ ID NO: 101523 - DNA, 1848 bp, Oryza sativa
  Clone ID: PAT_MRT4530_99135C.1
cgcttcgttcatcagcttgaccgcctcacctcaccaccccaagctagacgacctcgtcttcctcctccacctcctcgcgacctcgcattgttagatcagcctcgattcatctccaatctttcggcgccgctcccggagagagggacagcggcgcaggcggtgagcacgaggaggagcagagctaatcaaaagccctctcgccgctcgagctctcgtgcaccgtgccgccgccgccgacgccgacgctgacgccgacggcttaattcagtcttgtcggctacatctcttggcgtgctgaaattggtgggagcacgagagcggcgccaatggggacgaggccgtgcgccggcgtggcgtcggcggtggcggcggcggtggccgttctgctgctcgccgtgtcttgcttcgccgcggcggcgacgacgacgcagaagcatggcaggatgtcagggaagggcggcgacgtgctggaggacgacccgacggggaagctgaaggtgttcgtgtacgagatgccacgcaagtacaacctgaacctgctggccaaggacagccggtgcctgcagcacatgttcgcggcggagatcttcatgcaccagttcctcctctccagccccgtgcgcaccctcgacccggaggaggccgactggttctacacacccgcctacaccacctgcgacctcaccccgcagggcttcccgctccccttccgcgccccgcgcatcatgcgcagcgccgtccgctacgtcgccgccacgtggccctactggaaccgcaccgacggcgccgaccacttcttcctcgcgccgcacgacttcggcgcctgcttccactaccaggaggagcgcgccatcgagcgcggcatcctcccggtgctccggcgcgccacgctggtgcagacgttcggccagcgccaccacccctgcctccagccggggtcgatcaccgtgccgccgtacgccgatccccgcaagatggaggcgcaccgcatcagccccgcgacgccgcgctcgatcttcgtgtattttcgggggcttttctacgacatggggaatgatcccgagggcgggtactacgcccgcggcgcgagggcgtcggtgtgggagaacttcaaggacaacccgctgttcgacatctcgacggagcacccggcgacgtactacgaggacatgcagcgggccatcttctgcctgtgcccgctggggtgggcgccgtggagcccccggctggtggaggcggtggtgttcgggtgcatcccggtgatcatcgccgacgacatcgtgctccccttcgcggacgccatcccgtggggggagatcagcgtgttcgtggcggaggaggacgtgccgaggctggacaccatcctggcgtccgtcccgctcgacgaggtcatccggaagcagcggctgctggcgtccccggcgatgaagcaggccgtgctgttccaccagccggcgaggcccggcgacgcgttccaccagatactcaacgggctcgcgcgcaagctgccgcaccccaagggcgtcttcctcgagcccggcgagaagggcatcgactgggaccagggcctcgagaacgacctcaagccatggtagccgccatggatgatgagctatatacacacagattatagagacgagacatggattggatcgcgagagatgtacattgattggttcgtttcttctgattaagccgctgttaatttcttcttctttctttcttttttctagtttttttttccttgttgttttttctttcaaggaggcgatccgtgttcatgtattgtgcaattgtgcgtgcttaattaatcgttgcaatgtgcacgatttcttctaaaaaccacaa

SEQ ID NO: 101524 - DNA, 219 bp, Oryza sativa
  Clone ID: PAT_MRT4530_99136C.1
atgccccatggcgaggtggctctgaaggctcgagtcattcctctctatggtggagttgtccgcaagagccctcacggccaatacccacaagtaccacacatgatacttgggtattgggaaaatatgctgacatggatctcttgtaaagagcatatagacaaccattgtgggtgcccttacgaggagacgtgcactggcgcgtggaccacatggagctaa

SEQ ID NO: 101525 - DNA, 708 bp, Oryza sativa
  Clone ID: PAT_MRT4530_99137C.1
ttggtacggacgcgcacagctagctagctgggctaggatcgccatggatcggggtgaccaccaccacctccagcagcagcaccagttcttgatgccaccgcctgcgccggtggtgccgccgcagctgtgcatgccggcgatgatggcggacgagcagtacatggacctgggcggtggcggggcggcggcggcgccggggaggggcggggccggggagaggaagcggcggttcacggaggagcagatacggtcgctggagtccatgttccacgcgcaccacgccaagctggagccccgcgagaaggcggagctggcgcgcgagctgggcctgcagccgcggcaggtggccatctggttccagaacaagcgcgcgcggtggcgctccaagcagctcgagcacgactacgccgcactccgctccaagtacgacgccctccactcccgcgtcgagtccctcaagcaagagaagctcgctctcacccagcggcgcgagctgattatgcttccgggaggcgaggacggcggcaagcaccgcggcgccaccgccgacgaggaggccgccgcgaccgcggcctcgctgaacgacctatgcgccaccgccggggatgcgggggggctccccgcgctggcgccgttcccgagggcggcggctcgtcctcgccgtcgtgcacagcgccgcactgctcgtggtggccgtgctcctctccg

SEQ ID NO: 101526 - DNA, 221 bp, Oryza sativa
  Clone ID: PAT_MRT4530_99138C.1
ctccctgtccacgcatttcttctttccacatgccggaggaggccgcacgcgcgctacgacgtagaggcgcgccgcctccgcggcagcaaggccaaggacaacttgccgggcacgcccgccgccgcgcgcccacgccgcggcaacacgagagccaccgccgtgccaccgccggcgacagaacccgccgcccccctctcgcggactggagcgaggaattctcg

SEQ ID NO: 101527 - DNA, 121 bp, Oryza sativa
  Clone ID: PAT_MRT4530_99139C.1
atgggggtccttctccccaactgggagggcagggaccctgcctgtggcatgccctttacctataaaaggatgacctcatgtcgcaagcatggggaggacggctggatgaaccgaatgctgg

SEQ ID NO: 101528 - DNA, 906 bp, Oryza sativa
  Clone ID: PAT_MRT4530_9913C.1
gctagtgtttgagggaggggaaggggatgagaggaggaaaacgaagcaaatcgtacgtatggaacagtgacggcagttgggcctggcaggaagaggccgtcccccgtgcagtgcagtgcattattgaatgatgatttgcgccttctccttgcccccgtcgctgccgacctccaccggtcgccgcccgcacgcatcgatattggaattggagtagtatatatgatcgagctaggccttcctcccggctagttgtcattaaactctacaacgtacgtatctctcctctcctcctgctcccgagcattccgtccccatggctgttgacgatctaaaccaccacctcatcgccgtcggagtcggagaagaagccgccaccgcccattgtgggctgcgcacccttgtgcggaatatggcgcagctggtggtgtcgctgggcatattggtcgccgccgacaagttggtggagcaggccttcgcagccgcctccatcaagttccccagcgccctcttcgccatgttctgcgtcttcgccctcctcctcttcctacctccttcgctcgccaacggattcatggctttcttcgaccccgccaccgtcttcatccacaggtggctgcccctcttcttcgtcccctccctcgtcgtcctgccgcttgccgtcagggacgtctcgcctgcttctgccctcaagatcctcttcatcacatttggtggctggtttgcttcactggtggtggctggttacacggcgctgagtgtgagaaggatagtgaagacacagcttataccagctgagcccatgaagagaccgtctcctttcgggccgcttgaattctgggcctgggctgctgtctttgttgcttcctttgctgttgcgtatgtttcccccactgcgcttggtaccac

SEQ ID NO: 101529 - DNA, 225 bp, Oryza sativa
  unsure (1)..(225): unsure at all n locations
  Clone ID: PAT_MRT4530_99140C.1
ctcgctcaaaaaccctagccctcgcgccgcgggcggcgccgctcccccgcgcactcgccgctcgccgcccgcgagctcgcgccgcttcgcaaccatgaagctcaccatcgcgaaccccgccaccgcctgccagangaagctcttgatctatgacgaccatgaactgcgtgcatttcttgccctgaggggcgggggggaggtccgtggcgttgctttggtcgaggt

SEQ ID NO: 101530 - DNA, 2127 bp, Oryza sativa
  Clone ID: PAT_MRT4530_99141C.1
atggctggggcagaagtcatcatgcgtgcatggaatgaatggggcatccaagcactggtgcttctcagcttgacgctccaggtctcgctcctcgtgctggcggagttccgccggtgcgtgaactccggcgtgcttaggttcttcatctggtcggcgtacatgatggccgacgggactgccatatacgtcctcggccacatgtccgtcaccagcagttcgccccagcatcagctgatggccttctgggcaccattcctcctgctccacctcggtgggcaggacagcatcaccgcctacgccatcgaggacaaccgtctgtggctacgccacctgcagacgctcgccgtgcaggtggctgcagctggctacatcctctacgagtcctccattgttggcagccattccttgctccggtgggccaccatgctcatgtttgtcgccggtgttgtcaagtacggggagagggtgtgggcgcttaggtgcgccgatagcagccagatggcaaagaattaccgaactcttcaagtatcctccagaggttttgaatgctcttactatcttgacaagataatttctggacctccgtgggacacagaaacctacctactgatggctcaccgaatgctggaggttcccaggatttggttgaaggggccgccgcaaaattctctgtctcagtacccttttgcttcgaatttgagtgggaaggatctgtataaggtggccgagatgcagctctccctgatgcacgacatcttctacaccaaggtagaggtcatccacagtaatttgtatggcctttgcattcatatgcttccagccatggcgaccaccgctgcattcctgctgtttcagctggtgatactaggccgtgagggccatggctacgacaggctagatgtggctgtcacttatgtcctgctagttggcgctgtcatcctggagactgcgtccttgttgcgggctatgttctcgagctggacatgtcctctcttggtgaggtggagtcgccataagcgcggaatggaggacaatactgtatgtaacaatctgggccatacaattacgagcctccgccggctcgtccgtgcagcgcaatggagaagaaggtactggtcgtgctccatggggcagcacaacttgcttcggttgggcgttggcagcacgaccagccgaagaagcaagatggcaagatggatgggagttgaagattggtggaacaccaaggcttactcgtggcccatccccgtctcggagtgcatccaggagctgttggtgaaccaagtattggagagagaaggtactgcctcctcctcgatctcgatggtgttggacgaacaagatcaatttccaattccatcaaaaggagaagaagaggagggctctgcctctcatggatcaagaccagaagcagacgcagatgatcagctttttgattcaaagggtcgagcggagttgaagagatggggactgtacgagggtggccagaccttgaacggggaggagcggctgacctggagcgtggaggagcgcatccttgtctggcacctcgccactaacatctacctcacctggtggaacaagaagcagcagaagcaggacaagcaacaacccatggccaaggcggccgaggcgctctccaactacatgatgttcctcctcgccgcacgcccctacatgctgtctcccactgccagccgcgattcatacgtcgagatggcctacgctctcacccccgccggcggcctgcggtacgactcaaccgagcaattggccagcttcctacggacctacggggatacacccgagtatgatgctcgtggtaggctacgacacaggtacggttccaaccttgattttacaacacaacaccatctccagctggttttagacacaggatgtgagctcggtgcaaagctcatcagccaggacgagttacaagaggcaggggcagacggcaagctaggcctcatcgcccaagtctgggtggaggtcttgtgccacgcgggccagcaatgcagcgcatattctcatgcccggcagctcagcaacggcggcgagctcatcaccgtcgctgccctcctagtggaatacgtcacgaaacgtatcctaacgtttcctcgctaa

SEQ ID NO: 101531 - DNA, 1726 bp, Oryza sativa
  Clone ID: PAT_MRT4530_99142C.1
atggcgccatgttgggcaggatccggctccttcgaggccggcctccggtcacccgcgcctcctcctcttaccgtttctcccaaggattccaagccgtcccctcgtctccaccgcagccgctccaccgccgccacctccaagcccccgccgtccccgcccccagataggcgtcgcgacggcgcgatgcggcagaaggtgtcggagatggaggaggagctgaggaaggagaaggacgcggcggagaaggtgcaactcttgcagcgggaggtggagaaggccaaggagtcggagcgcaagatgctcgagtcgctaatataccagacgaagcagctggagcagacgaagatctcgctcgaggaggccaagctggagatcaccactctgcagcaagccaacgcgagcctcgaggcctcggcggcggcggcggtggtgagccggcggggtggcgcggtggagcagaggagcgtcaaggacctcgtgttcggcggcggggacgatgagatcagggccctgcgctgcgagctccggacggcgatgcagggggaggagaagagccggaaggcgctcgacgacctgtccgtcgcgctctccgacgtgacgatggaggcgaagcaggtgaagatgtggctgtccgaggcgcaggccgagctggaggccgccaatgccgaggccgagcggctgaggcacgagctggacgccgccgaggcgaggctgcgcgacgtgtccgacgagcacgaccggtgcaggctcgacgccgaggagtgcgccgccgcgtggggcgacaaggagcgcgtgctcctcgactgcgtccgcgcgtccgaggaggaggtgaaccgcgaacgccaggagaacaccaagctcgtcgagtcgcagcgcgtgatccgcgacgagaacgcccggctccgcgacatcctgaagcaggccgtcgccgaggccaacgtcgtcaaggagtcgctggagctcgcccgtggcgagaacgcccggctcaacgacgtcgtcgccgagaaggacggcgcgctgcagagcctccggcaggagtacgagtgcatcaaggtcagcgaggccgccgcgcagggcagcctcaaggaggttcaacagcgtgctcgccgccacgaagaagacaactggccaccgggttcagcactccggggtcggagaggaccgcctctgtgggggattacggcttcgaccagcacctgccgagcgttggtttcgtctccagcgccaagggcaccccggaggcggcgtcgcaccggtggacggcggcggacaagtccaggacgtcgagcatccggaggtacttgatcggcgagcccgccaagttcaagggcggcttttcgcagtcggcgaggatgggcaacctgaaccacaaggaccgggtgttcgcgtcgctgagcaacatcgccgacctcaagtcggcggcggaagccgccatgagcgacttcgacgatgagttcgatcacgtcgacgagagccactacgacagcatggatcaatccatgaagcagaagaagaagaggccgatacttcgcaagttcggggatttgttcaggaggaaaagcttctacaaggcgaatttagcgccagtacacacttgaaaggaaaaaaaaaaaatctctcccatgtaatgaatgtcaatttgttttgttcttctcaatacacaagaaatgaaatacttttggatccaatttaattccaaaaaaaataaaaaaaaaagcatgggtcg

SEQ ID NO: 101532 - DNA, 154 bp, Oryza sativa
  Clone ID: PAT_MRT4530_99143C.1
acatgcgattttcatggacgccggcccctttaggttccaggcgggccgtaagtggctctgccttgaaccaggtgatcccggcgccgagctgcgaccgcctacgatggtgagggagctatacaagtcccagcccgaccgttgcaatggcatgccg

SEQ ID NO: 101533 - DNA, 212 bp, Oryza sativa
  Clone ID: PAT_MRT4530_99144C.1
acattagaaatcggagggggtacactctattgaatataaaactaagaagtatataggaatctcaaaggccaagcaagtgataacgagttcaatttacatccaggagaggaagagagcatctaattgaggtgtcagatcgacaacaattggctacaaagagaaaaaaaaaaaagcaaggtaccacgttgagttgtacatgaattggttttttc

SEQ ID NO: 101534 - DNA, 430 bp, Oryza sativa
  unsure (1)..(430): unsure at all n locations
  Clone ID: PAT_MRT4530_99145C.1
cgcaccggggcaagggcggatggacctgaggctgtaggggcagctgagttgtgacgatgctgacaaaagtgaaattgtggattgttgcctgtggtggtggagcgcctgtggtgtgtggaggatgctgcgcaaacgtgcactaatgcaaatggtgttggggatcaccatggtatgggagcacttgaaatggtggggggaaaaaaacaatgtgacaccacgtgttggcatggntaaatgtggcgagacggaatgcttgttgagccatgaattaccgccatggattgnggacaatgattgatggctgacagtgaaatgatgttggccaaccgacagactaattaggcttaataaagttcatctcacgtttacatcggaatcngtaatttgttttgttattagtctatgtttaatactncaaaaaaaaaaaaaa

SEQ ID NO: 101535 - DNA, 742 bp, Oryza sativa
  Clone ID: PAT_MRT4530_99146C.1
gcaacgatttaatcggtggatcgaacatttcatgcggcggtctgaaccgttcgatagctgcaatcgacagaaagatgactagacgtagtgctcgggttgatggcggcgaaagcgattggcgatccattcggtgggtcagacactttgagcgggtggcccggactttcctcttagctactctcaacagggagatatggggccccatgctcgagttgaaagttgcaggcgatcagtgttctcagtaaatggaatcgaacactatgggcagggtggcccaggcctttctatgagccatgttctacagaaagatcgctagatgtagcgcttgggtcgttcggtggctggaaggatgacatgtgatttgtctgtctcggctcgtgactagattgatggcattcaatcggacgtcggaacagatggaccctagagtgctgatggaggtgttgtcgactaagttttttaaacgatggattgctatgaagacagtgtaccagcagcatgcgacatgcacagaattctacagatcgatggcttcgtcgatggcggagttgacggaaggtaagcttgacgcgggccggctccagttggtggtggcagcagaagtggtggcgtctggatccaggaggacgcatcttcagatgggggcgctaagcagcgctggatggggagaccaaggtggtgcggcggcgttcgtcggtcatcgtagtagtggtcgccgtcgacgccgcctgcccgctcccac

SEQ ID NO: 101536 - DNA, 354 bp, Oryza sativa
  Clone ID: PAT_MRT4530_99147C.1
atggctctgcaagtgcaaggccttgtggactggaggggaagaccggttgatcccaggaggcatggtggtctgaaggcagtaatgttcatctacgtcttgattgtgatgaccaacatggggaacattcccactatgctaaacatagtgagctacctgcatggcacaatgcacatgggcatcgccgatgcctccaccaccgccgccaacttctacggtgcaatctgtgtcttctccttcctcggcgccttcatctccgactcctacatcaagcgcttctacaccatcctcatctttgctcccatcgaaattctggcaagcatcctaaaccattcgtacatctttaggattatatga

SEQ ID NO: 101537 - DNA, 195 bp, Oryza sativa
  Clone ID: PAT_MRT4530_99148C.1
atggcttcttttaggaggcggctggagggtagcaggaaaggcaaagagctcagttacgtggacgaagcgaacgtcagcgcctgcccgctgccattggcttgctttgggtcagaaagcaacaccaaggtttttgggtctttcagatcagaaagcaacgcaaaagactggctcttcggatcagaaagcgacctctag

SEQ ID NO: 101538 - DNA, 177 bp, Oryza sativa
  Clone ID: PAT_MRT4530_99149C.1
atggattttgcggggcagcaaggcgggcggccacggcgtgacggcgcggcggcagtttgtgacgctacggaagcagcagcggcgagcacggcagaggcttgtgaagctgcggcaaacaacatcggcgagcacggctgcatcttgggcagctgcagcggcttgctgcttcggactgca

SEQ ID NO: 101539 - DNA, 1366 bp, Oryza sativa
  Clone ID: PAT_MRT4530_9914C.1
ctgacgcgccggccggcgcttgggctggcgggtgggcggacgcggcggcagcgacgcctcacctcgcctcgccctcgtctccggccgcgccgcttgctgggagctagctttggaggaggaggaggaggaggggcgcgagccatggcggagaaggaggagtcaacgtcgatcccgctcagccaggcggcggaggcggttgacccggaggacccggccaagtcgccgccgcggcccagctcgcccaccacctccacccgcaaggcatgctgcgctgttcttcaaagttgggtgtcaagaaaatttatgactggatgcgtcgttctgtttcctgttgctgtcacgttcttcatcacatggtggtttattcaatttgttgatggctttttcagcccactatatgcaaaacttgggatcgacatatttggtcttggttttctgacttctctggtattcatttttctggttggaatatttgtttcctcatgggtgggttcaaccatcttttgggttggagaatggtttataaagaaaatgccatttgttcggcacatatactctgcatcaaagcaagtcagcactgccatttcaccagatcaaaacacaacagcttttaaagaagttgcgataattcgtcatccacgtattggtgaatatgcatttggatttataacatcaactgttgttcttcagactgacaaaggcgacgaagaactgtgcagcgtttatgtgccaacaaatcatctttacattggtgacatatttctggtgaactctgaggagataataagaccaaatttatccattcgagaaggaatcgaaataattgtttctggaggaatgactatgccacaggtgatcgcgtcccttgaacccaccccaaggaagagccagaatatccgtctaaatagaataatgacataatgtcatacgagagctcaagtgctcaacacgatcgtgttatgtgtggaatcggtgtgactctggtgctctgaccattgctctgttcatcttcgtttctgttgtgtcaaaatgtggaggctggagaggagaacacggcgtgagattgatcgagccatcttaggctcgtggcattacagaaggtggcggaagcaccatatcgatgctcaggaatagtattggttgtgtgtcacatgccgcgctactctttggttgctgactggtctgaaatgttaacgtccctagtgcaagtgcaactgattaaattcatttgtaacaatatcatgtataacatcatgtcgacctcgtattacgtagagttgattataccatgtgagagcatttctttgttttatcaatggagggcgcttgcatccaaaaaaaaaaaaaaaaaaaaaaaaaaaaaaaa

SEQ ID NO: 101540 - DNA, 325 bp, Oryza sativa
  unsure (1)..(325): unsure at all n locations
  Clone ID: PAT_MRT4530_99150C.1
cgatgagatcactctccatgctccatgctgcagtctactcaacaccaccccaaaatggcactgatctcattgcctgggctttggacatgtgtcgctcttctcgtggccatcttctccatcccattcgtctccacacgagcatgagggcgcagacgtctcaacctctagcctctctctcccagactccagagcaagcaagcaggagatcacgagctcacaagtataccgaacccgtcgtcgtcgacgacacgntcgcattgaaacaattttcgcctttaggcttttagcaagagagtgccgcttttgtccccctgtttcttgaagc

SEQ ID NO: 101541 - DNA, 546 bp, Oryza sativa
  Clone ID: PAT_MRT4530_99151C.1
catggcaaaggatcaaacaataagatttgagaaatgccggacacggcggcgggaagctctcacgcgcggcgagcagccagtccctcctcgcggagacggcggcggccggtggcgtccaccagctaccggcgagcgacgggtcgagcagcgacgctccttgtcggaagcggaaggcgccccgccggagacgaggacacgaagccggtcgccggcgacgcgggacacggcggcaatggcaagggaaaggtcctcgacgccgccggcgagccacccaaggactacatccacgtgcgcgctcgccgcggccaggccaccgacagccacagcctcgccgagcgggtgaggagagaaaagatcagcgagcgcatgaagctgcttcaagacctcgttcctggctgcaacaaggtgacaggcaaggcagtgatgcttgacgagatcataaactacgtccagtcgttgcaacggcaagtggagttcctatcaatgaagctttccaccgtcaacccgcagctggatttcgacgtcgacaacttcatcccaaaagat

SEQ ID NO: 101542 - DNA, 917 bp, Oryza sativa
  Clone ID: PAT_MRT4530_99152C.1
gcacgagggacggaactcccaaaacttggtaaggacaggaggccagctagcgtgttgacttctattgtgagagatcaccatcctggtattgttgaatataatggtaagagtgtggctgcaatgaaatgggtgcactaccaagtaaaagttgattcgaatgggcgatcaaaggctgatgaagttgatgaagaattttgggtaaatttaaataatgtgcattatgtgttgcaacccttcgtatgactgattacatctttgcatatcttttttagctaagatttagatttgaacctgattacgaatgtgttgcaagacaacaagttggaagatgtgctgacattctcctcaatggtataaagtactatgctcgaattcaggccatacaggatcattacctgaaagtgaaaaacagacaattgcgtgacaagattgctgggcaacagtatttaactaaggagcagtactttgcccagaaaccagtctggtgcaacgaagaggcttggaatgctcttgctgatgatcggtgtgatccaaagtttagggaaaaatctgagaagaatcgagccaatcgtgctagctcaaaatacaaacctcacagaggtggatccaactccattgcaacagtatgccaaaaactgaacaagggcgggatgtaacagaagtcgaggcttgggttcatactcacaaaggagacaatcccaataatcctaacatgctgaacacacaagaagcaaccgaatgtttgaggagatacaaaagtaaatttgctgaaagaaatggagatagaagtgatcctatgagctctccagtggactctttagctctttatgagagcaattatgggaaacctcatggtaaatggcctctattcaatggagttgttaacaacaaagaggcactcgtagaagtgaaaagtg

SEQ ID NO: 101543 - DNA, 409 bp, Oryza sativa
  Clone ID: PAT_MRT4530_99153C.1
ccttgcttgctttttttttcttataatacatttccaggtttaactaaggaaaaggggtaaccagaataaattcacgagcatacagcagtgctattttgccaagagacacacggtagccttaataaaaaaccaatttgaggaaatgctttgctcccccccaaaggggggacctttataaggtccaaaaaacctgcggaaaaccccaaattttggcagccgggaacttaccacagaagtggaaaaaaacaccatggtgtaacagacaaacaactgaaacaaagcgaatgcccatcaagcttcagaaatggccatacaggcaacatcccaatgggaagaaaccccccaaagcctgactgaaaactgaacaatctccccaattttttcttgggttgatgtgccccacaacaaa

SEQ ID NO: 101544 - DNA, 372 bp, Oryza sativa
  Clone ID: PAT_MRT4530_99154C.1
atggacaggaatttgatcgtgttctacctcaacttcaccaagaggatcgttggcgtcaacctcatctacgacaccatcgacgagtccctctccatgatcccgatgttatcgagccacaaagcgacgatccataccactcaaatgctcgtcacgcgccgccgtaccaccaccgccattgatgatgatgaaggggactacgctctaacgtatctgggcaaaatggcagtggaagaaaaacccgcggacaagccgggggacatgccggtgatcagctggccagatgttgtctaccaatggcggccattgtcgtcgctcccgtcgtggaagatgatcaagagggccaaaccttcccggcgagtggatggtcgataa

SEQ ID NO: 101545 - DNA, 233 bp, Oryza sativa
  Clone ID: PAT_MRT4530_99155C.1
aaggtgcacggcaagcggcagccaggcgagcatgcggaggggagggcggcggccgggcaggcggaggggtcgttggcaacgctgatgtcaatgtgcggacttgttggttttgagatgtgtggacttgtgttgttttttgtgatgtcgatgtagatgtgtggtgctgttgcggatgattaattctgttgaggatgtgaatttgtgatgttattgatatgtgaatttatgttgtc

SEQ ID NO: 101546 - DNA, 409 bp, Oryza sativa
  Clone ID: PAT_MRT4530_99156C.1
cttaaaaaaaaaaggggcgttctttaaagaaaagggaaccaaaaattctccccggcccccgggagaaaccaaattatttttttaaaagtaggcaccaattagatttagacttgagggcccccccccccccccgggggggagatccccccgagcaaatgtgctgtgaagaaacacaccccaaagcgggggggggatttatgcccccaaaagatggcacggacccccaactattacaaaaaaaaaaccccacccccccccgcgggctaaaatgggaaaaaaaatggcaaaacctataaaagggggggataaccaaaaataggccccccccacacggggaggggggacaaccccgtgtgccagaaccggggggctcaaaaaagaaaacccattggtagcacaaagggggggg

SEQ ID NO: 101547 - DNA, 2106 bp, Oryza sativa
  Clone ID: PAT_MRT4530_99157C.1
atggccagaggaggttcaaaacttccaatccgcaagcataacatgacaagctcagatttgcgtctcgctccgccaacgcgaggcagcagccatggatatgcccatggagaaccggccatagctggcgacagtcgacgacaaacagtattcgggcatattttcgagggacatgggccttaccgtggcaggcctaagcagccagcgtcggagtcggatgttggagttggaatcggaaacgagtcaaacgactacgcagcggcagcgtcacagacaaataggaggtacgggcaggtcgtccgttccctcttgctcccaaagaacataagtacccctgctgcagttcaggccttcagaggacaaggcacgatgagcctgagcgatttgccggatgaggccctgctcgtcatcctgaacaagctggacacacgggaggccttgagatgcagcgtcctctcgaggcggtggaggcgcgtccccggcatgctccccaacatcgagctggacgtcgactcgttcacgcccgaccacgacgacggcttcacgtccacgctatccgacgacgcgaggaacagctacgcgatggtgagcgcggtgcagagcctcctgtcgcacgagagccggcacgacatccgccgtctggacctgagcttcttctcgagggacgagtccgtcggcatcatccacgccatcgacgacgccatggcccgtggccgcaggatcctcaaaatgtgttttgacgtcgtgtcggagaagtgttacctggagtgcccggacagggacagggtcaagcaagggaagcgccttctgtactgcttcgacgcctacccgcacgtgttcgccggcctcaccagcctacatctggagtgcatcacggtgcaaggaccatgcttctccaacgtgatcaccgcgtgcgagaagctcagctacctctcactcgtctactgcgacttcggtgaggagacaccgctgacgatccaccacgagcacctccgcgtggtgaagctcgagttctgcacctgtgacaccgtcgagctggaggtgccagatctgttgaagctgatgatgtccgtctggtcatggtcacctcgtcggtatcccttcgtgtttggccatgccccacggctccaacggctagagctagctcatgctggtctaattgattccaaaatgctccaactgagcaagctacttgacaattgtacaagccttcgtgaactgtggttgaactttgaaagagaaaagatatggattctacctgagaccccaacacgattggctcctcttttaaataatttgacgtttgttggtgtgcaccgtattcatccaaacagcggcatcacttggacactgtttcttttggaagcggcacctcttttgaagatgctcagtattaaggtgacggaccatcaatgtaaaccaattgagggagaactgctaaagagaactttatgtgagaaaaacaacatatactgggaaccgtctgatttcaagcactacagtttgaccatgctcatattttatggctttcaacctggaaaaaaatgcatggagtacataagacaagtcataaaaagggcagtgaatttggaagacatattattgcacgatgataggtgtgaggccactcgcgaggcgacgacccggccgccccctctccttgcggcagcggggcttcttgcttctagcgctcaggcggacaggggacccgcccagggcggcgacggcaatgaccaccagatccgtaccgctccgatcgaatcttgcggggcggcggctggcgacggggatggcgatggcagcggggatggcgacggtcggggtgagcaacgccgagcagggatgcggccgatggcggcggggatggcgacggcggtggtggagtccgcggatccggcggcggcgcggcgttggacggtgctgcaagcggcctgccccacgtctggcgctggcgtttgtggtgctcccacgctggtggtggcgctgtggcgtcagcaggcggtggtggtgaggaggacggctagatctggctctaggttcagatccgacgcgtcattagtcaggtcaggggtggcatggagtccggttgttgtgatcttcgatatgtag

SEQ ID NO: 101548 - DNA, 328 bp, Oryza sativa
  Clone ID: PAT_MRT4530_99158C.1
cgagctcggtacccggggatctagcggtttacctccccaacttacggtcccagattcaactttatagctatgcctgccccagggtcggcgatgtgacctttgcccaactccattcccgccaagtgcccaacagttaccgtattgttaacctcgcagacgtgattcccctcctgccccccactacggggttaggcacctatgtccatgtcgggcaaagttggagtttcctcagccaaggaggggacatcttacccaaccatgtggtggatacctaccagggagcagtggatagggaagtggaaacggatcctcagagtaacctgcaggc

SEQ ID NO: 101549 - DNA, 892 bp, Oryza sativa
  Clone ID: PAT_MRT4530_99159C.1
cgtaacgaggcgcagatctctcctcaggccggtctttgggttttttattttttttttttttttttttaagtcacaaggttgtaagtaacattagatgaatgaagatgtacatttttcatgtttttggacagatatgcttagattctgccttttacggatacatccatgctattttgcaagccatgtaactgatttataattaatgcagcctctccggtggttccatgacgatcatcgcattactcgttatcatcatcagccaggtcgaactgcttgagcagcgcgccgcagatgggcagtgggatgtccttgaggtagccgagtgggttggctaagcgcaggttgtcacagatgccgacattcctggtgagcaaaacacgggcacgatccctttcggcctcgatttcagagcagtttgcaagggggctgtggacgaggacaacctcgcagatgtcctcctcatggctgtccttgagctcaatcttgtatgtcccggtctcatcagtcacaccgtcaatcgcacgctcgaccttgtcggtgccaaagtgcttgcactccagcctgaccttggcacccttgatatactcggtgacattggtctcgaacccggcgcggcacgtgtcacagtagacacggccttggacgacgtagtccggtgcgtcggtggcagtggcagtgctggcaaggacatagaagaggatgccgaagatcaccggaatggtgcggagagaggccatggatgatgtggctgcaaatgtgtttttccccttcctctattattatttggggaaaatgtgagaggagggtactgaaatggcctcccggccggcggacgcgtgggcggacgcgaagaggcgcgtgggcgaccgggaattcggccggtcccccgggg

SEQ ID NO: 101550 - DNA, 134 bp, Oryza sativa
  Clone ID: PAT_MRT4530_9915C.1
ggaaatactgacgcaccatacatattacattggcaaacattcgtattgtgcagtttcgtgctcgtagatatgcccgatgagcgcctgagatggagaaagccaattcatgtgaaataagggcacaagggagacca

SEQ ID NO: 101551 - DNA, 267 bp, Oryza sativa
  unsure (1)..(267): unsure at all n locations
  Clone ID: PAT_MRT4530_99160C.1
catctgattgatttcttggattattaattatcaagataagtaagtaggagtattacaaatggaattttgagctcaatgctaatctatgtactcaatacatatacatacaattggagagaaaattaccaccactagaatctagtnggattaagagagagagagagagagaaaaacaaggcagtaaaattcaccgggcggcgtcgccggcggcggcggagctgaaagcggcgatgtcgtggccgcccttgcccaacgtgctggtgagcg

SEQ ID NO: 101552 - DNA, 459 bp, Oryza sativa
  Clone ID: PAT_MRT4530_99161C.1
gccaggagaaacaaactgaatatttccgaaaaaatagtgagaaactatgtcaccaaaccaatactaaatactactaactggtcagtgatgatacatgcaagcttcaggcctcagggtttctgccctgcaaacatcagtagcttggtacatacagttcattacgtagagcgagctacttggagtggaataaaactcagtctgaaggcacaaggtagttgatgaaagcttctgctttaggagccaaagctttcatgctctcccgtgttgccatttcgtcgtcttcaatctggaatgctggagcacaggttacaccgacgaaagaagtagtgcagctcagagtctcttccaggcgttttgacaaacacaccttccatcttcggtgaaggactccgatgtcgccaggtcaagaaggggcccaaaccaaaacatttggagggaacctgtgtatttgtgggcttt

SEQ ID NO: 101553 - DNA, 1594 bp, Oryza sativa
  Clone ID: PAT_MRT4530_99162C.1
ctatgtcataggtgcttggttcggcctggggtgcggtacttggtttgccaagggtgccggttgaacctgaattggtaccgaacttatagcttgagtttggacctgagcttgggtattggtttggacggcggctgctgcggccgcggctgctttgtcatattcggcttgtatttctctccttcgcttggtgtcttcctcatctcgagcatatccatcaattatgcgaaagaggtgttcaagtgttctgggctccttgcgcacaagtttccttgtgagttcgccctcgagcaaaccggccgaagcagcatggatcacagacgcttcggttatatcttgcacttggcatcgtgcttgcaaaaaccggcgaatgtactcccttgtcgattccccttgcctttggtgaatgcccacaaggtcttgttgagttttcggctcctcataggtacctcgaaagttaagaacaaaaacatcgcgcaattgctcccatgagtaaatgctattaacaggcaaattgaaataccaagatctggctatgccatcgagcacgaggtgaattagcttcgccttggtattctcatcaccatgagctgcttcgattgcagattcatagatggacaagaactctttcgaatctgtttctcccgaatactgtgggactggagggtacttgaattggggtgggatgggatggtttttgattccccagctgaggggcaaacccttttcggtcccggacttgatcatagccccttgctgagcaggccaattcaactgtgggtagggcagcgcgaacgatgaagccatagcttgcacaagtggttgcgctgcagacatcgacttgaggcgaagacccttgaacttgacttggcggggcaaactgccccaccagctgtcccgccgatgcagcttgacttgggcttccctcagtctgaaccggaggcgaagctctttgtatgttgttgtggggctgattgagttgggcaacggctggggcagccctgacgaagtacaccggtgcttggcggcataagaaggaatgacttggggctgagcatgaaactgttgggcgttggccttgccttgccttgctgctttgtacgcttgttgctgttcttgcatctggcgaagcgtgtcttggagtttggccatgttttgacgcacggcccccatgtcagcttcggcttgtgcttcaagagtggcattggcttgtgaggtggtgatcggtgctgacgttgaagccggttgggtgaaggctgtggttgaaggcgcccctggcacttgtgaggacaagactacgtccctaacttggagggccttcgctgctgccaccaccttcgccgcttccgcatctatcgaagttgtgggcgccgaagatgggagaggtggcagccacgatcggagatgtgctgctccggcttcgccctcagaggacgaaggctctgctccctcttcggctaccatctcagcttcgcttccgcctttcttctgcttggcaactttctccttggcgaccttcttcggtggcatcagtggtttcgctcactctcaatggtttcgctcggaggttcccacgatcccccattacatggcctag

SEQ ID NO: 101554 - DNA, 153 bp, Oryza sativa
  Clone ID: PAT_MRT4530_99163C.1
atggcgcttcctcccctccactaccgccgttgcggcggagcccaacccaccgccgtcgcccaagcccccttccgcagaggagttgggctagggtccacctacctcgtggaggtcatgtcggcgtggctcgtcagcttctacctaggagcctag

SEQ ID NO: 101555 - DNA, 264 bp, Oryza sativa
  Clone ID: PAT_MRT4530_99164C.1
atggtggagccgtgtgcggtgtgcccttgctgccgtgcggctcccctcgcgctcggcttggcttcgatcgcgacggcggcggcaaaggcgcggcacacgagagccatgtccaacctctcctccggcagaagatgtgacctacacctaaacaggggagatcatcggcatgaaggtgccgatgagcttgaggctgttaatatgctcgcgaagaaagtttgggtggtccaaaatgcaaagaaggcaaaaatatctagtccaaagtaa

SEQ ID NO: 101556 - DNA, 1014 bp, Oryza sativa
  Clone ID: PAT_MRT4530_99165C.1
atggatgctgtgttggttaccgccgccatcttcgggttgctgctctgcggctgctcggtttcaggagtggaaggtatcggtgtgaactatggcatgatcggcaacaacctcccgtcgccggacaaggtcatcgccctgtacagagccagcaacatcaccgacatccgcctcttccacccggacaccaccgtgctcgccgcgctccgcggctcgggcctcggcgtcgtgctcggcacgctcaacgaggacctggcacgcctcgccaccgacgcctcgttcgcggcgtcgtgggtccagtcgtacgtgcagcccttcgccggcgccgtccgcttccgctacatcaacgccggcaacgaggtcatccctggggacgaggcggcgagcgtcctcccggccatgaggaacctccagtcggcgctgcgcgccgcggggctcggcgtgccggtcacgacggtcgtcgcgacgtcggtgctgggctcctcgtacccgccgtcgcagggcgcgttctccgaggccgcgctgccgacggtggcgccgatcgtctccttcctggcgtcgagcgggacgcccctgctggtgaacgtgtacccgtacttcgcctactccgccgacccgtcgtcggtgcggctcgactacgcgctgctgtcgccgtcgacgtcggcggccgtgacggacggcggtgtcacgtacaccaacatgttcgacgccatcctggacgcggtgtacgcggcgctggagaaggcgggcgggcagggcctggaggtggtggtgtcggagaccgggtggccgtcgggcggcggcggggccggcgccagcgtggagaacgcggcggcgtacagcaacaacctggtgcgccacgtcgggcgcggcacgccgcggcggcccgggaaggccgtggagacgtacatcttcgccatgttcaacgagaaccagaagcccgagggcgtggagcagaacttcggcctgttccacccggacatgagcgcggtctaccacgtcgacttctcggcgtga

SEQ ID NO: 101557 - DNA, 362 bp, Oryza sativa
  Clone ID: PAT_MRT4530_99166C.1
attaatatagtcatatacttgtatttatatccaccatacaatttttatgttctaacatgtactatagtaaaatgaatgtgcaaacaattacatgtttacccatttcacatctatgctttctgacacttccttccatgcttgaacattattgttaggaatacaaactactccctgaattgtatctgcacgaatcagcagttctcactattgtattgcatgtacttccgtgacaaagacatgaatagatatttcaaagagaactcctactcctagggaaatatgaagatgatctacttgtatatctatttaactaatctggaatagtccacatcttattgttatattgctacagaaatatgggg

SEQ ID NO: 101558 - DNA, 168 bp, Oryza sativa
  Clone ID: PAT_MRT4530_99167C.1
atggcgccttcgatggagatggagataagcgtcctcgatggcaacgacaccaccctcgatgtggtggtggtggtggtggttcgaagaatcagagttgaggtggagacgggggctgaggcggagtcaagagaggctttaaagacgcgaggagcaaagaagaggagatga

SEQ ID NO: 101559 - DNA, 1176 bp, Oryza sativa
  Clone ID: PAT_MRT4530_99168C.1
atggtcgacgtcgaccgccgcccgccgctgccgcacggcctcccgcgcccgccctcccacgccgccggcctccgccgcctctccacccgcgcctccgcccccaccaccccgcgcgcctcgcccgccacgccgtctccctcctccgccgccgccgccgctccctccccttccgccctcgtcgcccacctcgccgccgccggcgtctccgtcctcccgggcctctccgacccggagctcgcccacgccgaggccgcgctcggcggcctccagctccctcccgacctccgcgacctcctcgcgatcggcgtcccgtccggggacggcttcccggactaccgctccccggcgggcctccgcctcctccgcttcgccgccgaggaggtccccgccgccgtcgccgccgcgctgcccggccgccgggcgggggggcgggggcggtggtgctcctcctccccgccgcctctcgtcccgctctacgggcggcattacgtgccggccgtgccctgcctcgccgggaacccggtgttccacgtctcggacaccggcgtcgccgtcgccggcgccaacatcgcagcgttcctcctccgcgccttcgccgcggagccgccccgcggcgcgcccctccgccgccagctctccgcgccgatgcccccgccggcgccgtctcccgcgccgtccaccgcccgccgcagcctggactccgccaccgggaaggccccgcgctggatcgagttctggaccgacgccgcggccgccggcgaccgcttcgtggaggtcagcacgtgcaccagcacccgcgcgaacgcggcgccgcagtgggtgaggtcgtacctggagtgggcggggtccgtgctgcggcgcggcgggtggggcggcggcgaggtggaggagatgacgacgggaagcggcggcggcggcgaggaggcggtggcgttggcgctgacggtggacaggtgctgcggcgagctgggtcgggcggggtggggggcggaggaggtggtggaggcgctgggggcgctgctggggccgaggacgaggaagaggccggcggtggcgctgccgccggacgtggcggcgcgggtggggaggctcgccgaggccgtctcgcgggcggtgtttaccgggtccgggtccggatccggcggcaacccggaacccgccaagaggccattttga

SEQ ID NO: 101560 - DNA, 792 bp, Oryza sativa
  Clone ID: PAT_MRT4530_99169C.1
atgagcatgatcgacgtgctgatccgggtggacgccatctgcaagaagtacgacaagtacgacgccgacaagcaccgcaatggcgccgccggcgacccgttctcgcggctgtacgccgccgtcgacgccgacatcgacgccgccgtcgagagatccgagagggccgcgacggagacgaaccgggcggcggcggtggcgctcaacgccgacgtgcggcgcaccaaggcgcggctcacggaggaggtcgtcaagctccggaagctcgccgccaagaaggtgaaagggctctcgccggaggaggcgctgcggggcgacctggtcttggcattgccgcataggatccagtccatccctgacggcggcggtggcgcggcggatcagtacggcggcgggaatgtccggccggggatcaagttcgattcttcaggttttgttgttttccttaagttggatgaagggctggagttcatctctgaaggtttggacacactgaaaagcctggcagaggacatgaacgaggaactgaacaggcagatgcctatgatggatgagattgacaacaaggtggataaatctaatgaagacctcagaaagactaatgtcaggctaaaagaaacggtcaaccagtttcgatcgaccaggaacttcatgattgatcttatcttgatttgcatcattcttggcattgctgcctacctctacgagcaacatactcaatcaatgaatctcactggttccgtcatcacctgttcaggaataacatgttccaagattccaggagtaaatgattaa

SEQ ID NO: 101561 - DNA, 858 bp, Oryza sativa
  Clone ID: PAT_MRT4530_9916C.1
atggacgcggagctcctggagctgcagcggcagctggaggcggcacagagcgcgcggtcgagcgtgcggctgtcggagcggaacgtggtggagctcgtgcagaagctgcaggagcgcgggatcatcgacttcgagctcctccacaccacctccggcaaggagtacatcacatccgaccatctgaaacatgagatcaagatggagatcaagaaacgcggacgtgcatcactggtagatttgtcagatatactgggggtggacctctaccatgttgagagacagtcacagaaagtcgttgcagatgatccatctcttatgctgatcaacggcgagatcatgtcacagtcttactgggacactgtgacagaagagataaatgagaagttgcaggagcgcagccagattgccttggctgagattgctgcccagttgcatattggatcagagctggttgtcaatatccttgagcctcggcttggaactattgttaaaggaaggctagaaggtggtcagctatacactccagcatatgtctcaagaattactgccatggtccgtggtgccgctaggggtataacagttccaacaaatttgccatctgtttggaacagcttgcagctgcagctccaagaaatgcatggtgctagtggagtttctgtggaaggttcattcttccagtccattttcaatggcttactgaaagaaggtgttgtgcttggatcagtccgtgcaggagtacagtggacaccagctgtttttgcacatgctcaaaaggagagtgttgatgcctttttttcacaggttaagaaatttcttttctcaattatgcaagagaactgcatcatatcattacattaa

SEQ ID NO: 101562 - DNA, 219 bp, Oryza sativa
  Clone ID: PAT_MRT4530_99170C.1
atggaggcgacgaccgacgggaagaagatggaggccatctatcatccccaaggcatccctcaagcactatcgtttgtcccgaggagaggccggaggctagtgaggagaagggataggaaagcaactatcgacgttgcatggtgggtggtgatgacgatgacggtggtcatatggcgacggatgatggctaacaacagtagagatgaggacgattcgtga

SEQ ID NO: 101563 - DNA, 249 bp, Oryza sativa
  Clone ID: PAT_MRT4530_99171C.1
cggctagggttcacggtggaccgggtgcacggcgggggctcacgaacgccgagatctaaccctatccaatcggacgggcgagatctaatgggtctaccgcgactcacggaaagcgacgatgatgacgtcggcgatgacgtcatcaccggcgacggctcggatggtgcaagctcgccggcgaaatacggcacgacggcactaacgaaaggcatctaccggttgcggacaacacggcgaactcacctgtga

SEQ ID NO: 101564 - DNA, 397 bp, Oryza sativa
  Clone ID: PAT_MRT4530_99172C.1
cttctctgctctcttctcccctttcttctcgattctccacgccagagggggaggggcgggcatggcgcgcggcggggtgccggcctagcacggcggggtgccggcctggcgcggcgggcgagacggccggcgccctccccctcccaaatccagcggcggcgggctggggaggggccggtcgtggccgggagcggcggcggcggcgggcgggagcggcgcggcgcggtgtgagcggcgtggcagcggcgggggatctccggcggctccgacaacaacgatgggaggggcagctttggtggcggcgacggcgaccactaggacaaggacggctgtggaggcttttagcgacgtcgatagcgacaacaaggaaggcgttcccggcggtgtcttgcaaagc

SEQ ID NO: 101565 - DNA, 302 bp, Oryza sativa
  Clone ID: PAT_MRT4530_99173C.1
aacaaccgttagcagcagtcattcccatgactgctttctgatttgttgtgttgtcctgaagtgttgtttcccgaccattttagagtcgtgcagtaaaaaaaaaagaaaaagaaaaggagagatagcttgcatttgtttgaccttaagtatgcctttagttgataattgtaagaaaacactcactgtgtgtaggctgccgcctttgggttgataattgtaagatgatcctgcttgtataacaaatggttgcttggtttgaccgagattatgttattccgttattagaaaaaaaaaaaaaaaaa

SEQ ID NO: 101566 - DNA, 1588 bp, Oryza sativa
  Clone ID: PAT_MRT4530_99174C.1
ggaagggaaaactctaggtgtgacaatacttttagtcggaaaagttattgcaatgcaacatgtttcgaaaaaggagtaagtagtcagttgattcaagacctagagcgtctgaatttggggatagtggaacatggtttcgttactatgttggaagcacaacctacgctcgtggagcaagatagccgaactcaagaagattatgcgggttggtaaagcccgcgattttcctgaagaggagcaaggaacaatctggatgggagaaagattgtgtgtgcctgataatgaggaattgaaggatttgattcttagtgaagctcatcagacccagtattctattcatccagggagtactaagttgtatcaagacgaaggaaaaattttggtgggtcagtatgaagagagagatagctgaatttgtagctatgtgtggtgtgtgtcagcgagttaaagcagaacatcacagcaggtttgttgcaacctctccaaattccggaatggaaatgggaagaaattggtatggattttataacaagattgcctagaatgtcgtcaagacatgattctatctgggtaattgtggatcgacttacgaaagtggcacattttctgccagtgcacactacttacacagggaaaagataagcataattgtatttggcaaggattatttgtttgcatggtgttccaaagaaaattgtatatgatcgaggaagtcagtttacttcaaaattctggtagaagttgcaagaagaactgggaacacgtttgaattccagtacagcttatcatccgcagaccgatggtcagactgaaagagtgaattagattttggaggatatgttgagagtttgcgcccttgattttggtggatcttgggataagaatttgccgtatgcagagttctcttataataacagctatcaagccagtttgcagatggcaccgtttgaagccctctatggaagaaaatatcgtatgcctttgtttttggatcaaacaggagaacgtcagttgtttggaacataagtgttgagtgaagctaaggaaaaagttaagagcaatcagagagagattgaggattgcacaatctcatcagaagagttatgctgacaatcgtcgccgagagcttagttttgaagccagagatcatgtttatcttcgagtcatgccgctcagaggggtgcacagttttcaaaccaagggaaaattggcaccacgttacgtgggaccatatagaattcttgaacgaagaggagaagtcgcgtatcagttggaacttccacccaatatggcgagtatccatgatgtgtttcatgtgtcacaattgaagaaatgcttaagagtacttgagttacaggcaagtcccgacagaattgagatacatgaggatttaacttatgttgaaaagcctacgcgtattcttgagaccagtgagaggagaaccaggaataaagtgatcaagttctgcagagttcaatggagtcatcatttggaagatgaggcgacatggaaaagagaagatgagttgaaagccgcccatccgcatctcttcgcaagttcttccgaatctcaaggacgagattccgtt

SEQ ID NO: 101567 - DNA, 384 bp, Oryza sativa
  Clone ID: PAT_MRT4530_99175C.1
acgcgcgcgtgttttctttctgggacccacatatacagctgggggggttgtttatgttatagcgggttagagtcatcacggatcatagtacgatgcaagaaagagctttgtgcccattgtccatagcgcaccatttactgcattaaaactagccaagcagcgcctacgaggctgtatataccaacaaacgctctgatgatgagcttgtgcctctaaaacgccgatacgatgaagaatgtcttacatgcgactacattgcacatgacctgctgcacatggaaacacctcgtgacggacctatgatccgtaccagtgtcaaaccaaaacgaattttatgaaaaacaccctgggtgagaagaggtactcatctactgggacatttta

SEQ ID NO: 101568 - DNA, 487 bp, Oryza sativa
  Clone ID: PAT_MRT4530_99176C.1
aaggaaattacataaaatatcataattaatagatacaattgccttctcaggactctatccatgcgtggcaatcatcttgaagcatatcaactcaacccgacgatgtacaccgagtcgtattcttggaatcggctgtatcggctagccctgtctgactcgaactctgccgatcctgaccgaagccgatccagactctagccgattcctgctctgttcctaaatcgatctccgcctccgattccactttgatctaatcttcttttccgatgccgatattaccaaatttgcaaactttatcctctctctctccggcgattcctccaacgcataaggcgatccccaggcgacttcatctccggccagacttccgcccgcggcgatgtcgtcctccgccatcccgtctgctgcaccaccagccgagtatgctgagaagcttatcacatgaaaatcactacttccttggtccagtcggcagtcttgatcctac

SEQ ID NO: 101569 - DNA, 1257 bp, Oryza sativa
  Clone ID: PAT_MRT4530_99177C.1
atggggatctactacgggcggcgcaaggagaagcgcctccggatcacacaatctctggcgcccgcagcctccgccgccgccgccgcccccgttccggacgatctactcgtctccgagatcctggcgcgcctccctgtcaagaccctcacgcgctgcaagagcgtgtgcaggtcgtggcgcgccgccctagaggatccttccttcgtccgccgccacctcgagctgtctcgcacgaggacgccaccttcggctctagtcatcccgcacgatggcggcgacttcttgtccaggtgtatcagctttcaccgcctccggtcaccggagcacacagccacggacgccgcggcggcggcggcgacggctgagctgatgctcgaggcgacgtgcccggaggagatcggctgcgggttcgtcccttcgcgtgcaacccggcgaccaggaagctcgtgcagctgccgctcggcaccaatgccgggctctcccgagtgcttctggccggccgcggcgatcggctacgacccgtggcgcgaccggtacgtcgtctgcaggtacttcgacctgagcaccgagcccttcttcgacgaggcgaccggccgggagacgtcgtattggcgcctcggtcacgagatcttcaccctcggcggcggtggcggcgactcctgggtggagaccgaccccccgccgccgcccggcaggcattggccgatcggtgaattgggcgcgatctgcgtgcgaggggacttctactggctgagttacaccgccgccggcgccgccggcgacggcgaggcggagatggcgctgctccggttcggcctgcgcgacgccaagttcgacgtggtccgcggccctcggggctgcacctgccgccgccgcacgccctcctcctccgatgacggctacttctacttcacggaccgcgtcgtcgacctgtccggcaaggtgtgctacgtccacgcgccattggcggccgacttcctggagctctggcagctagcgggggatcatgatcaggagtggtcgccacgctgccgcatcaacctgctcgagagggggatcgtcatacggaaggagggcttcgttcccgtgtaccaccatggggaggacatgctgcttgttctggatgacgagcagctgtatcgatacaacgagcggactagagcgatcgaggaggttgccaacttggagcgggagctagaaagtatgagcggcaggacggcaccttggggtaccaagtatctcatggtactaaaatag

SEQ ID NO: 101570 - DNA, 458 bp, Oryza sativa
  Clone ID: PAT_MRT4530_99178C.1
tgaccctgagccatgactgggaagattccaagatggcaacccaattgcgacccctgcttgcaagtatcaagcaacaaactggatgggatttcgaggaatcaatgacgcataccttgaacatgctgatgctcttcagatgggggaacattgacgccattgcttggtttgctgcaccagggcgcagcaaatggcaccctgggtgtgctgcagacagcagcagaagactgtgtgggctgccctgcaaaatgtcaggtttggggatattgctgctgctgggttgatcccagcaccgatgcataagtggatttttgaccgggggacccaaatttgaagctgcccctgcggctgtgcatgtgctgttggcaaactgctggaagatgcatggaccaggcaagatacaacaggcaacaccgaactcgcgaatcgattggataagagttgtcgctctgttatggaca

SEQ ID NO: 101571 - DNA, 306 bp, Oryza sativa
  Clone ID: PAT_MRT4530_99179C.1
atagctgaagaccgtttgctgttttggaggcacctgtaccccgctccccgtagtgagcgattccacccgtttatacgttcgaggcttgacagctgaattgcctccacgttcatgttttgatatatgatgtttagtgactggatgattacaccgtacgttgaaaatggatgggaaatatgcttgggtgggtattaccgtcaacaagaacacgctgagatcccagaaagattttccgctgacggaaattgtaaatatggatcaatcttctatgagaattggcatttttaaaaaaaaaaaaaaaaaaaa

SEQ ID NO: 101572 - DNA, 171 bp, Oryza sativa
  Clone ID: PAT_MRT4530_9917C.1
ggccttaatcgtgcactaatttggcattctgttttactctacgggccgagggagtggactaggctagaggagggggacaaaattgacgagtgggctggactgaaggaggggcgcgggcaagctgggctggcgtggccttgggctagctggttcggcatggggatgggctag

SEQ ID NO: 101573 - DNA, 441 bp, Oryza sativa
  Clone ID: PAT_MRT4530_99180C.1
atggcgacgggggccgcggcgaagggaggcgggcggcgggggagggggtggctcggcggcagcgcttttctcccggcggatctggcgacgaggaggcgtgagggctgcggatctggcagcggtgactccatccgccgccgcctagtcccacctcctcttcctctctcagagtcccccctccccttcccccgccgccaccaccccctctccctctctcagatctggcgcgcggggagcgatggcagtggcgtcgtcgaggcggaggctgcggcggggctcggtagcggcggcgtcaaggcggatccggcggtggtggttctcaccggccacttcaaggacgacgacggcaacctccgcagctggatcgacaatatcgttggccctcttaagaacgcgcttgcgaaaattggttttcgcaggcggttttatgaccgcttgtga

SEQ ID NO: 101574 - DNA, 453 bp, Oryza sativa
  Clone ID: PAT_MRT4530_99182C.1
atggggatgcggatcgtggcgtcgtcgaagcaagcaggagggagagacgccggtcgtgacgagctgatggagccggaggaggtggcgcggcggcaatcccggagccgttctgccaccgccgcctccgccgatcgtccaacgcctctttctcagccgctccccctcaaccgccgccgcacccagccacccacgatccacgccgacgccgccgtcgctgcaaccctcatccgctccgcacgttctccttcgctggacagcgggagcgagaaggtcacaatagtagagagcaccttgcagattggatggatcgatggttacactatcatgagcagattgactcacgctgtcaccgccgccaccacacaaagcgccgactcggccgtagccccgtcgccgattcactgccgccaggtcgtgtccatcatctacccgattcaccagtggtctacctga

SEQ ID NO: 101575 - DNA, 2104 bp, Oryza sativa
  Clone ID: PAT_MRT4530_99183C.1
gcggcggcgtcaaggcggatccggcggtggtggttctcaccggccacttcaaggacgacgacggcaacctccgcagctggttgggttcagcagctgctgttcttgcgatgaggcaatgggtgatgctgggaacatttttttttctgcaggatcgacaatatcgttggccctcttaagaacgcgcttgcgaaaattggttttcgcaggcggttttatgaccgcttgtgaaaagcaatgattttctctggcctttacttattggcgggctgctcagccgccagcaacgaccgggttttgccgccggcgtaaattttttcgtagtagtgtaccttttcttttctgaaaaaaacattacattatttgaatgacttgaaaaagatgagtgtacgtgcacgcacttaggtcgtaaagagattgtctccattttaaactcggtcactcggaagtatttatgatgttggctgtttgttgttcattccatgagtgcactttcagggaacgtgcagtttttttttcttctgaacatttcaaactgtgctatagtcaaatacaaagattttttttcccgttttattcatccttcaagagtacacaacagatcatgctcaggatttaaataggtttacattatcccgccaagaaaaaaaaaggaaggtttacattacattggttttcgatcttgacgagtacaatctctgaaatttctctcattgcaacagtcgtagtcatacataacaataatgtgtactcgctccatccccataaaaaccaatctaaaagtttcatccaatactagattggtttttatgacacgaagaaaatactatgttattttacgatttgtcatcaacatacacatctgcttcttcttctacttggggagagtggccatgacaagcaacgacccagcgccgtcgtcgggcatcacgacgacgagcccttcgtctccgccaccgccggtcacgatgctgcaggagacatgcacgggcttgctgcccctgagcaccagctcctccagccccagctcgctccactgcaccgcttccagcgaggcgccgccggcggcggcgccaccaccgggcgacgccgtgcacgtctcgatggtagtctttccggccagggaatcgtccccgccggcggcgtcgacgacgacgaccgagagcctcgacaccttgtccttcttgccgagcgcctcgctcgccttgtcgacgcaggccgccgcgagcgcgcggtgatcaccgtgcccgccgtccgccgccgctgccgctgcagtaccggccctgaagagcacggtctcggcgtcgccgtcgccgtcgccggcgaaggagtcgatcgggacggacctgacgcgcttgcgggtggtctccgggcgctggaagtaggcgaggtactgcgccatcgggagcggggtggccttgccctgcgccctgatgcgggcgtgcgtgcgcgcccacgacaggaggaacctcgccagcgtcagcgggtcggccagcaccagcgcgcagctcacgccgacggcgtacccgccgtctccctggaaccgtgtcagctgcatgaagaacggggggcacatgtcggggtcgtcggcgttcacgtcggtccacggcgccagcgcggcctcccggcgcgccagggcgcccttgccggcgaggaactcgtcgagggtcgcgtccaccgtcgcctggaggaggcgcacgccggtgtcgttcagcttcacctcccacgacccgtcggcgcggcggcggagccggccggccatctccgggtggtcggccagcgcctcgctcagcgactccttcacccacaccccgtcctcccacgcgcccggcgccgccccgccggcgccgcggtagtagagcaccgcgcggacgcggcgctgcagcgcgggcgccgggagcggcggcgccgccacggcgacgaggcgcgtcctcccgggctccacgacgcgcgtcggcaccgccgtctgcacggcctcgatgtggacgacgtgcgccgcggccgctgccgctgccggcgtggtggcggccatctttgctgatgttcaagagatcgacccattctacgcgaacgcaacacaactacaacacgagcaagagcctcgtgc

SEQ ID NO: 101576 - DNA, 2844 bp, Oryza sativa
  Clone ID: PAT_MRT4530_99184C.1
accacggcggcgccggcatcgccccagcgccgctgccttttctggtgctttctctcttgggcacagaaaacgtcctcttcccacgataaatctgattcgccatcgcagcatttagcgagctccaatgcacaataaatccagctcatcgtagaagcatccaacaacactcaccaccgttcagggacaccacctcccttgcccaaaccaccggtgtgcatgccatctatgcaacatctgttatatctaggagctagtacttcattgcatctcaatatatctagcagccgctccaacatatttcttcgttgacctacaggactaacgataagatgatgcgcatatgtttttcttttccttgagttgatactttagccactatctccctgcacttgttacatacgagaaaacaagatggccaagacatgtaaaattattttaacaattataggagcagaatcaatatcagtatccatgtcatcagatgcaaattggtctgctctcttcagtaatcaaaagctagtcatggataactggataaaaaaggtatctattgtgccgagcaaaccaaaagcattaggtaggctatgagcccatgccaattgctagtacactacagaaatcgatctcatagttgacaattcattttctacatctacattataggtgagtaggtgaccaaagttgcattgatcattagttgtaatcagctattacaggagttcttgtggtccttgctaaaagcctaaaactagatgtgagcaataaatagaattgatttgatgctccgccggttcgccgcgcggcgtctccggccgccggcgaccgcggggtacccctcgtcggccgctgcggcggccgcggcgtacgcccacgggggcggcgcctcggtgctccccgacggcctcgaccgggcctccgacgcgcacgcccgcaacgccgccgcggtgggcggcctcctctccgacctccgcgcccgcgtctcccaggtgctggccgggggaggcgcggaggcggtgaggcggaacaaggcgcgggggaagctgctcccgcgggagcgcatcgaccgcctgctcgaccccggcgcctccttcctcgagctctcccagatggtatcacggcccactgatcaattacagctttatgagcatttcatacccggtttaactacaaaacttgcaggatctggtgtttatgaggaagcattaccatcagggggcataataactggcataggacctgtccatggacgattatgtatgtttgtggccaatgatccaactacaaaagggggcacatactatcctatcactgtcaaaaagcatctgcgggcacaggaaatagcttctgaatgtaaactgccttgcatatatcttgttgacagtggaggtgctaatctccccaggcaggctgaagttttccctgaccgtgataattttggtcgaatattctacaatcaagctaagatgtcatcggatagcattcctcagattgcattagttctaggctcttgtaccgctggtggtgcttatattccggcaatggctgatgagagtgtaatagtaaagggaaatggaacaatatttctagctggtccaccacttgtaaaggctgctacaggagaagagatatctgctgaggaccttggtggagcatcagtgcattgtaagatatcaggagtctctgatcactttgcacaagatgagcttcatgggctaacattgggaagaaacattgtgaagaacctccacttggcagctaaagttccaaatgtacaaaattctgcttgcgattaccaagagccattgtatgatgtacaggaacttcgctcaattgccccggctgatatgaagcagtcttttgacattcgccaagtaatagctcgcatagttgatggaagtgaatttgatgaattcaaaaaattgtatggaacaacactggtgactggttttgcaaggatttgtggacagccagttggaattattggaaacaatggcattttgtttacagaatcagccctaaagggttcccacttcatagaattgtgtgcccagcgcaatattcctttgatattccttcaaaatattactggattcatggttgggtcaaaatctgaagcaagtggaattgcaaaagcgggagcaaaaatggttatggcagtttcctgttccaaggtaccgaaaattaccataattgttggtggaagttttggtgctggaaactatggaatgtgtggacgtgcatacagtccaaattttttgtttatgtggccaactgctaggatatctgtcatgggtggcatccaggcagctggtgtccttgctcaaatagagaagaacaacagaaaaagacaaggagtggaggtgctcagcaaaatgatcacttttgctcttacgcagtggaccaaagatgaggaagaagccttcaaagcaaaagttgtggaggcttatgacaaagaaggaagcccatactactccaccgctagactttgggacgatgggattatagatcctgcggacaccagacgggttttaagcctctgcttatctgctgcggcaaagccggttccagaagacacaaaatatggagtatttcgaatgtaaatcatgcattataattgtgtacaaatccctgtatactgtatagtaaaatccgctttcatgcgcattgaaataaggcaaaataaaatgccattccaaggcttatttcgcaagtataatttcgccctgatgtgtataacaaagttatgtttaccagtgttttagtggcgaataaactgtttaagttgttactgtagctaaaatacattgatagacttgttctgagtaaaaaaaaaaaaaaaaaaaa

SEQ ID NO: 101577 - DNA, 575 bp, Oryza sativa
  Clone ID: PAT_MRT4530_99185C.1
acggcatccgcttcaactgctcgcgccggcgcgtccggaccgacatcgccgcatcacggcgtggcgctggagccgggggcggcgcgggcgatggaggagagggaggcggcgcggtcgccatggccgcatcgcgagcccgaggaggtggcgtcgctcgtcgcgttcctctgcatgccggcggcgtcgtacatcaccgggcaggtcatctgcgtcgacggtgccgcaccatcaccgcctaggcagctaggctaatgaatccagaattcctaaaacatattttgctttgctctcgttaccgatcatataaaccagatatttgctcccgtccaatccaacaattagaaaattagaaaagatttagtaccgtgaggtaccgatacctcaagatattttttatttgatcggagcaaatctctataaaccattatcaatctaccgccctacatataatttagtccctcaaacttcattctgaggtcatatttgttgatttgtaatgtttcattatgtctaaacaactcggatataatttactaccgggccatataatctttagatacaaaaaaaaaaaaaaa

SEQ ID NO: 101578 - DNA, 322 bp, Oryza sativa
  Clone ID: PAT_MRT4530_99186C.1
cgttgctgctaatactggaagtaatagattggggataggttgattccttgtttttagagttgtcttggttgccccagttctgcctgtcttctgtcttggtttgtcttggttgtgtgtttcttatctgatgtctgctatgtttagcagcagtccctactgtctcttttgtcttagagttggtcttagaggtggtagcttgctcgagtccttttgcactttgttagaggtctcgccctccctatgttgtaaactaatgtctggatttcccagcacaaccttcgggctttcaatagaagccaggtctctgacctttttctattag

SEQ ID NO: 101579 - DNA, 286 bp, Oryza sativa
  Clone ID: PAT_MRT4530_99187C.1
gtgttacgctggccgtgtgctgggccatgatgcacgggagctgcacgatgtcgcgaggcacatgtcatcgtcaaagactatctactcgtattgctctacgataggctacaagaatgagcgctgtgtgaagagagactgctgtggttgcaggccgatggtcactactatgccctgctatgtctatgagctcatgttcgcggtttacgttgaatcgagacttattacatctggtcatacacgcatattacctgcatggcaagctgcgttctcgttgagtactactgat

SEQ ID NO: 101580 - DNA, 321 bp, Oryza sativa
  Clone ID: PAT_MRT4530_99188C.1
atgtcccccgtcgtcctctccctactcccccactccctcaccctcctcctcctcctctctcttgctgatcttaccgctagtgattatctagatgacaatagaccgcggggtgggaggatatgcacgacaagcaacctcgtggcatccggatccatcgctggtgattatgggacaggtgaacccactgcccacaattataggatgggcatattgaccaccgaggacctcgcgacgtccggatccggtgccatagcagactactggatgggtggatctatcgacgacgatgacaacgacaacgatagtagcgatgacagctag

SEQ ID NO: 101581 - DNA, 136 bp, Oryza sativa
  Clone ID: PAT_MRT4530_99189C.1
gtatatgaagagagaagaagaataatattccgaccgctgctatgcagcttctatggattgtcggccgtgttgcccactgctgagaaggggcacatgctgcagattcatgctccatcacgtgtttctttgcgcgttc

SEQ ID NO: 101582 - DNA, 2067 bp, Oryza sativa
  Clone ID: PAT_MRT4530_9918C.1
acaccaccgttcataggcatccacgtcttcaacgactggctggatttcgtcaccgccgactggtgttctcgcctacacggttggttggtcacaccaccgttcataggcgtccacatcttcaccgaccggttggatttcgccaccgccgactagtgtctccacctacatggctggcctattatgccgtcgttgttgggcgtctacgacttcaccgtcagcctgccttcctcgccgccgactggtgtcctcgcctacacggttggttggtcacaccaccgttcataggcgtccacgtcttcaccgaccggctggatttcgccgccgccgactggtgtctccgcctacatgactagcctattatgccgctgttgttgcctgccttcgtcgccgccgactggtgtcctcgcctacacggttggttggtcacaccaccgttcataggcgtccacgtcttcaccgaccggctggatttcgccgctgccgactggtgtctccgtctacacggctggcctattatgccgccattgttgggtgtctacgacttcaccgttagcctacctttgtcgtcgccgactggtgtcctcgcctatacggttggttggtcacacccccgttcatgggcgtccacttcttcaccgatcagcttgcctttgtcgccgccgactggtgtctctgcctacacggctggcctattatgccgctgttggtgggcatcttcgctttcaccgtcgaccgccttcgtcgccgccgactggtgtctgtattgttattgatggacgacttccgctccgggaatggatcagtcagaacatcaccaccggcttgctgtcgccgccaccgactagtgtcctcgcctatacggttgggtggtcacaccgctgttattgggcgtcgttgtcttcaccgaccggccgcctcgttcgccgccgattggtgtcttcgcctacatggttggttggtcacgccaccgttgttgggcgtctacactttcactgttggcttgcctccgtcgccgccgactagtgtttccgcctgcacggctggcctattatgccgccgttgatgggcgtctacgtcttcactgaccaattgccttcgccacctcgtatgatgccaactggagctatcgtcttcacagctggccacgtcgctgccactgctaataggcgtcgtcatcttcaatgcaagctgtctatgtctgctgccgactggtctcttcacttccatggctgcatgattctgccagtgttgattggccttatcgtcttcatgccctcgcctctacgtctggtttataccgctaccactactgatggacatcatcatcttccgtcgccgactggttatatcgccgccgactggtgtttttatcttcacaactatgcgtcttcgctacggtttgcttccgttgccgccgactcgtgttcacttcgtcacggctatgcaactttgtcaccatggtggagcgacttcatctttattatcttcggcaccggcaaacccaattgtcgcaacttcgcatgttttgctacttcaccaaccacgtctacaagagcttcgacatctcggcatgcacttccatattcgatgccgtgttattctactacaacaagtggttccctaattttcaagatttctattcggacatcctcaacacatatctttactcgtgcaatgagtactcgatgacaagaagctacagttctcgactctatgttcagttgccttctaactaaccaaagagtcgggggctacacaaatacaagactctcaaaattcaacaagctgaagaaatcaattaatcagccaacgatatttcaccttcacggttgacctacaatgcaaacgctgatgagcgtcttcgtcattatcatcagttgctacaccgctattgactggattaccaacatcgtcatcttcatcaacatcctgtcaagcctcttcaacatagcctactctgctgccgttgatgggcaacttcgtcatcatagccggctatctctgttgccgctaatcatcattaccgtcggatgcgtttgccatcgccgactattttcttcatcttca

SEQ ID NO: 101583 - DNA, 420 bp, Oryza sativa
  Clone ID: PAT_MRT4530_99190C.1
ctcggaaaaactgatggggccaaaacttagtcttccgggcctcctgggggtataaaggctcataggcctcccaaaaccttgggctcttgttaaaacatttgtttcccccgggggggggtttttcccgaggggcccccagatgcttcaaaaaaaccaccccaaccccattaggttttaaaggctccataagccaagggcttacaaaacccccccggccccccctaatttttccaggaaatgggacctgggggggttccccttatttggccgggggggcccccccgcgggggccgggcttggctggaaaccctaggtgccctccttcacaggggggggggggggaccggttttacctttacccccggacgggtggggccaccccttggactccgcccttttaggggaacgagccccggggcc

SEQ ID NO: 101584 - DNA, 281 bp, Oryza sativa
  Clone ID: PAT_MRT4530_99191C.1
ccgggcgggatctcatccccatcccgcaaatccacccgaccattcgaagcttgtaaaagaagccctagcctctcctcctcctcaccgatgcgccgcacgaagaagacggagaggaagtacaacggaggcaacgagccgaggatagaggtggcgaagaaggtggctgcgaacatcgacacccaccaacagcgacgggaaaaaaacccaccgccttccaccccgagaccgcctagatccgatagatccgcgaggaccataacagcaccgagctgccggctagc

SEQ ID NO: 101585 - DNA, 230 bp, Oryza sativa
  Clone ID: PAT_MRT4530_99192C.1
gggggcaatggatccatttggacgatctggcgatttttattgaaaaccaagtttggtttcaggcctgtttagaacaagggatgtaggggaaaccaagggggatttgaccaaaaacccactttaaggagccaatttccctataaaaaccccctttggggcaagaccaatatcatggggggccatacagggttattcagcctggttccaaaattgaaaggggaattcttttt

SEQ ID NO: 101586 - DNA, 393 bp, Oryza sativa
  Clone ID: PAT_MRT4530_99193C.1
gcacgaggagcaatccgccgattaaactaacccaaaaaaaaaagaaaaaaaactactcctcctcctcggccaaccccgcaaaagcagcggcgacctcgcgaagccaagccaccaccacttcttccttcgctcgctcgcgtattttcttttgcttttttgtgtgctcatttcctcgccgtaaagaagcgaggaggaggaagcgtagcttgagaggctggagagatcgatcgagagagcttagcaacagcagcaaagtgattggagttgagcttgtccgtcttgaaaagtcgctgatcttttcttgtttactttcttctttttatttctttcttgtgttgctgaattgaggttgtgtgggcggccatggcgaggaggcggagataggaggtgggt

SEQ ID NO: 101587 - DNA, 1482 bp, Oryza sativa
  unsure (1)..(1482): unsure at all n locations
  Clone ID: PAT_MRT4530_99194C.1
tcagcccctcactgcctcgcatccatcgcgtcgcctccacgcctccgccttcgcctgcatcgcgccgcctccgccctccgcctccagcaccggcgccgcctccgcctcgacgtcgcctctgcccttcgcctccagcgccagcaccgccgccgccgcctccgccctccgcctccatcccacctccgaccgatccaccgtgtccaacggctccattcttagcttcactctcagtgtcactgtactcctcatcaacacactttcacgtagataactgtcagcgaagtgatagcagaggttcatgttcgagtatttccaaatgccgcaggaggccagcgtgtcaccgtccttcagctgccaccccttcacgctcttaaccgtgtccgacggcttcacccacagcgtcctagtattccccatcagccccctcacgaagatctccatctctgtagcaggatcatggatgccgtaatcggccagcgtgcgactgccgacctcatccatctgcttcccatcgtatctcaaccagaagtcctccgtgatccccgacatatccttgatctttgctttcacgctctccaccgtgtccgacggctcctcgtctgggatcccggcccaagtgaggcccatgtgggatgcatcccaatctggtgaagcacgacccttggacaatcttggtcgtcctccgtagcggcaaggtaggaggacaccaacgacaacgtgaaaagggaggaggatgacggtgaccacgctggcggtgatggggcggcgcaacatggagaaggaggcggacgctctgcacctcgttgacggcgcgacgtgtagaggggggaggacgccggcgaccttgctgacggtgcagcgtgaagagggaggaggacaccggcggaggcagagcaggccgacccgaaagggaggaccaaatgaggcaccactggtggagcagccacgagcccacgatgcgaaggaggcgttggaccggatgccgatgcgactggccttggcgaggtcgccctttcgacatggctgcttgcttgtcctcgtgtctttgcactctgggttaggacacatcagtcgtagcctctccaccttccccatcacgtcatcgacacgatagtgacggagcaccgcaagctcttccttgcggtgctcatgctttcccttcttaggtgtcgcgtacgccttcttctttcgcttcttgttgccgccgccgccaccacagatgcgaccgaggaggtgcagcgtcgactcctcctgaataccatagtagattagcgtgtggccgtcgtccagctgatgcccctggaagatgagcggctgctggtctggcggaagcccctccttgtccacgagcttcaccttcacgctcttcaccgtatccgacggctccatcctcagagccgtcgtcttccctgtcagccctttcacaaatatctgcgtcatcaccgtcgacattgccggacgacggggtttcgngagatcgtg

SEQ ID NO: 101588 - DNA, 1962 bp, Oryza sativa
  Clone ID: PAT_MRT4530_99195C.1
ctaactaacccatccctggtcgggctgtgtgtgtccgggtgccacagcccagtgtgtcggctgcggctttggccgtgctttctccatcaaattgacgccgtctctggccggcacaggcttcacgtcggcgtccactgccgtgccgagggctccccggcgtaaccgttcgtacgcactcaacgggtgcattgatgcaagtgtggacagcaattctctggattggtccattaaagtgcgctcttgtgtagcgatttttgcgaggtcagaaaccaaaatacttgtcccagatagcttagcgagcaaagtacatattgaacttcctattgtctgcatgatgtcaactgcagagccaacagcgtttttgacatcttggatatcagcctttgctccatcagtaacaggaaggcaaagaatggtggccgttagagcttccacaatcccagataaagaatttgcatgatccctctctaaaaaagaccactcctccagaaagtccatttgtccctttagaactgtcatgagtttccaattgttccggaatagttgtagctgaaaccttttaagagcaacagatttacgcattcctaaggtagtaatccatgcatcacttaagtatttctctgcagtcatcttctgcgcggcaagtgcagcatcagcctgtgcatttacacaccgccactgcaaatgtcgattgcataaaatcctcaataggtgctcacagtcaaccttactacacccaagccacctccttttcacttgactatccaacccataaccagatgaacttcttccatgctgatctccatatgatgcactcacccccacagagccccttggttgggatgggcttgacatcctccgtgatcctacaagcttacttggtgaaggctgcctaattggcctattcagtggagacgaaacaaagccattcagcaacgatttcttgactggtgctgtcctgggagatgatgcaaacccagagctatgtgtcatgaatggtgtgcttggatctgcaaggcgattcggcctgctggccgcagcatcctgcaagaaccgcgcaggcacactcatcccctttggggacgagcgtgctctgcccatgcctgcatcctgagacccagaattgctccctgatgacacactctctgtgtccgatgacatcaagtagtcaccgctatcaaacgaggcgcgccgcaccccctcctcgaacaccattgactgccgcagtgagcgcacagcagccagcacagcagcacccctcttgtccagagaacagtccaagctcttggtaagcggattcccctcgaacccatgggcagccctcgccgacattggccacctctgctggctatgaccaccttcaaacaccttccccctctccggcactgtgcccatactgggccgcctcctctcgggcgtggtggacgccgccgccaccggccgccgcaccggcgaaggggaggtggccggcttcgccttgctggtctccaggaagtaggcgcggccctgaaaagcaacagagaggctcctcgtggtggtggtggtagcgccattgggccccaaggcgtcaccaccagcagcagccgcattgctcgtggggcgcgggcggtcgacggaggaggaccgcctcgggagcggcgacgcgaagcggcgggagggcgtggaggccgaggtggaggtggagttggaggtcgccgacgagttggtggtggtggtggaggaggaggaggtggaggtggatttggaggagggggcgaggaggtagcgggaggggacggccttacccttgggcttcccgccgccgccgccgccgcccctggcggcgtcggcattggcgttggcgttggagttggcggatttggacggggagagcgcggaggaggcgcggcggcggtgcggggacggcgacgggttcaccctgggcgcggccgccgcggccgccgctgcgccggcggcgaccat

SEQ ID NO: 101589 - DNA, 306 bp, Oryza sativa
  Clone ID: PAT_MRT4530_99196C.1
atggacaattgccaagacctagtgcaaaagatcattggtgtgagagcaagtactctattagcatcaaatggatccattattggccatgtggaaggccggccacaaaagcaggatctcatcgtctccattttcacgtccttcgctgtacagttactgctaatagctcacgattcatacggattgagccaccgcctgtcacacaataacatcctagcaatgggcaatggcacagcagtacgtggagcttggcgctctcggatcaccgatcgagtcaccgtcgtcttcctcctgcctttgcgtgatgtt

SEQ ID NO: 101590 - DNA, 1407 bp, Oryza sativa
  Clone ID: PAT_MRT4530_99197C.1
atggagcgtcctctgcatcttctgctcgtcttcctctcctcgccatggctgctgctgctgcaaggcgtgagctcgctgcagttcacgcgggatgacttcccccacgacttcgcgtttggagctgggacttcggcttaccagtatgaggggggagctgctgaggatgggaggaccccaagcatctgggacacctacacacattcagggaggcatccagaagatgaaacaggtgatgtggcctctgatggctaccataagtacaagctgccaaagggagccattgttccccaattgatgagcaaagaaggtgccggagccacccaaacccgtagaagccataggagacattcgagcaagggcggcaggagaagcgacgtatcatggtgggacggtattcagatacatgttgtcatgtatcacatggaccttcctcaaagtcttcaagatgagtatggtgggtggattagccccaaaattgtagatgacttcacagcatatgctgatgtgtgcttccgcgagttcggtgacagagttgtgcattggacaactgtacttgaaccaaatgcaatggctcaagctggctatgacatggggattctgccgcctaaccgttgctcatatccatttggcagcaattgtacagctggaaattccagtgttgagccatacttgtttatacaccatagcctgctagctcatgcttcagctgttagactttacagggagaagtacaaggttgcacagaagggcattattggcataaatatatactccatgtggttctacccattcacagattcagctgaagaaattggtgccactgaaagggcaaagaagttcatttatggctggatcttgcatcctttggtgttcggagattacccagataccatgaagaaggccgctggttcccgccttccgatcttctctaaccatgaatctgagatggctgtaaaatggttttgcttgttgctcttgaaacagtttgtaccaggaaccatagtagatcctcgggggctagagcatgcacttaaatatattcgggaaaagtacggaaatttgccgatttatatccaggaaaatggcagtggatcatcaagtgaaaccctggatgatgtggagaggattaactacttagcaaaatacatcgcagccacactgaaagccatcaggagtggtgccaatgtgaaggggtactccatgtggtcatttgttgatctctacgagctctttggtggttactccacttggcattttggccttgttgctgtcgatttcgacagcgaaaaacggagaaggcagccgagacgctctgctagctggtattcagagttcctgaagaacaattcagtcatcagggtggaggaggatggttttgtctctgcagcctctcatgctcagctctga

SEQ ID NO: 101591 - DNA, 187 bp, Oryza sativa
  Clone ID: PAT_MRT4530_99198C.1
gaactagaaacgacattttattattaattcgaaaaccaacatgttgctctctcagactaaatgcaatattattacaactttttaatctggttcatcaaaatcgatcacattgtttcccccacataaacttcgaaacccaaacatccctcttcttcactgcatgatttggttgagagcaccatggcca

SEQ ID NO: 101592 - DNA, 1669 bp, Oryza sativa
  Clone ID: PAT_MRT4530_99199C.1
atggggaactctctggggtgctccgcctccggggagaggctggtgtcggcggcgcgggacggggacgcggtggaggcgcggatgctgctggagctcagcccggcgctggcgcggtactccaccttcggcggcctcaactccccgctccacttcgccgccgctaagggccacctcgacattgtgacgctgttgctggagaagggcgcggatgtgaacgtacggaactactgcgggcaggtgttccatttccgcactgcgcaagcatggagatggacaagagggaacagcaggatcttgaccggactagctgctcaggcatgttctggagccgaagaagctgccacagggaggagcagtgtaatgcagagatcaatgcttgattctttcttctttctggttgttaatatatctggattcatagcagctcaatgtgggagatgagcagcggttattttttttgcctccccagctgtgtttctttcccctatttgcagccaagattttcttgattggtgaagtgaatcctgcagcttttggctgctgtagtttttactgtattgtagcattttggttacaaatgtgtgtcgtccctgtgatcctagatagccccaaaatcaccagttactcctctttgtagctgtatgtaaattgcaggagttggttgggatttgttttctggtaaagatgttgagaatctatgtacaatggcatcagtcatttgccctcttaaatcttaatgataatactatatagatcctaaaaataaaagagcaaacttaatatagctaggccagattatgtgctctgtagaattgcaataatttcagaaactgttaagttaggaagagaatttgggttgctgcacaccgtagcctctgtggatgatagtgatctttgtgcagtttgccttgaaaggtcttgttcagtagctgctgaaggttgttgtcatgagttctgcatcaaatgtgctctttatctttgctcaacgagcaatacccgtgttgagttcactggcccacctggatcgattccgtgccctctttgtcggaatggaataatgtcatttaccaagttgccaagcacgccaacagaagggcttaaatctagctcagcactcacgttctgtaatccatgcatgctaaacacccgatctgtagactcaccagcaactatcagcaaagcagaaataaggcgcaaccgtgttgcagctgtctcttcagagctagtctgcccactaacctgcagcccatttccatcgtctgccctcccgacctgcaggtgcagtgacgatgatccatgtgatgccatagaaacacaggatggttccgaggtgcaatctcctcagccatcgcactgcgcaagcatggagatggacaagagggaacagcaggatcttgaccggactagctgctcaggcatgttctggagccgaagaagctgccacagggaggagcagtgtaatgcagagatcaatgcttgattgtttcttctttctggtgtggtactatatctggatacatagcagctcaatgtgggagatgagcagcggttattttccttggctccccagctgtggttctttcccctatttgcagccaagattttcttgattggagaagagaatcctgcagctctttggctgctgtagatttcactgtactgtagcatt

SEQ ID NO: 101593 - DNA, 664 bp, Oryza sativa
  unsure (1)..(664): unsure at all n locations
  Clone ID: PAT_MRT4530_9919C.1
ccggccgggatcagtcagcaggagagatcgatcgatcagccatggccacccggatctggaggagaaacactagcccggcgctgctgctgctgctgcttctggcggtgacggcggcggcggcggaagcgcgccgtgcggccgtgggcatgaggcagctcaagtccgcttcgtcctcgtcgcagcatgatgatcctgcaacctccgacgacgaggggccggtcttgtttccctccctaacggggacgctcccgccatcccatctcagcggcgggagctccggtcgggcttcgccgctgccggtggctgggttggccggcggagatgaggaggtctcgtttcccgccaagcacgcgnngggaggtgccgccctccggtcctagcaagccgccgccggncagttgggttggccgacgacgacgagggggtctcgtttcccgccaagccgcgggggaaagtaccaccctccggtcctagcaagccaccgccatcgtcgtaccatttgttctagcgaaattaattaaacccctttatacaatggtgttattgtgtactactcagaatcttattgtcttcatcaaccatcatgtgtaatgcagcgtaattggaaataaacacatgattagtagaatgtgtttttctcaaaaaaaaaaaaaaaatttgcggc

SEQ ID NO: 101594 - DNA, 622 bp, Oryza sativa
  Clone ID: PAT_MRT4530_991C.1
gcacgaggcaaagatggtagctatcatttatgatgaccaagtggatcgtttagatcccctacttcgagagggttccgcatattatgtgtcgaggatgtccatagagccagctagtatgattttgtatcagtggcttgcagaccatgcttttgtgtgtgttttcacacgtgatactactattactgagatagcaaacatgcatgagaagatattaccattactccctccgcttatgccacttgatcaagttttcgagtttacttaccataatgacatttatgttgatgttattggaatggtcatctttgtaagctctataggctttgtggaaggctacaagaagaggatcccatataggaatattcttataattgatggcagtttcaaacctgtgatgttagttattaaggataaaatgcttaccgaccatttaactaaatgggcgagatgctctaatgagcaacctatcattgtagcaacaatgcgtagagcaaagcgtgaagaagaccatagcctgcacactacatgcttcagtagggtgcagtttgatcctaatgttgcagttgcacgtgaattaaggaagagcctcagtatggagcttactgggaagtcttctccatga

SEQ ID NO: 101595 - DNA, 500 bp, Oryza sativa
  unsure (1)..(500): unsure at all n locations
  Clone ID: PAT_MRT4530_99200C.1
tcgttatatctgggggagcaaacatggagaaggcatattacattggtaccaggtgtattgccttagatctgagctttgcgcggcatgacgctctgattcctacaagctcgcatgtgggtgctccagattcacgtggatacgagaggtggagagcaaccgcgatctcaacagggtggtgatttgccagtccttagaggcttgcagtgctggagcttgtgggcactgnccacagccagacgatccaagcgccagctggcgctaccaaaagtggcgtagcgccagcttccgcttctctgacgaccacacctgtgccgacgccagctgtcactgggcctgcttcttatgtagccatcaattgctgaggcctctcaccagagaatgcgtcaatccctcagtactatggcggaagagaatacgggtacagaactttctacctgtccaacaatactttggtgtngaccagaggaggtgggaatggcgccattgtgtttcagtctgac

SEQ ID NO: 101596 - DNA, 2864 bp, Oryza sativa
  Clone ID: PAT_MRT4530_99201C.1
cagacggtgtagtggtgctggacgttgtccatgtcgaggcccttgagcctgacggtggactccatctggcccttgagcgtgctgagctcgcgcagccgggccacctcggcgcggcgcttggcctgctcggcgatctccgagagctccctgtagctgctccgctcgccgccgccgacgccgccgaggtggtcccccatctccggcgtctgcagcccgtgcagcgtcctctgcgccgtcgcccactgcgcctccctctcccctctcccgtaatccttcttgctcgtgaaggcaatcttgtgctcgatgagggtgtcccaggcgcggccgctgagggcgtagcggacggcgaacttgaagatgtcgagggggaggaaggtgacgatgctgtagagccagatgacgccggcccacccccagccgatgcccttgatgtgggcgaaccccaaggtggcgtacaccgtcaccagcgtcgcgatgatctgcgcggcgacgaaggcgccgcagagcagcatgccggggcgctcgacgaagcaccagctgcgggagcgcgtcacgaagatgagcgcctggctgatgatgctcacctgcaggtacagtgccgacatcatctcgtccttctccatcagtggcttcacatggaacgtgctggtgaagaaatcggtgctcctcatggcccagaagaagaggacggtcatgacggcgaggtaggtgccgtagacgatgccggtgatgaagatctccggcaacttccagctgtccgggtgcggcgacggcttcaccctgtccttggatattgtcatgatcgttccgtcgttgaggatcgcgatgacgaggatcatgaacggtgagaaatcgaacttccagatgagagcaatcagcatgaatccaagcacaatacggatagtaatcgacaccgcgtaaatcgtgtaatttttcatcctctggaagatagcgcggctggtgaggacggcgctgatgatgacgctgaggccaggctgggtgagcacgatgtccgaggcgctcctcgccgcgtcggtggcgtcggcgacggcgatcccgatgtccgccctcttcagcgccggcgcgtcgttcacgccgtcgccggtcatcccgcagatgtgcttcatctcctgcagcttcttcacaatctcgtacttgtgctctgggaagacgccggcgaagccgtcggccttcttgatgagctcgtcgacggggacggaggcgatggactcgtccttgctctggccgagcagcgccgacgaggggtacatgttcacgcccatcccgagcctcctcccggtctccttggcaatggcgagctgatcaccggtgatcatcttgacgttgacgccgaggtggagcgcccgccttatggtctcggcgctgtcgtggcgcggcgggtcgagcagcggcagcaggccaacgaactcccacggcccgccggggccgtccttcctcctctccggcacctcctgcctcgccacggcgagcgaccggaggccccggtcggcgtacctgtcgattatggcgtgcaccttgctcctcacgtcctgtctgcatttgcacagatccagaatacggtgccatgagccgtcggcgaggtcgacgtaggtgagggcggtgcgcttgtcgacggggttgaaggggaggaagtgctcctcccggatgccggcgcgtgcctccttggggtcgtcgagcatgccgaccatggcggtgtcgatggcgtcctggttctcgacacgcgacgccctggcggtgaggaggatcacctcgtccttggcgacgccctggacgaacacctcgatgaggcccctgtcgacgctgagcttgttcagcgtgagcgtcccggtcttgtcgctgcagagcacgtccatggcggccatctcctcgatcgccgtcatccgcttggtgatggcgccctggtcagagaggcggtgcgagccgatggccatggtgactgacagcacggtgggcatggcgatggggatgccgccgatgagcagcacgaggaggttgtcgatgccgtcgcggtagaggcggtgctggatcaggtacatgacgatgacctcgacggccatgccgatggcgatggcgccgatgcagaagttgccgatggcgcggagcaccttctggaagtggccgacctggttggtggtgtcgacgaggtgcgccgccttgccgaagaaggtgtggacgccggtggcgatgacgacggcgtcgatctccccctgcttgcacgtcgacccggagtagacgcagtcgccggggagcttggtgaccggcagggactcgccggtgagcgccgactggtcgatcttgaggggatcgccgtcgaggaggcgggcgtcagcggggacgatgtcgccgagcttgacgttgatgacgtcgccggggacgaggacgaaggcgtcggtctccgaccacctgccgtcgcggagcaccttggtcttgggggcgaggttcttcatgagcgccgccgcggcgctgccggcgttgctctcctcccagtaggatatggtggagttgatcaacagcagcgcgatgatcccgacgaagtcctgccagtccggcggccgcccgccgccgttcgccagcgcgatcgccatgatcgccgccacctccatcacccacgacagcgggttccacatgaaccccagaaacttcagtatcttgctctcctttttctcttcgagtttgttggggccgaagacttgggtgcgggcgtcgccctcggcgttggtgagtccttcccgagtgcatttcagatgctggaaaacctcctccaacgggatgtgctccagatcaacggcctcgttcttgatctgctcgagcgcatccgccgtcgacgacgccgtcgccgccat

SEQ ID NO: 101597 - DNA, 345 bp, Oryza sativa
  Clone ID: PAT_MRT4530_99202C.1
gaccaatggatgtggaatacagctcctgcttcacgacctgcgcacaggggatccccagccacaacaggccatcctgctcgctgagtgctggacgatgagaaccacattctcgtgcataggacagccgactgcactctagatgcgacgaagtatgtagatgcaggaggctgtgcagactaaggcgaactactcactgatacataggttctcgacggaactaaggacaaacctgagtggagggagggacctgcatattggacaccacgttcaagaatggggcactcagtgccatggcatggtggcaggaaagttttgatgcttggaggcaatgctaagagtggtcca

SEQ ID NO: 101598 - DNA, 117 bp, Oryza sativa
  Clone ID: PAT_MRT4530_99203C.1
gcttacttctgcattgcctctgaagctctacaagcctatggtgtttgacgaggtcttcactatcttggttctgtcgattgctctacgagcggtggggatgctgcttacgcggctgct

SEQ ID NO: 101599 - DNA, 132 bp, Oryza sativa
  Clone ID: PAT_MRT4530_99204C.1
atggcgaatggaagcaatcaaattactcaagagaggccagtccaaacctaccttgtgatgtatgacttggttgcattgagcatgatccctgaagcttcccagacagcaaatgtcctttttgaggtcgtccag

SEQ ID NO: 101600 - DNA, 1188 bp, Oryza sativa
  Clone ID: PAT_MRT4530_99205C.1
atgtctcactgtgatggcctggtgttattcccaactgacaccaagttgtatgtgatcaacctgaccacaagtgatgttcttaggttgcctgacaaccaagagtctgatacgctgaggcaggcaactgggctgggtcttgaccctcgcaccaacatgtacaaggttgctcgatacttctaccgttctgtagaccatactattgggacttatgatgcagctatggaagtgttctcaattggtcaggatgccttctggagggagacatcagaggttccaccatacccagttcgctctatggaaagtcccattcactccaagggatatcttttttggaatatcgatgagaggttcctcaaaggacaatcacgtggtttcctttgcttcagcttagaagatgaaacatttagtcttatcccccatccctgcccatatttgccattgaaccatggaacatcactcgtatcagagctagacggggagttatgcgtaggtttattcatatcaggtcaacaacagttatggatgtacaatggcaatcagtgggatcagcgcttcagcattaacgtacccgggccaaatgacttgtacattccattagatattcttcctcatgatcaattacttcttcaaaggggtccacatctgtaccaccacaaccaccagtcaagtgaagacataaaagaagtggcacgcatggatcaactcaactaccagagtcccccgggagaaccctacgtctacatggaaaacggatatcaactattattcctcagtgctataattcaggcatacctgactaaaaactttctattcaacctaaaacaggatgggaaggtattgcctaatggacctgttgtgatttcacctgatgtttatttccttcattgtaccaggaaggtagcatcatctctccaatatttgcatattcttgatgacgacatcctccactattacccgctggcaaagacgccaaagtcgggcggcgaccgtttatacgaagagcaccacatgagtttaagattgcatgtatggagagatacagataagcttagttacaaaaagatgggaattccaaaagggaaaatctttatcatcaacccgaaggttagcttgtcattcttcccttcttgcaaagactacaattcctggaattactggaagatgccatctccaaatgttgatctgtag

SEQ ID NO: 101601 - DNA, 2206 bp, Oryza sativa
  Clone ID: PAT_MRT4530_99206C.1
aaattatcagtgagcccattgatactcaaaccgagaaaattatcagtgaccccattgaagcgcaaagtgagaaaattatcagtgagcccattgatgctcaaaccgagaaaattatcagtgagcccattgaagcgcaaagtgagaaaattatcagtgagcccattgatactcaaaccgagaaaattatcagtgaccccattgatactcaaagtgagaaaattatcagtgagcccattgatactcaaaccgaggaaattatcagtgaccccattgatactcaaagtgagatgttggataattttcaagatgacactggaagggaaatgcacaccagggaggtcctttcccatgttatttttgaaacccatgctggtgagacaaacattaccattggtaagagtgaggagatttcacagtttgtcactgtaaaaacatgccaagattgttctgatgcaaattcacctgtttatgaaactgcaggtttgtcaagtgaaatgcatgacatctcttcaattacttctgctcaagatgcatgccaagagaaagtggtcattgtcagcagctatgagactgtggagacctcatataatgtgcctgatattttggttgacaaagtttgtcatgctgttggtaacccactggatgattctttacagcccaaagagcagtcgggagtctccattgaggaaatagaacatgtaagttttgaggacaaaccactgtcatattatggtgcttccagcaatattgaagacatgactaagctgggtattcaagaccaacaggtgccagtctttgaggattccggttcccaaaactcccaagaatttgttccagacaaggatatttgtgtggatactgttgttaatgatcgtagtgcccatatagtaaatgatttagcttgcaatcatgattttgtttttcctgctgcttcttccagtgttgaagagatatcaaattatgtgcctgataatcatcttcatgatgtaacaaaggacttcattgtggaaaataaaacatgcaatggagagcttaacatttcccttgtccaaacgtcaacaacgggagatgagaccacagaatgcatttctccatcagctaatattcctaataaagtagaactgcaaggttcacagattatttctgatctttctagtttgagaaaggttgaagcagaaagcaccacactagaagatactgaaagcagatctagttctgctagtggagtcgaaattaagcttgtgcctgaggctatatacgagccaagggaagaagcagaagcagttgtttcattctcagagttcgtagaagaaattcaatttcagtttagtgacagtgaaagctttgctgatcgaaagaccacagatgatgctgcatctactaaagaggcaggtgcagtagaacatgatgaatctgattgtgacacagaacaacagggagggaataatacaggtcttggaaataacctggaaaactgttctgattcatcaaggcctgagactatccctgttcctattccaggaagtgagtttcactcagatgacaataatctggaggctaaatctctaccaaatctccgctctcacatacatgatcttgaaaggtctgacagttttcagctaagccgctcactacagtcgaacggtgaaaataatggggttgagccagtcaagagtacaacttctgacttgccaattcaggaaccagaagatactggtgattcaaaagaaaattttgtcccaccggagcctactaacagcgcaatagctgataacctgaaaatagatccattcaatccttgtgtggaattatccctatgcaggcacctgttatcagaaggcatgggagaagatgctgcatgcaaagcattcgatgcggagaaggtaaccttagagaagtttcgtgccatgaagcagtcgctgataagaaacaacaagcttgttgttaggattgctggtcgatactttccgtgggatgcagctgcacctgtcatactgggcatggtttcttttcaggaggaacaatcctttgaaccccaaggtatgataaaggtagagcgagttgagccaaatgcagcaccaggtggctggagaatatggccattttctttcaaaaggacaaggtctgttaacactgtccagccagtttctgaaagcactgaggaggcttcctcttccgctcctgttaaagaagtggagagagaaaa

SEQ ID NO: 101602 - DNA, 156 bp, Oryza sativa
  Clone ID: PAT_MRT4530_99207C.1
atgcgggattgttcatatagagccaggcgggcttgctacacgacacggatgatgacagtgcgcttggttcgactaacggagagcacggtctcacttttaaatgactggatcgaggctgccatgcgtactacagtcccaaacgaccacccggctctg

SEQ ID NO: 101603 - DNA, 284 bp, Oryza sativa
  unsure (1)..(284): unsure at all n locations
  Clone ID: PAT_MRT4530_99208C.1
caggtcaaccggctcctcctcggcttcttcaccgngcacccggttgccgccgattgagatcctctatctaccttcgaagtgttcacgcgtttatnactnacatgtgaatctagagtttactgaactnactcacatgttagtaataaagtcacgtnacttacaagatagactatcttaacgtaataaaatagggacgtctagaagcaaagtgtaatattgggatcaagtattgaactngcacacaatttataatccaaaaaaaaaaaaaaaaaaaaaaaaaaaaa

SEQ ID NO: 101604 - DNA, 225 bp, Oryza sativa
  Clone ID: PAT_MRT4530_99209C.1
atggatgaacggtcagatttatatcggtacctcgcggtacaggtacctggagaagcagtagcgaggtggcagccaggcgcggcgcgggtggaggcagtagcggcagcggcctggcgcgggggttgcgacggcggcccgcacgggggcagctatgacctggcacgggggcagcagcggcctggcacgggggcggaggtggcggcccgcgtggggcagcggcagtga

SEQ ID NO: 101605 - DNA, 1217 bp, Oryza sativa
  unsure (1)..(1217): unsure at all n locations
  Clone ID: PAT_MRT4530_9920C.1
atggccgccgccgccgataacgaggtggccgtcatcacccaccgcaccgtcgacgccaacggcctgcggatgcacgtcgcggaggccggcccgcccggcgcgcccccggtgctgctcctccacgggttcccgcaggtgtggtacgcctggcgccaccagatgcgcgcgctcgccgacgcagggtaccgcgccgtggcgcccgacctgcgcgggtacggcgactccgacgcgcccgccgccgagctgcagtacacggcgatgcacgtcgtgggcgacctggtggcgctcctcgacgccgtggtcggcgcggggaagccggtgttcgtggtggcgcacgactggggcgcgctcacggcgtggaacctgtgcctgttccgccccgacagggtgagggcgctcgtctccctcagtgtcgcgttcaccccacggagccccgcgaggaggcccgtcgacggcctgagggcgctctacggcgacgactactacatctgccggatccaggagcctggagcgatcgaagctgagttcgcacggctcggcacggagctggtgctgaggaagttcttggcttaccggactcctggcccgctgatgatgccaaagagcgggtgggggtcgccggacgacgaggtgccattgccgagctggataacagaggaggacatcaagtactacgcgagcaagttcgacaagactaatttcaccggaggattgaactactaccgcgccctcaacaagacatgggagctaacagcaccctggactggagctgagataaaggtgccagtgaagttcattgttggagacttggatttgacatatcatactccaggcattcaggattttattcacaaaggtggcttcaaaaagtatgtaccgctgctggatgatgtcgtggtcatgaagggtgtcggccacttcatcagtgaagaaaagccaaaggaagttagtgagcatgtaatcagcttcataagaaagttatcggctgaaatgtgattattcatcatgaaattcagagtgagataaaaataattgcaatgtattcttgcgtgcgaaccgtaaagtatgttagcttgcatttggaggatgtggggcgcgtaatgctcatgaattggtgcaattagtaaagtgttcgatttgtacacatcatgaagtctataattgtcatatgcaatattaattggttaanaaaaaaaaaaaaaannnaannnnnnnng

SEQ ID NO: 101606 - DNA, 717 bp, Oryza sativa
  Clone ID: PAT_MRT4530_99210C.1
atgggctacttttacaaggaaattcacattgcagggtcccgccagatcacccatggccaggcgggccataagtgtcctttcatgcaaaaatcacttccacaagaggtgattcaggggtcacatgtgacaatttatttttgcatgcgtccccttaagaggtccacctacgagaataggtggcgtggagacggtggccacaggggcgggcgggcgctggcgtgcggatccactgctcccaacctaaggaacagtgacggcaggagcgagcggccacagcgaccggctggtagatccgccgtgcacagatcgaggcgccacccccatcctcgggagcgagcggccacgacagctggcgggcggatccgttgcccttgtccatcggagcaacgccggtgggcggatccgccactcccgccctcaggagctacggtggaagcaaacggtcacggtgaccagcaggagaattcgccgcccccgccatcaggagcgactgcggtgcagggatatgctgcccttgtcctcgggagcagcgggctcaggcagtgggacgggagcaggggcgacgatgatggcagtgatggaggctgcgatgatgacaatgacggtaacagctgcacgatgacgatggcagtgatggctgctccaacaacactggtggtggtggctgctccgacgacgacggcagcagtgactagtgtcgacgggagatacccgtag

SEQ ID NO: 101607 - DNA, 730 bp, Oryza sativa
  Clone ID: PAT_MRT4530_99211C.1
cctgcttgataagtgcctccttgcacaacgccatattgacaccacattcgtcacgcggattgttaatacagatgtccggtatctcgaccccccgaggcactctcgcgaaatttatcgccaaaaacatctctgcgcttttttccccaggtcttcgctatgtgtccccaaaagctctcgtcaagtatctcaacatgggatcggaaaccaccccggttggggacacatgcatttgtgagtaaggcagtgcccggtggaatgcgtgtcaaaccaccctatataaatattgtacgggcttcgcgccacactacacaccttacgtgcaactgcatccgtaggtctgttgtacccgttgtgaatggctatgcccgacaggggtattaccaagttcggtccaaatgcggcagtgacaatacatctaatcagagccaccgtgtgcgatggctaaattgtagctcccagtcgagccatctgccccaatgaggttaccccatattcagcatcttaggcttactcatgtgcgatatagcctggcgttaagtctctcctactatgattaacacgtgtgtcccttgatattttctctccggagttgacctccatccgtcgttcgctgtaaatatggtcacaacatcatgtatgtttatactgggcgatgtaattggggaattcaattcccctaaacgctgtggtttaacatagtgtgttgtgtatttaaaaaaaaaaaaaaaaa

SEQ ID NO: 101608 - DNA, 198 bp, Oryza sativa
  Clone ID: PAT_MRT4530_99212C.1
atggcgaagactatggatcaaagacggcgaagggcggagaatcactcgggtgcctcgcagagccaaagacctcttgggcgaaggatttccacatggatcactgcagaaaataagcggcatcatcccatcgggaagaattttgagaggaacgcggtggagcatctgtcccaggtgttgactgtcgcccggttcacgtag

SEQ ID NO: 101609 - DNA, 2220 bp, Oryza sativa
  Clone ID: PAT_MRT4530_99213C.1
aataaaaattaaatttttttatttattttttttttttttatttttttttttttttttttcaaaagaacattagtcagaagtatcttcaggtcaatcaatgatctgatgaaacattctacattttcgagttcaccagtttccaaatacaagtttgaccagttgcacttgggcacttggctataccgagacatagtatctggacatggtactggaaggaatagaaatggggatacagctgaccaatgaactagagaggccccagcaaacgaataataaagacatttacagaaccgtcacattaattataagagctaaatttcaggcacctcaggctgaccgcttatttaccgtgtccagaggaccatcatctggcaaaagcacttcacatcctcctaacatatcctgtgatacaaaactcaacaggagatgctgtgctcatctacagattatgatttttacagagcacatgtagatgttccttcattgctagtactgaaccctctcatccccgtcaaaattaagaccttcaatacctttgagggcagactcgtaattcttaacgttagatgagtgtcgggcagaagatgaatgctttggttctgccgaattgactggtgagcttttctggggaccagaggttctccgaaatgccccagggcttgcatcagtggcacgagttcgagatggttcagaagtatcaataggcatcacatctcggctacttgaaacagcaggcctccttgaagatccactagatcgtcccaaaaaattcgaggcagatatcacgggctctttagaaaaagaagcatcatttcccacaggtgccttctgtttagccaaagtcccaacacttgcaatagggggtggggcacggcgccgatccattgatgaccaaccactagtccttccttcatcaacacctgactgcctgtcgttttgcaatgctggtggtgctaacccagaaggtcctgcaccatggcccactgcacggggtggagcactagcaatttgagattgctggtacttcagtattgtccagtcaaacacatagtcaaactgaaaaccttcccggataaaaaggtcacggaaaagtcgcttaaggtaggaataatcaggcttgtcatcaaaccgcagtgagcggcaatagtggaaatatgatgcaaactcagtaggatagcctcggcatagagcctcaattgatgttgcaacttttttctcactgattttctcatacttttgtttctttgttcctgctttcagaccctgccaaggaagactcccccttaaaaagtacataagtacatatccaagagattccaagtcatctcttcggctttgttcaattccgagatgggtgttcacacttgcatatcttgctgtcccagtcaagtttttgttctccctatatgggatgtgctgatgagtggaggtatccctgtactttttagcgagaccgaagtctattatgtagacctgattagctcgcctaccaagacccataagaaaattgtctggcttaatgtctcgatggagaaaagatttggaatggacaaattccactcggtttatcatctgatcagcgagcataagtacagtcttaagagataattttctgctgcaaaaattaaataggtcctcaaggcttggacccagcaaatccataaccaagacattgtagtctccttctacaccaaaccatctgacatttggaattccggttcctccttgcaaaatcctgtaaatcttagactcgtagagcaactggggatgctttgtcttcacgttttccagcttaatcgcgacctcctcgttcgtctggatattagttccgagatagatctccccgaaggagccgctcccgatcttgcgaccgagccggaacttgttcccaacccgtggctccatcagctccttccccagaggaaaaaaccagcagagccgggaagcgtccacagagagcaaaaccggagaggggggggggggggggaagggctaaaaacacgcgcttttccaccggaaatctagcggcgggagggagcacagatcggcgcggcggggctgggagtgggggactctcgtgctacctagggtttgagaggaggcggagggaggaaggggaggaggaggaggaggaggcggccatggccgtacgggcgaggcgctgctgcgtgcgtacacacgcttcgcccggattagttttttttttttcttttccttttt

SEQ ID NO: 101610 - DNA, 210 bp, Oryza sativa
  Clone ID: PAT_MRT4530_99214C.1
atggcgaagactatggatcaaagacggcgaagggcggagaatcactcgggtgcctcgcagagccaaagacctcttgggcgaaggatttgtcgtttcgacaacagagaccgacatgaagaaaataagcggcatcatcccatcgggaagaattttgagaggaacgcggtggagcatctgtcccaggtgttgactgtcgcccggttcacgtag

SEQ ID NO: 101611 - DNA, 508 bp, Oryza sativa
  unsure (1)..(508): unsure at all n locations
  Clone ID: PAT_MRT4530_99215C.1
ggggaggagaaatcccctcccattccctgtcagaacttacaggggttttatctcaaggggggccctcaaaacacttttcaagccttcagcttctgccccccaggggggggttacaaaacgggactgcggcctgctccgcagcacaggggccaaatcgaatcacgggcgcaatcctcaccctttcctccttcacgcacgtcgggggaagaaaaaagagcacagcttcccaaagacacaaaactcttcactggcaaaacaccctgggaagggcaaatggggctcattgcttttcggcctcagcttcttccttttcggnttcggactcttcatcggctggggcgccctggtcctggtggtcctccgcgccgggatcgttcatgttgctctctgcctcggggaaccccatttcgtcccttccctcccctgtgtcccacggccagaaagccttcctcctgaacttgggagggaactgcttgctgcccccggggaacatcttttgggtgggggg

SEQ ID NO: 101612 - DNA, 466 bp, Oryza sativa
  Clone ID: PAT_MRT4530_99216C.1
cccggccctcggcttttcctctgcacttctacaggcgacggcggcggctctgacttgctgcggcagctgcggcctcgcttgggagtgaggcggcggcggtggcggcggcagctgcgaccggaggctgcaacggcggaagttgctcccggaggctacggcggcggcagcccatttctcctctcccccaagtgttcctgcgtaagcgcaattgtgcaaatcatcggaaatcatcgtgcgggggtgctgcgggcggttgcgtcgagccgcgatatttccccccctccgctcgccctcgactccgactccgactcctcgcgagttcgcccgccgccgccgtcgccgcaaatacctgctagccactgatgattgatgaactgttatcatgtcccctgtgatgaaaattgtgatggcaagagaattcagtacaattatcatggtgatgaactatttaaaaaaaaaaaaaaaa

SEQ ID NO: 101613 - DNA, 686 bp, Oryza sativa
  Clone ID: PAT_MRT4530_99217C.1
ctgcagccacttcagataacaagctacgattatgatgctccaatcgatgagtatggtatattaaggcagcctaagtgggggcatctgaaagatctacacactgctatcaaactttgtgagccagctcttattgcagtggatggctcacctcaatatataaagttaggatcaatgcaagaggcacatgtatattccactggagaagtccatacaaatggaagcatggcaggaaatgcacagatttgctcagcttttcttgccaatattgatgaacataaatatgcatcagtctggatctttggtaaatcttatagtctaccaccatggtctgtgagcatactaccagattgcgaaaatgtggccttcaatactgcacggattggtgcacagacttcagtttttactgtagaatctgggtctcccagtcgttcaagtagacataagcctagtatcctctcacttacatctggaggtccgtatctctcaagtacttggtggacttctaaagagactattggtacttggggtggaaacaattttgctgttcagggaatattagagcacttgaacgtaacgaaggacatatctgactacttgtggtatactaccacggtaaatatttctgatgcagacgttgcattctggagttcgaaaggggttcttccttcattaacaatagataaaat

SEQ ID NO: 101614 - DNA, 549 bp, Oryza sativa
  Clone ID: PAT_MRT4530_99218C.1
ccggccgggaattcaattcctctcacctctcgcgtctacttcgtccctctcctctcctgtccatatctgatgatgcatgctgatgatccttcgtattcctcgatctccttccaacactgtgtacgccatctactctctggtataacaataaaaatgaaacacattccccgtgattccagatcccaccatcatattcgccctgattgatcgttaattgctctttctgcaagcgttgctactgcaatcagcacgatatggcatttcccagcaacatgatgcatgatcaccacggattcgtataaggacaacatgatgaaaacggtgggcatgggtagatacacagacatgttcttatcacagactatgactcccctgcagcaacaatgttgcatgcaactgcaacgcatgatggctcatggtaactgtgacaccagttaccacatgatgcatagcatgcaacaagttatttgtgctgaactctatcagcaacatatgatgatgaacatgacgatgcagatgccatacatgtgcaacatggtccctgtcaac

SEQ ID NO: 101615 - DNA, 237 bp, Oryza sativa
  Clone ID: PAT_MRT4530_99219C.1
acgtgataccaaccattggtatgattggccacgaatttatcagatatgctctcgatacatatactgcgtgtctatatgccagagctgtgttttcacatatactcacccaacgatatttggggaactatggcaatatacccgatcggagagggcgggaagagattattacatatgtgtgaagagcagaggccattgagatggtacataaccaaactgtaaaataaaaatatattgcat

SEQ ID NO: 101616 - DNA, 250 bp, Oryza sativa
  Clone ID: PAT_MRT4530_9921C.1
ggcggatgatatgcataagccctggccgtatctgttgctccaccaccaccgccacgagaccgagtgtatcaaagaggcgcacttccctcacccatacactccgtacatcgagaataatctaacaccaaaagccgtggctatgcccgacctggggattgctgatactagtggattgaacaccttacaatccgtgaacggtcataaaagtaggaaccgacaactcctatgcagcaaatgcacctgaggacct

SEQ ID NO: 101617 - DNA, 530 bp, Oryza sativa
  unsure (1)..(530): unsure at all n locations
  Clone ID: PAT_MRT4530_99220C.1
agaaggttttatttccccaaaccctagcttcggatctggagggcgaacccccgcgtcttcttcgacatgaccgtcggcggtgccccagccggccggatcgtgatggagctgtacgccaacgaggtgcccaagaccgcggagaacttccgcgcgctgtgcacgggcgagaagggcgtgggcaagtccgggaagccgctccactacaagggctctaccttccaccgngtcatcccccagtttatgtgccagggcggcgacttcacccgcggcaacggcaccggcggcgagtccatctacggcgagaagttccccgacgagaaattcgtccgcaagcacaccggccccggggtgctctccatggccaacgtcggtcccaacaccaacggctctcaattcttcatctgcaccgtggagaccccctggctggatggcatgcacgttgtcttcggccaggtcgtcgagggcatggaggtcgtcaangtcatcgagaaggtgggctccgcagcggcgccaccttcaaggaggtgaag

SEQ ID NO: 101618 - DNA, 173 bp, Oryza sativa
  Clone ID: PAT_MRT4530_99221C.1
gcggcactaagtcccacatcaaggccgcgcccaatgcaaccgattctgtgcacagtcatttcacccactgttcctccaaaggctctacccagagacttggtgccaaccccatgactcccggttccctctaccattacgccttccagccctgcgtcccccaattatccttctaa

SEQ ID NO: 101619 - DNA, 552 bp, Oryza sativa
  Clone ID: PAT_MRT4530_99222C.1
atgccatggcaggtcaccgcggcgccactggtggtcacggatggcagcgagcagacgccgtcagggacgctgacggacgcgtttcatctgtccaaggcggatttggagtggttttgcgtggaagtcgtcgctgttctcgtcgtcgtcattacacgggccgacaatgctgaaggtggcggtgtacgcctcggctatggtactggcattgatggtgacaacgttcgtggccttgccggggacagaccgggttgtgagagccatggggccgcctcgagtgttggtgcgagcgtggcagggcaggcgcctcaaacagcctcgactactgctttgaccttctccttcccggcgtcgaccacgctgtccccttggtggagtcctccatcgccgcatccaagggcgacaagttcgccgtcgacctcacctcgatgcagccccagagctgagacggcacgccagggtgcagcccacgaagcagcgaaacttcagccagtggctgctcacccactacagctatcgacctactgtggcgacctatcacggcatcctccctag

SEQ ID NO: 101620 - DNA, 322 bp, Oryza sativa
  unsure (1)..(322): unsure at all n locations
  Clone ID: PAT_MRT4530_99223C.1
ttgcagcgcaatgtgatgatgaatgggtgtgagctggacgacttgacccaagccatagcacaacattaggcacgacgactgataaatcggtgttggctgcttgtgaactgccacaagagattgttgaaatntggtgcaaaaccctgtgtggtttgctccagtgaaccttaacgttatgaaattagggaaatggagagctatgcggcaatggctactactgggtcatggccacccgaggcacctcatggatgtaactgctgtctaccagataccagtaccaagggaaatgatatgaattttagagagtttntgaactaaaaaa

SEQ ID NO: 101621 - DNA, 1024 bp, Oryza sativa
  Clone ID: PAT_MRT4530_99224C.1
ggcccaatccccctcctccgccccttggcccgctcgccctccctcctttcccccttccttctcgtgggccggcccagctcggccccccctctccccctaagtctgcataaccccttcctggcctcctctctccttccctcaccgacaggtggacccgaggccccacctgtcagctcctcccccttcctccagccactccgccggcaaccgccatggcaacccgggtcgccccacgtcgccgctaaaactgccgcctcctgcctcccgcgcgcacatccgaccgtgcggacgtggtcgccgcccactcctccaccctctcccccacccaatccccctcctcctccccttggtccgctcgccctccctcatttcccccttccttctcgtgggccggcccagctcggccccccgtctccccctaagtctgcataaccccttcccggcctcctctctccttccctcaccgacaggtggacctgaggccccacctgtcagctcctcccccttcctccagcctctccgccggcaaccgcatggaaacccgggtcgccccacgtcaccgctaaaactgccacctcctgcctcccgcgcgcacgtccgaccgtgcggacgtggttgccgcccactcctccatcctctcccccatttttccccaaatttttgtgccaattcgagctccacctcgcccacgtcgccggcacccattcctccttcaaatccgcccccctccagtcggccgctgccgccgctgccgccgtccccgtgccgcgccgtttgcgccgccggcctcgccgcgcgttgtcacaccccgtccatcgctcatcttccccaatccactaccgaaagaccacatccaccccgcacccatttcccccactctccccatgaaaatcggcgccagttaacccctccaccgcaagcccgaggagcgccgtcaccatctcgcctctctccggtgccgtgccgcttggtgagcatcccctccccatcctctctttcgccgcctctcatgccgtcgccgctc

SEQ ID NO: 101622 - DNA, 546 bp, Oryza sativa
  Clone ID: PAT_MRT4530_99225C.1
atggcgcagcaagcacacgctgctgccgtcgtcgtcggcgtactgctctactgctgcctctgcttgttcgtcggcgtcgtcgccggcgagcatggcggcggcggcggcgatattaagaggcagtacaaggccatgttcagcttcggtgactcgctgacggacacgggcaacatctgcgtgaacatgtcggcggtgaatcgtaccgagctcaccatggcgcagcctccctacggcatcaccttcttcggccaccccacctgccgctgctccgacggccgcctcgtcgtcgacttcctcgcggaggggttggggctgccgctgctgccgccgtcgaaggtgatcggcggcgacttccgccggggagccaacatggccatcgtcggcggcacggcgctggacttcgacttcttcgagtccatcggcgtcggcttcccgttctggaactacggctccatgaacgtccagctccggtggttccgcgacttgctgccctccatctgcgccactgctgcaccacagagtatgtacgttgtttcatgtgtttag

SEQ ID NO: 101623 - DNA, 252 bp, Oryza sativa
  Clone ID: PAT_MRT4530_99226C.1
atggtgacggcgctcctcgggcttgcggtggaggggttaactggcgccgattttcatggggagagtgggggaaatgggtgcggggtggatgtgcgcggggagctcgagatcgaggacgggaggggcggatttgaaggaggaatgggtgccggcgacgtgggcgaggaggtggcagttttagcggtgacgtggggcgacccgggtttccatgcggttgccggcggagaggctggaggaagggggaggagctga

SEQ ID NO: 101624 - DNA, 567 bp, Oryza sativa
  Clone ID: PAT_MRT4530_99227C.1
atggggaggggatgctcaccaagcggcacggcaccggagagaggcgagatggtgacggcgctcctcgggcttgcggtggagggtggattggggaagatgagcgatggacggggtgtgacaacgcgcggcgaggccggcggcgcaaacggcgcggcacggggacggcggcagcggcggcagcggccgactggagggtcgccggcgagcggcagcgcttgggctcgtcgcggggagctcgagatcgaggacgggaggggcggatttgaaggaggaatgggtgccggcgacgtgggcgaggtggagctcgaattggcacaaaaatttggggaaaaatgggggagaggatggaggagtgggcggcaaccacgtccgcacggtcggacgtgcgcgcgggaggcaggaggtggcagttttagcggtgacgtggggcgacccgggtttccatgcggttgccggcggagaggctggaggaagggggaggagctgacaggtggggcctcaggaatctcgtcccaagattttgggatggctagaaagaaagctggtgctggcgggctgtctgactga

SEQ ID NO: 101625 - DNA, 3600 bp, Oryza sativa
  Clone ID: PAT_MRT4530_99228C.1
atgattcctataggaactctcactccctcacttctcacttttgctgtcctgtatgctttcttgaccctcccattaattccgtcactaagtagcaccgcactcgatgatgaatccaacaaggatctccaggccctcctttgtctcaagtctcgtctctctaacaatgcaagatccctagcctcatggaacgagtctctccaattttgcacttggcccggtatcacctgcggaaagagacatgaatctcgtgtcacagcactgcacctagagtccttagacctcaatggccatttacccccctgtattggcaatctcactttcctcacacgaattcacctatcgaataataggttgaatggtgagatcccaattgaagtaggccacctacgccgtctagtttacataaacctttcttcaaacaatcttactggtgtgataccaaactctctatcttcttgctctagccttgaaatacttaatcttgggaacaacttcctccaaggggagataccccttggtctgagcaactgttcaaatctcaaaagaatcgtcctccatgaaaacatgcttcacggtggcattcctgatgggttcaccgcgctcgacaaactttcggttttgtttgcccatagcaacaacttgtcaggtaacattcctcattcacttggaagcgtctcgtcactcacctatgtcgttctcgcaaacaatagtcttactggaggtataccccctgtgctagcaaattgttcatcacttcagtggcttgacttaaggaagaatcacatcggtggagagataccacccgctctattcaatagctcctcactacaggccataaatttggcagaaaacaacttttttgggtccattccacctttgtcagacctctcatcaattcaatttctttatctgtcctacaataatctctcaggtagcataccatcttctctaggcaactccacttcactttactcacttctgcttgcatggaatgaattgcaaggaagtattccatcgagtttaagtagaattccgtacttagaagaactggaattcactgggaacaacttgacaggaacagttccactccctctctacaatatgtcaacactcacattccttggcatggcagaaaataatctgataggagaattaccacaaaatattgggtatactcttaaaagcatcgaaatgttcattctgcaaggaaacaaattccatggtcaaattcccaaatcattggccaaagcaacaaatcttcaattgattaatctcagagaaaatgcattcaaaggtattattccttattttgggtccttacccaacttgaccattctcgatctaggtaagaaccagcttgaagctggagattggactttcctcccagcattagcacatacacagctggccgaattatatttagatgcaaataaccttcaaggaagcctgccaagttccactggtgatcttccacaaagcatgaaaatattagttttgacatccaatttcatctctggcaccataccacaggagatagaacaactcagaaacctcgtactgcttcaaattgaccataatttgctgacaggcaaccttcctgactcacttggaaatctttcaaacttactcattctaagcttagcacaaaacagtttttatgggaaaatcccactttcaattggtaaactaaatcagttaactgagctttacctgcaagataactctttcagtggactcatccccaaggccttaggacaatgccaaaaactagatatactaaatctttcttgtaactccttggaaggaacaataccaaaggaattatttactatttccacactttctgaaggtctggacctctcacacaacagactctctggacctataccagtggaagttggtagtttgattaatcttggccccctcaatatttcaaacaacaaattgtcaggagaaattccctcagctctaggtgattgtgtccgtcttgagtatctcaacatggaggggaatgttcttaatgggcaaattcctaaatctttttctgcactgagaggcatcattcagatggatctttctcggaacaacttatctggtcaaattccagagttttttgagactctgagctctatggtgcttcttaatttgtcattcaacaacctagagggacccataccatccaatgggatcttccaaaatgcaagcaaggtttttctccaagggaacaaggagttgtgtgccatctcaccactactgaaattgccactttgtcagatatctgcttctaaaaacaaccacacttcctatattgcaaaggtagtagggctcagcgttttctgtttggtatttttgtcatgtttagcagtgttttttctgaagagaaaaaaagctaaaaatccaacagacccatcatataagaaattggagaaactcacatatgctgatttagtcaaagtaacgaacaacttttctccaaccaacttaattggttcggggaaatatggatcagtatatgttggtaaatttgacgccgaagcacatgcagttgctatcaaagttttcaaacttgatcaacttggagcaccaaaaagcttcatagcagagtgtgaggccttgaggaacacccgccatcgcaatctcgtaagggtgatcaccgcatgctcaacatttgatccgacaggacatgagttcaaagctcttgttcttgaatacatggttaatggcaacctagaatgttggctgcatccaacatcctacaagaatcgtccgaggaatccagtgaggttatctacaagaatagaaatagcattggacatggctgctgctttggattatctccataaccgttgcatgccacctattgtccattgtgatctgaagccaagcaatgtccttctggataatgccatgggtgcacgtgttagcgactttggattagctaagttccttcacagcaatatttcttcgacaagtgataggtctacaagcttactggggccaagagggtctattggatacattgcaccagaatatggcttcgggagtaaaatatcaacagagggtgatgtttacagctatggggttatcatcttagaaatgttgacagggaagcgtccaacagatgagatgtttaatgatggcttgaaccttcaccaatttgccaaggaggcatttcctctgaagattggtcaaattctagatccgagcatcatgccagattatgagaacgaagacaatgatgcaaacaatgatctagaccatgataattgtttgatggatggaatgctgaactgtgtcacgaagctggttaagcttggcctcttgtgctctgcagtggcacctaaagatcggccgacaatgcaaagcgtttacaaggaagtcgctgcaatcaaagaagaattttcagcactgcatggttaagccaaaggattatttcttttatgtcgcacatgctactagtacatttttcttgtttgagcttgtgatatgtcattttctcctcttcagtcttactagtgaatatttatgtgtgtaataatgtctgataactatgccagtttgtaacaaataattaaaattcagcattgagctcttctatcc

SEQ ID NO: 101626 - DNA, 922 bp, Oryza sativa
  Clone ID: PAT_MRT4530_99229C.1
ttacttgtcgttttgtgtaccctggctggtcctggacagggatttaatacacaaaatagtctcgaaatttgggttaaatttctgggcatgataaagtggtatcagagccaactcgaccattggttgagccaaatggtcaaaccctaaggacaagttttctgaaaaccctatttgcaaaatgtctcctcttgcccttcggcatttctttgtgaaatggtttttcaaaattctcctccctgtccctccaattcttttagctaccaaactcgtcattcgagtcaggaccagttcaagcggacgtaggatcaatgagttacaaatgccagatgcaagtttcaggaacaacttcatcctcttcgagtcagcatggtgaattgtcagcatcaacatttcagtccaagataagtaaattccaagagcatccacagttctggtctaggtcagtgcaaccagaaccagtcgatctagttttggcaaagcaaaggaacagaaaggtcgaatccagccagttcaatcgtgcaggtttgatcaaacagtcaatcagtcagttcgaagcagaaagtggcagcatgtgtcagcagatcagtcagaccgcccgccagcaccagctttctttctagccatcccaaaatcttgggacgagattcctgaggccccacctgtcagctcttccccttcctccagcctctccgccggcaaccgcatggaaaccgggtcgccccacgtcaccgctaaaactgccaccttctggcttccgcgcgcacgtccgaccgtgcggacgtggttgcccgccactcctccatctctcccccatttttccccaaatttttgtggcaattcgagctcccaccttgcccacgtcggcggcacccattctcctttaaaatcggccccttccgtcctcgatctcgagctccccgcg

SEQ ID NO: 101627 - DNA, 891 bp, Oryza sativa
  Clone ID: PAT_MRT4530_9922C.1
ttatttttgaaaaggaaaaggaggattattgcgttagcgggctagggtttcggtggaccgggcgcacgggcgacggttcacgcgaacggacggccgagatcgatccatccaaaacggacggccgagatcgatcggtctacgaccggctcacggaagagggcgacgatgacgtcagcgatgacgtcaccaccggcggcggcggctcggcggctcgggcttgcatgctcgccggcgaacggcggcgcttcggcatgaacggagagcaccaacgggtagagcgcgacgcggcgaactcaccggtgaccaaaggagaaacggcggcggtcttcgggtcgacggcggcgatggtgctccggcgatcttcggcgacggcgaaggggcggacgaggacggcgacgcgacggcgaccacgacggcggtcttcccgagtgacggcgacgtctggaatggcggcggcgcacagctggagcgacggcggcgacggcggcgctagggcacacggcgctagggcgctacggacgacgagaggcgaaggcgaaggtggcggcgggggctaggaggcgacggcgaaggcccacggcggctggcgacgagaaggaaggtttagggttcggaggaaagagaccgatccgattcgaactcgaatcaaacacattccaaaccgatttagccgatgtttccaaaggagaaaaggtagatgagatcccaaagattgtttcccctcaatcaatttcaccggaaacgaaaaggaacggtgggcccacctgtcagcgggcggacgcgcgcgcgcgcggcggcggactgggccgacttgggccgaggagagagagagcggttttgggccgactttcggccaaagccaaaagaagactttttaaaacctttttcaat

SEQ ID NO: 101628 - DNA, 724 bp, Oryza sativa
  Clone ID: PAT_MRT4530_99230C.1
gctgagcagctcccactgcggtcatgtctgcactctgtgatccagagacaggggagtgccctgtccgctatgatgtgcaaaccgaggacctgccagtactggaggacaaggtcgctgccgtgctcggatgcatgctggcattgctgaaccggggccggaaagaggtgctctcaggtcgatcaggtgttgcgagtgcatttcagggatctgaggacagcacaatggataagattccacctctcgccttgttccgtggggatttgaagcgatgctgtgagagtatgcaggttgcacttgccagctaccttgtgccaagtgaggcccgagggttggatatatggaggaagctgcagaggctgaagaatgcctgctatgatgcaggttttccaagggctgatggtcatccttgtccaactttatttgcgaattggtttccggtgtacttttcaactgtgccagatgattcattatcagatgagttagaggttgcattctggaggggagggcaagtcagtgaggagggactggaatggttattgttgaagggattcaaaactattgttgatctacgggaggaagatgttaaagatgatttgtacctttcagcaattcatgaagctgtctcattgggaaagatagagagtggtgaatttgcctgttgagattgggactgcgccctctgctgaacaggttcagcgattcgcggaaatgtgtctgatagtgc

SEQ ID NO: 101629 - DNA, 186 bp, Oryza sativa
  Clone ID: PAT_MRT4530_99231C.1
atgccgacgacttctagccgtccggctccaccaaggggtagggtcctctcgagcggaccagcgtggagaaaagcgttgatccaagtccaagtaaggggtgaagaacctctcattaatggtgacgggatggagcagccgcaggtcatgccccctgctaacaacaggcgcgtgtgcacaacactctga

SEQ ID NO: 101630 - DNA, 432 bp, Oryza sativa
  Clone ID: PAT_MRT4530_99232C.1
ctcctccaccgggcggttgtccggtgctagaccgcggccgtggttgcctgctttgtcgagctcccgatggccacctcgttggacttgtgcccggcgccggtggcggcgagaggtcgagggcttgtgagcaggggcagctcgccagggataaccagggacgagctacggcggccagctcaccagcagccatgggatatctctttggcagcgagaaggaagaaggagaagaaaaataaaaggattttttagtgggccccacctatcagttggtccctaccctcatgtgggaccaccgataatccacagtggcatgccacgttggcgcgtgagggcgggttaagacccgtttagactagtgatgacacacgaaacaagttgaaggacctctcatgtacttcacctcgagttatttgtgcaactgcaagtgcgcat

SEQ ID NO: 101631 - DNA, 342 bp, Oryza sativa
  Clone ID: PAT_MRT4530_99233C.1
caacacgtgaataaaacagaatccgccgtgcgaattactcatatgccatcaagtattgcggggcaatgccaaaatgggcgttctcaacatcaaaataaagatcaatgtctgatacagctgagagctaaattataccaaatggaaatgatgaaaaataacgctgaaaaacaagcaatggaagaaaataaatctgatattggttggggtagccaaattcgatcatatgtattagatgactctcgtattaaagatttacgtaccggtgttgaaaaccgtaatacacaagccgtactagatggtgatttagataggtttattgaagccagtctaaaagctggttta

SEQ ID NO: 101632 - DNA, 338 bp, Oryza sativa
  Clone ID: PAT_MRT4530_99234C.1
gaggtgagccctgaatacaaacgaaggcgaggcggatggcacggcacatgtcaatggaacagaattacttgagctttcagaataccaggcccaatgggtagccgactttgtacacgtaccaggatgctaaacaacatgtaaattgcgagatgcataacagtatcatattaaactctactggactacataaggatgaaataaaacctctcataaagcatagactttgaataatacagtcataaccactctaatcaaaaaaacaggtgcaggaatacaatatgcagcgactactagatcgctgacaagcgtcttcatgaaatcataaagtgacgcgtagc

SEQ ID NO: 101633 - DNA, 303 bp, Oryza sativa
  Clone ID: PAT_MRT4530_99235C.1
gatgcttctgcctttcagtcctgggaatagaatgtaatactcattgggttcacttttgtgaattttgattcgcaattgcccatggaatgttcacgctggaattctgctgtcggtcagataccagcttagctttaaaatctaattccatctgtccgctttttattggatcattgtaatgccaccagcctacctacgaatgtaaattgatcatcatgtgcctcaggggtgtgatgatgatgatggatgctacagggttttgaaaatcaattgattttacatgtttctttcaaaaaaaaaaaaaaa

SEQ ID NO: 101634 - DNA, 2759 bp, Oryza sativa
  Clone ID: PAT_MRT4530_99236C.1
cccacgcgtccgcggacgcgtgggttttaagtaattgatcttactgaggtctagtattttagttggtgcccctgcaaacaggactgtggcagttcaggatctaatgacatggaaaagaaacaccacatgcaaactggcataatattaataccctcgtatgaatctagaacttgcaccgggtgaatatcaagttcaggataaataggtgtcgaacactatcatgattctcatgtttgttctctactgcatcaaggagctgtggccgctccccgcgccgctcgctcccgctcctcgccttcctcccctcccccccgcacaacctccctcctcctcctccacctcgtcgtcgtctccgccgcgctgtctcctcctctatataccctcacccacactcgcacgcgcaaacccaacccccgcatatgcttaactccccaacccaaaccctcctcctcccccatgggcgcgtgcttctcatcccacactgcgaccgccgccgccgatggcgggagcgggaagcggcagcagcggaagggggatcacaaggggaagctccccgatggcggcggcggcgagaaggagaaggaggcggcgcgggtggagttcgggtacgagagggacttcgaggggaggtaccaggtcgggaggctgctcggccacggccagttcggctacaccttcgccgccaccgaccgggcctccggtgaccgcgtcgccgtcaagcgcatcgacaaggccaagatggttcgccctgttgctgtggaggatgtaaagagagaagtgaagattcttaaagaacttaaaggccatgagaatattgttcacttctacaatgcgtttgaagatgactcatatgtatatattgtgatggaactatgtgagggtggtgaactattggaccggattttggcaaaaaagaacagccgttatagtgagaaagatgctgcagtggtggtgcggcagatgctcaaagtggcagctgagtgccatctgcatgggctagttcaccgagatatgaagcccgagaacttccttttcaaatcaaccaaggaggactcacctttaaaggcaacagattttggtctgtcagacttcataaaaccagggaaaaagtttcacgatatagttggcagtgcctattatgtagcaccagaagttttaaaacgacggtctggccctgagtcagatgtttggagcataggagtcataacttatattttgctctgtgggagacgccctttttggaataagacagaggatggcatattcagagaggtactaagaaacaagcctgattttcgtaagaagccttggccaggcatcagttcaggtgctaaagatttcgttaaaaagttacttgtaaagaacccaagggcaagattaaccgctgctcaagctctctcgcatccatgggtaagagaaggaggagaagcatctgagatccctgttgatatatctgtattgtccaacatgcgtcagtttgtcaagtacagccgttttaagcaatttgctctgagggctttagcaagtacactaaaagaggaagaactagcagatctgaaggaccagttcgatgcaattgatgttgataaaagtggatcaattagtattgaggaaatgcggcatgcccttgcaaaggatcttccttggagattgaagggcccccgtgttctcgagattatccaagcaatcgacagcaacactgatggtcttgtggactttgaagagtttgtagcagcaaccctccatatacatcaaatggctgagcttgactctgaaaggtggggcctacgctgccaggctgctttcagcaaatttgatctggatggtgacggatacatcactccagatgaactcagaatgcacactggcttgaagggttccatcgagccattgctggaggaggccgacatcgacaaagacgggagaataagcttgtcggagttccgcaagctcctgcggacagcgagcatgagcaaccttcccagtccaagaggacctccaaatccacaacccctgtgaacgtcggtaagaaccgagatgagacgtcgtaaattagtcttgtaaaggttgtcttgttcctgtccgcgtgccatgtgatgttgagggtgtcttgagtttttagcatccaggttccgtgtgcagcatgcagataaagtttcggtgtagtacggagtacatacatatttttttcaaaaaaaaatgttacaagcagaaatgctgttctagtctcccattctcctccttgtacataattctatatatgtatgatttgattgcacgtattcatcgcaataaagttgcctgggattgcatgatcaaaaaaaaaaaaaaaaaaaaaaaaaaaaaaaaaaaaaaaaaaaaagggggggggagtgttcacagatcgtagcttttcatagctgtgcacacttcacaaaagtgaacaaagggcagtcattgttgtaatatttttcatcgacacgtgtaatcaaaattgttgccagaaaagctcttgatgtaaattaatatggacatgtaggactgaagctagccagctaatctgtagatgtgcctcgagaaattaaacgttgtcttgcatacgtttgtgtgaaggatgacctattcatccctcccccctcatatttgggtagaattcagcttcaaaaaaaatattgggttaattggatacatgctattgcaaatatgccatattagaaaaagagtaaattgcacccacggtgcatcaccttagcaggtgggtgcaatttggtgcaagacct

SEQ ID NO: 101635 - DNA, 192 bp, Oryza sativa
  Clone ID: PAT_MRT4530_99237C.1
tttcatgcttaaaaacaaaatcatctaatatacttctacaatgactctatggataatgatttatttcaaatcatcatatattatgaacaagattgtcacctttaatgcaataaaaatcattataacaattatataaatgatattgataactactaataaaaaagtttcgcattttttcagctatcttgtata

SEQ ID NO: 101636 - DNA, 1824 bp, Oryza sativa
  Clone ID: PAT_MRT4530_99238C.1
atgggcgcgtgcttctcatcccacactgcgaccgccgccgccgatggcgggagcgggaagcggcagcagcggaagggggatcacaaggggaagctccccgatggcggcggcggcgagaaggagaaggaggcggcgcgggtggagttcgggtacgagagggacttcgaggggaggtaccaggtcgggaggctgctcggccacggccagttcggctacaccttcgccgccaccgaccgggcctccggtgaccgcgtcgccgtcaagcgcatcgacaaggccaagatacctcctctaggtgttcatagtgtaactagattttctcttgataagaccagtcaggaaagccaactggtgttgcggtatctgcaaagcagtcaggatcacccaccagacctgacaggacttggggcattgcaccagaatgtggtcaatggtctccacttcttgatcgcagaagaggcaattccacctatggttcgccctgttgctgtggaggatgtaaagagagaagtgaagattcttaaagaacttaaaggccatgagaatattgttcacttctacaatgcgtttgaagatgactcatatgtatatattgtgatggaactatgtgagggtggtgaactattggaccggattttggcaaatttccattcccgtacagcttctagggccataaggccattacttactggcaccttccattttgtcagaaagaacagccgttatagtgagaaagatgctgcagtggtggtgcggcagatgctcaaagtggcagctgagtgccatctgcatgggctagttcaccgagatatgaagcccgagaacttccttttcaaatcaaccaaggaggactcacctttaaaggcaacagattttggtctgtcagacttcataaaaccagggaaaaagtttcacgatatagttggcagtgcctattatgtagcaccagaagttttaaaacgacggtctggccctgagtcagatgtttggagcataggagtcataacttatattttgctctgtgggagacgccctttttggaataagacagaggatggcatattcagagaggtactaagaaacaagcctgattttcgtaagaagccttggccaggcatcagttcaggtgctaaagatttcgttaaaaagttacttgtaaagaacccaagggcaagattaaccgctgctcaagctctctcgcatccatgggtaagagaaggaggagaagcatctgagatccctgttgatatatctgtattgtccaacatgcgtcagtttgtcaagtacagccgttttaagcaatttgctctgagggctttagcaagtacactaaaagaggaagaactagcagatctgaaggaccagttcgatgcaattgatgttgataaaagtggatcaattagtattgaggaaatgcggcatgcccttgcaaaggatcttccttggagattgaagggcccccgtgttctcgagattatccaagcaatcgacagcaacactgatggtcttgtggactttgaagagtttgtagcagcaaccctccatatacatcaaatggctgagcttgactctgaaaggtggggcctacgctgccaggctgctttcagcaaatttgatctggatggtgacggatacatcactccagatgaactcagaatggtgcagcacactggcttgaagggttccatcgagccattgctggaggaggccgacatcgacaaagacgggagaataagcttgtcggagttccgcaagctcctgcggacagcgagcatgagcaaccttcccagtccaagaggacctccaaatccacaacccctgtga

SEQ ID NO: 101637 - DNA, 402 bp, Oryza sativa
  Clone ID: PAT_MRT4530_99239C.1
atggcggagttcgtaggtgggtgtcgttgtccgagcccaagccgctgcatcgcctcccaccaggggccagacccgccggagctagagccagagccatcacttagcctcctgctcctccgtgagttcgtccccgccgacgagccagacatcaccaaacacgagaagcccacaacgacgtgcacatccaccaaccccatgtcaacaaccgtgatgccgccatcgctcaccgccacaggcacagacacaagtgaccaccacgccaccgccactgcctctgtcttcaatgggctaggccgtacctcaagcagtccaagcaacgtcgccgacggttgctgccatgggctcgggctccaccaagctcgacgatcggtggggaggtcggtcgaagaagggggcagatag

SEQ ID NO: 101638 - DNA, 315 bp, Oryza sativa
  Clone ID: PAT_MRT4530_9923C.1
atggtgctccggcgatcttcggcgacggcgaaggggcggacgaggacggcgacgcgacgacgaccacgacggcggtcttcccgagcgacggcgacgtctggaacggtggcggcgcacagctggagcgacggcggcgacggcggcgctagggcacacggcgctagggcgctacggacgacgagaggcgaaggcgaaggtggcggcggggaggcagagggcggtgctagccaccctggtgccgcagttggggagggcggcgccagccagttgtcacgcccggaaatatacaccatttccaaacgctcagtgcattaa

SEQ ID NO: 101639 - DNA, 597 bp, Oryza sativa
  unsure (1)..(597): unsure at all n locations
  Clone ID: PAT_MRT4530_99240C.1
ctgtcaacgatttatgtattgcactccagagagagtaacaacatcccaaaacgcttctcatagaatagaagcaatcagttatctgttgtacaatgaactaatgaattgaattagttcgcctgtaagctgagaagctaactggcaagaggggacagaggccggacgaccggcagaaagaacctaaggaacgcttcaaatagaacccatcttggaggacctctagcattgtgactgtcgagaacttcaatgtgcaattcccggccaaaaggggttgccgaaaaccggtatgcatagcatacaacggcatgcagagaggccgtttggttgtcaaccaagaacgctgggcagcctctgtacaccctcctggcatccttgtcagcatcgcaaccggagtatccctttggggtagcccagaggaccccaatgacagggccattctgaacatggagaaaaagcatttgaattgtacgccctgaggggtccaacaaaatctacggtatcttctctattttgtagnagaagccataccggccaatcggctggtagccctccgaatgtcaattggattacattccagcaccgctggcaagattatcc

SEQ ID NO: 101640 - DNA, 684 bp, Oryza sativa
  Clone ID: PAT_MRT4530_99241C.1
atgggccaacaccttcagcacattcgggcagtgctcagcgtcgttcgcgccaatcatctcatcctgaagcgctccaagtgccacttcggcgaacagcagatcaactacctcggccatgtggtgttcgcaaacagggtggccatggatgtgcagaagccatgggctttccgtggcggccttatccttcgcaatgaccgtgtccgtgccgacgtcttccccgacactgcccgcgctgtcgccgccggccccaccaccggccacgaaggcgtcgagcgcacacttcacaggctgtgcacggacttcttcacgccccatgccaagcaagtcgtccaagaattcatgagcacatgttcaacctaccaacgcaacaagaccgaacaccttcatccggcgggcctgcttcagtcactgtcggtgcccacgcaagtctgggaggacatcgccatggacttcatcaaaggacttccccgcgtgcacggcaagacaaccatcttcactgtggttgaccgcctctccaagtacgcccacttcattctgctcggccacccctacacggtgacgatagtggcgcgtgtgttcttcaacaaggtggtccgcctccacgccatagttattaaaaccggaccggagaatgaaccggtcaagctctcggttcactggtctagcggttcaaccactggttag

SEQ ID NO: 101641 - DNA, 321 bp, Oryza sativa
  Clone ID: PAT_MRT4530_99242C.1
atgagcacgccttgttcctgtatcatctgtggtgttggggagaaggattgcgaccttgcaccattcacccccgttggctccagggggcctccgccgggaggcctgccaccaacgcccggtggagtccatctccgtaggaaaggcccttatcggaggcctaggaagccgacggaagttcggagccaagcaaagtgccccggggacctcagagcccagtctagggccctgaaggccacggagctggctcaagggccccggaggattcggagctggctcaaggggctccaaagctcttaccaggagtttggggccggagcctag

SEQ ID NO: 101642 - DNA, 1375 bp, Oryza sativa
  Clone ID: PAT_MRT4530_99243C.1
ataccttggtattccaattgcgattgatagattgacagttgctgattttagtatacctcccaataagatagagaaaagattggccacttggaaatgtggacacctatcctatggtgggaaagcaatattgattaattcctgtgtgagtagtatccctttgtatatgatgggagtctatcttatgcctgagagtgtgcaccagaaaatggactcaattagagctaggttcttttgggaaggtttagagaggaagaaaaaaataccacatgatgaaatgggaggccctttgcaggcccaaagactttgggggcttggctttatcaatacaagaataatgaatgttgtactgctttgcaaatggatcttcaaacttgaatctggggtggaggatccctgctgtgatttactccggaaaaaatatatgtctaatggtggggggttttatcaatcaaggactgaggggggttcacaattctggagagggctgcatgaggtgaagaattggatgaaattgggaaggtcttataagattggaaatggtaaagctgttagtttctaggatgatacttggctgggagatgtgcctttaaaaactcaattccctatcatctatagcatttgtgccgatacgaaaaagactgtttaccagatgtgtcctaattgagagtggacaattaacataaggaggaatttagggggaagagagatgacagaatggaatgatttacatactttattggatgagattcagctgaactcagataatgatactatgtgttggaagttgaccaaatatggtatctataaaacaaaatctctatacagagagctagcctttgggggtgttagagatgtcattatgcaagatttgtggagaactcccatacccttgaaaataaaaatcttcttttggctcatgttgagagggagaattcaagcggcttcccaactaaaaaagatgaaatggaagggcagtccttattgtaaactatgtggagagttggaggatgtcaatcactttatgtttaattgcccaatttcgaagttcatgtggtgttgctttagagatgcgtttgggtgggctggtatacccagaacaagaggggagctccttgataagcttaagatgcaaagttgcgatgaaaataggattctactttctctttttgcagcaggggcctgggccatttggctcattagaaatgattgggtgtttaataataaactgatctctaatgcaacccatttgccttacaaagctgtctcttttcatctccagcggagaaaactagcactagtgaagactcgaagctctttggatacctcgcgggacttactacttgccagcatcagaaggatagcaagctcaaatgcc

SEQ ID NO: 101643 - DNA, 254 bp, Oryza sativa
  unsure (1)..(254): unsure at all n locations
  Clone ID: PAT_MRT4530_99244C.1
cactctccacacatcatcgccttcgcttctcctctctccgccccacactgtcggaagtcggaagcaaagcgtcggcaccggcgagagaggcatggcgacgaccgcgaccctccccttctcctgctcctccaccctccaaaccctaacccgcaccatccccctccgnctccgcctccaccgnngtcgcttcctccaccacctcccctnnctcgctgncctcccgaggctcccgntcccgcgacctcccctcctcc

SEQ ID NO: 101644 - DNA, 161 bp, Oryza sativa
  Clone ID: PAT_MRT4530_99245C.1
ccaccaccacccgctcgtatcagccggtggggcaccgtggccatggcgacggcgctccgcaagctctcctacgacgccctccgtcgacagccgatctcccgcataaccccgatatactacatggcgtccctgccggcgaccgaggagagatccggagtcac

SEQ ID NO: 101645 - DNA, 2232 bp, Oryza sativa
  Clone ID: PAT_MRT4530_99246C.1
atgtcgacctccgccagcccgtctgtcacaccattggccgagtacgtagagcatctttctaatcttgtcgcaattccaagcctttctcatgatcgccagtactttcttggtccaattggcaatcccggccctactgagtttattagtgccgagaccaatagaatcccttttagactggccaacccgaatctaggtcaccggaaaaacacctttaaatcctggccatccattgagaaaagttcccccgagaaaagctggcctatgtggttcaagcgggtatcggctagcaaaaaagcctacttctggtcaaacaccctctttaaccaagggccgatgacaccaactctcttggacataacaatgatcaccggcttggatgtcaccacatcggccaacccaatgaacttgaataccaagagcattggaggctgttgcggccccacaaccaactggcaatttctagccgaagccctagaaacaaagagacaattccccttaggcaaaatcctccttggctatctgtaccaaatgtcgaacaatgcatcggccaagatagctgttggctcagtggttggagcaggtggaccgtggtggttgctgcagtcttggctgaatttagtagctatgaaaactgtcaatcggctagctgtgacagaagctgagttcccaagactggagccgatcacagatgatgatggagaggaacgcacccaccgtaggtgtatgtcctatggggaatatgcatctacaccagccgatgctggagcaaagttatcggctgaactgctgaaagattggttcgtcagcttctatgacggatttcaaaaggatgcccgagtttggttcctctatgccgactcaatggattttgatctaccaactgacttcaggtttgaggacatcaaccatgaaagatatcagaagtctagagaggtctttactactgccatcagcccatgcatccttccagtcggcatccaccaaggcagaaacattcaagcctcagatgagttttatcacccaatgagttcggctaggcaattcggaatgggccaactcccaatcggcttatactttgccgataagatccaatgcagaggagagatctcatcgaccttgatgatggatcggctgctcaacatccagggaccccctcttggcagcattgagaacatagagctagcaagattcaggagcagggcctttgatagatggtggggtgaatggaagctgcatctgttccatcagtcggcttctatgtatatgacagacctcttcctggatgtcatccctcagaccacagaatcttctcctcctcacaaaagcaacagtggcagggacatagagtatgctccgggtcttattccaaatggaggtggtttaactccccttgttatcggccatcatgcccctaggacctcaagtttgctccaagggcaactaagagaaccagccgatgctggcaagaagagaaaagccaaggcatcggctgttgatccatcggctctggctccaaagaagaaggccaaaaagaaatctaagccagctgatgacttgcctgctctagatccatccattgaacaagctttggatgaagaagaaattgaggatgatgtcgatcatgccacagccgaactgagtgatccaggagaaaaaacaccatcggcttcacccaaacaaactccttcgactcctgctgctccagctcctttttcaaggaaaaagaagactgctatgaagaagaaatcggctccaatggcatctaagacagctccaccgcctcctccacctccttcacctcttgtgcaacctgaatcaagcaatcgcactccatcggccgcaggcagtcacaatgttgaagaggaagaacaactagctgctcctgctatcccagtcttaaccgatctattctcgtttgatatcaaagattatcttgatgaagagacagaagaagataccaccagcaaggctctagctcccttgtccgatgacttgaagaaaacacttgaagacatctcacatcggctgaaaggatcatcgctagacaacttggtagttgactgtgggtcaatcaggactcggttacacaaaattcaatctctgatcccagatgaactagctgacgcactcactccagctgtctacctcgagcagcaccaattcaagctggagaaggccaagcagagattagccgatcgccgagagcgcaaggaaattgaagccacaatctag

SEQ ID NO: 101646 - DNA, 216 bp, Oryza sativa
  Clone ID: PAT_MRT4530_99247C.1
atggatgaatcaacatctgctttggatggtgatgagaagaggaggtcgaggaaggagagcccgctgccggaagagaagttcaacatcttcctactctgcactgctttcgtgtacagggtgatgaatggcctcgcacactggccactatctgggcgaccgtcgttctgctcggtggattctccaccctcgtcaagaagcaggatttctggcctctag

SEQ ID NO: 101647 - DNA, 261 bp, Oryza sativa
  Clone ID: PAT_MRT4530_99248C.1
atgtgggtgaggaggaagcgccgacaatgcgagaaggcaacgctgctggcgaggaggagcggtggcgacagagagaacaaggggaagatcaccatctcccaatatgccgatcgccaacaatttgcgcacatagttgaaatgtctctgtcgtggcaagctcgcgcgccgtcaagtcgattcgcacagccactgaccctaatttatcccgtcgccggctcgatttcaccgccgctagcccgtctcgatacacattgccgctga

SEQ ID NO: 101648 - DNA, 425 bp, Oryza sativa
  Clone ID: PAT_MRT4530_99249C.1
ttttctttgtttttttttttttttttttttttttttttgggttggttttttttttttttttggggctcaaacttcccaacttattggaagatgcttaaaaagggacctccaaaaacttgtcagaggttgcttccaaaccaaaaaaggggcctctcaacttgacagggggtcaaacttctcaactcgttggaaattgaacttgcccccaatgctttacttttcctggaaaaagctgtgggaaggaaattcaaacaagttactgtggggccccatttaaaatggtcctgtcttgcttcaaaacttaaaaaaaatactttgaggagctcctccgggtttggccttcagaaccggaacaaaacttcccccatcacctggtttttgaaagctcccaccaagccccgggaaaaaataaaacttttttttta

SEQ ID NO: 101649 - DNA, 492 bp, Oryza sativa
  unsure (1)..(492): unsure at all n locations
  Clone ID: PAT_MRT4530_9924C.1
gagtataccggaatttccagatcctgttttcagctcgcaacgggaggcctcttctcttgaggcacaatttntgcaccgtgactggaggcacctggctcatattttttcttcctgagcaaggagactgattcagctcgttcaggcagcagcatggagaggtatnttccacattcaatttcagatcggtgcgtattgacatgatgttgttgtgtagttctgtccaaatctttgccaatgtaataatacgttaatctcttgacgcacgatcactgagctaattccatttaggaagggatctagagctaactatttcattctttgntacctttttactccggatntctgaaatgaaggtttcgatcgtctctntagatcggttagcttgactgcttgtaagctatagaagaggaaaaggctgtttctttgttacctttttactccggatgccagcaagtcattttcaagttatttcttcagaaaaaaaaaaaaaaa

SEQ ID NO: 101650 - DNA, 242 bp, Oryza sativa
  Clone ID: PAT_MRT4530_99250C.1
ctaagagtgtggacgcctgtcgatgtgagtatctgtagccttaaaaggcctttttattgctttcccctttgcttgtttgagcagctcatagtgggcttgatttgctgacagcgtgtggcgttcgtgttgcccggttttgtgttctgcttatcttgagacctaccattctttctggcgcatgtggtaaatagccaagacttgttaacactaataaaatttgccttcaggtctaaaaaaatcat

SEQ ID NO: 101651 - DNA, 267 bp, Oryza sativa
  Clone ID: PAT_MRT4530_99251C.1
atggcctgtggcggcgtagagatgaaagggaagaagagggcagcgactcgcatccatctcatctgggtggccggatacgccggcgaggaggacggcgcctggcgccgcaacgatggttggaggagtgcgaaactgcggcggcagcgacaactatggcacatgcgaggggaggagagcgtggtgatgcaccgagggtggagggtgagggcgagggcgagggctcatgcaagggtgggggcgacggggctagggtttgatgcagattag

SEQ ID NO: 101652 - DNA, 1362 bp, Oryza sativa
  Clone ID: PAT_MRT4530_99252C.1
atggctatcgagtgcgccgcctcctcccccttcacccgcgacggcgaggaaacggccccgaggtcaatgatggaaacatatggtgaaatgtcaagtaaacctgtattgcttgcgtcaaggaggaagcttgttgcattatcatcgttttgcttttgcttacattcttcaaggtacttctcagcacttgctttgggtgatccatctgttaaaattgatgatgtcactccaaagatttttccatctggtccactgtttccaactgagaaacggatcgcagagctttttgaaacaaatacttactctgttgtcaacatttttgatgcaactctgcgccctcagctcaatgtaactggtgttgttgaggttagagtagagtcaagaattcccgaaggaaatggttctggcgtagtttgggatgattccggccatattgttacaaactaccatgtggttggcaatgccctttcaaaaaaaccaaagcctggcgaagttgttgcgtgtgccaacatagttgctgctaatgggatacagaaaaattttgaaggcaaattggttggtgctgaccgttctaaagatcttgctgttctcaaggtggatgctcctacagatctgttgaagccaattaacgtgggacaatcttcagctctaagagttggtcaacagtgtttagcaattggaaatccatttggctttgaccatgctctaactgttggtgtcatcagtggtttaaatcgagacattttcagtcaagctggagtaacaattggaggtggaattcaaacagatgcagctattaaccctgggaacagtggtggtccattgctggattcgaaggggcatatgattggtattaatacagcaattttcacacagacaggaacatctgctggtgttggttttgccatcccgtcatcaactgttctgaaaatagctcctcagttaattcagtttggaaaagttcgccgtgctggcttgaatgtggagtttgctccagatccaatcgcatatcagcttaatgttcgcactggatctctaatattgcaggttcctgggggcagtgctgcagccaaagctggtcttgttcctaccagtaggggttttgctggtaacattgttcttggtgatgtcattgttgccgtggacggtaaacctatcaaaggcaaatctgatctatcgagggttctggatgattatggcgttggagacaaggtgagcttgacaatccaaagaggcgctgaaactctggagatggtgcctcaatatacatcagagtttctgcttattatacgtcataatcctttgaagattatgatgcagtcagtccatcctgatgatctcattgatgtaagtatatgtaggtaa

SEQ ID NO: 101653 - DNA, 318 bp, Oryza sativa
  Clone ID: PAT_MRT4530_99253C.1
atgtggcgaggggagcgagcaaggaggagacccaggctgggcagccatcattgcgcggcaccccaaccgtccctcaccgcatttaatgcggtaagggcgaacatgcggcgtgaccagactgtgactggcctgtcgccggtcacgtccgatcggacgggcagccgtgcccccacgtttgcccctgtacccagcggggtggaggcagagggaatgacagggctgtcacccgtgtcaggtggggggcggcgctgggtcccgctcaaggacggattgctgcttagcttccgggcgaaggcacggatcgtggtccggtcaagg

SEQ ID NO: 101654 - DNA, 363 bp, Oryza sativa
  Clone ID: PAT_MRT4530_99254C.1
atggccgggccccacgcggcggccacacggcgcgcccggaggcggccacgtcggcgcggccggcgggaggcggcgcccgcgcccctatggttgcctgcagcggccataggcacggcggagcggcggccaagagaagggaagggaagggggaaagaggcggcggttgacggggacggcggcgttccggcggtcggcgagctcggtaaggcggtggacggggtcggcggtggtggagcgaagccggaggagacgacgccaaggcgggggacggtcccggtgagcggccttaacaggttcgagcatatcggctttgcatcttcttggaggctgttggtgcaatctaactcccggtttgataggtag

SEQ ID NO: 101655 - DNA, 498 bp, Oryza sativa
  Clone ID: PAT_MRT4530_99255C.1
atgaggatgatcaaccgagctgataaaggaccctatactaggctcgtaggtacagtgtgcacgggatgccgcttcgagggggcgatgcctccattttccaaccgtatagtgcgatacgacgtgggcagttctaccgttctaccctctctgacccttcttctcattcttgatttttcctgtggtcgattggaatttggaaatgagtggtgccgacccaggaaatttcacctacaatttgagtttaacaaatccagctcctttgaaaactcctgctttataatacgggtcgttgctacacatgcgtacgtggtcacggtgacaattggcacgtacgtacgtggaaacctttcttttgtcaacgggcgaccggcaaactcaacgcaacgacgaccggtgctccgaaaccggggcatgcagcgtgcacgcatgtgcgctctttccctgcgcaatcgagggcatatgccttcccaaaatttttacctcgtcacatcgaatgtt

SEQ ID NO: 101656 - DNA, 2036 bp, Oryza sativa
  Clone ID: PAT_MRT4530_99256C.1
gctcaccctctcgctcccgctcctctcctctcctcttcgtcctcgcattttccggcgccgccgccgcggcgctggtgtggttgagtgttttttttttttttttgggttttttgtttgtttgggttggattggatatggcggcggccgcggacttgtacgggcgcctcaacaggagcagcacgcgggggttcctcgcatacgtggcggcgggggcggcgtgcgccgcggtgctcgcctgcttcgtcatccccgccgccgagccgcgcgccggtgacgccaatggcggcctccgcctctcctcgcggtcggcgcgcgtctggccggacctcgcgttcaactggcgggtggtggtggccaccgtcgtcgggttcctcggctcggcgttcggcaccgtcggcggcgtcggcggcggcgggatattcgtgcccatgctcaacctcctcgtcggcttcgacaccaagtccgccgccgcgctctccaagtgcatgatcatgggggcgtcggcgtcgtcggtttggtacaacctgcaggtgtcgcatccgaccaaggaggcgccggtcatcgactacaagctcgcgctgctcttccagcccatgctcatgctcgggatcacaatcggagtcgagctcagcgtcatcttcccctactggctcatcaccgtcctcatcataatcctcttcatagggacttcctcgcggtcattttacaagggaattctcatgtggaaggatgagacgaggatccagatggagacgcgggagcgagaagaggaatcgaagtcgtcctgtgccgcaagggatgtggttattgacccgagttgtgaagagcccctcctatgccagcctcagcccaaggagaaatctgctctggagactttcttgttcaatttgaggtggaagaatatcctagttctcatgactgtatggtcgtctttcttggtgctgcaatcccccggctgcagctctcgctcgtgcagcactttctactgggtgatcaacattcttcaggtcccggttgcgttaagtgtattcctgtgggagggcgtacagctgtgcagagagagccgtgctcgacgcatggatgggaactggggagtgtgtctgtggaggcctcttattgagtggtcacctgcacagctcatctccacgcgtccgtgtggtttgcttggtggtactgttggtggccttcttggatccgggggtgggttcatccttggtccacttctccttgagcttgggtgcatccctcaggttgcaagtgcaacagcaacattcgtgatgatgttctcctcatccctatccgtagtggagttctacttcctgaacagattcccaatcccttttgctgtctacttgatctgcatttccatattggctggattctggggccagtccttggtccggaaactcgtgcacgtgctcaagcgagcatctctgattgtcttcatcctatcctctgtcatcttcgcgagtgctcttacaatgggtgttgttggaacccagaagagcatcagcatgatcaacaaccatgagtacatggggttcctcgacttctgcgagaagtgaagaacccatcagactgtccatactctctgggggaaatccaggtcaacacctaattgacctcacctcccccaaatttaaacgagaaaagaaataaggtcgtgaagtgcacatatgcaccgcgttagcgcctcgctaacctgcaagcgcacgtccgacaaagtatcgtagtgtattccagttttcatggcatatgcatgtgttagctcctggctaacctgcaaaccctatctcttggtcttgtaagagtcttctggtctttttgtcatgcatgcgttagctcctggctaacctgcaatttagtttctctagggagaaatcgcagctatgcccattcattcttgtgcttgctcctggctaagctagcctgcaaatggttattgtatggaacagtgtaaatatgccagcccattccttctgtcaatatacaattgttgcattttttaggtaagaaaccaaaaaaaaagggaaaaa

SEQ ID NO: 101657 - DNA, 337 bp, Oryza sativa
  Clone ID: PAT_MRT4530_99257C.1
ccgggccggaaccgccgggacgaaccacgccggcttgtctcgcccctgctaggagacccgcagcggggggctgttttgttacgggtccccccataatccctgcctacccgcgcccagttgcctctatcccacgggagcgcccactcggagaagagctccagaggacgacatataccggaggacggggtggcttagattcgccattaccgtcgttattgcttccaccaagattaccaccccctcctcctcctgtgatcgagcgctcgcatcgaatttcaggctgattcttgattctgccaggaggttgaaatctctcgtggtatgaacctgatttcgg

SEQ ID NO: 101658 - DNA, 439 bp, Oryza sativa
  Clone ID: PAT_MRT4530_99258C.1
gatagtccccaacttgatatcaaggaagcacactaacagtgctgctacaggtacttattttcttacttagtgagtttccaggtgtatgcttcgggagtatgctagttcatgcttttcatatctgtagttgtcatgctggcatgctggcagtcctgccatttcttgttcttatagatagagggatataataagtcagctagtttccatcattattgcaaacttcttacattatgtggaattcaattagaaacattaggtatcgcgggcaactgatttcataacatatatctaatattcctgttcagatttctcaacgcatacttcaatatttccatggatgatagtttctaccataattcacatgctggacagtttacatatgaaacaacttagggcctgttcactttgatgccaaaaaaaaccttaccaaattttggca

SEQ ID NO: 101659 - DNA, 332 bp, Oryza sativa
  Clone ID: PAT_MRT4530_99259C.1
tctatttgaaggtcatggggatgctctgaactggcgtattgcgtaagtgctcattctaggggatatactaaagtaaagctgtcaggcactaatgaagtgcctgatacgccttgtggtctaaaaagggggcaccatgcatttagttcgagcgtgagaacctacagaagggcatagttacagagggacctgaaataccttagactggcattcaataacataagaagaccatgcactgtgctgagacagatggtgcataaagagtaaatacagcatatcaacttgctaattgcaccaacatgatgggtcaagctcatgtccacacatgtaaagaa

SEQ ID NO: 101660 - DNA, 729 bp, Oryza sativa
  Clone ID: PAT_MRT4530_9925C.1
tcagagctcaattcccgccgccaccttcgccttcgcctctcgtcgtccgtagcgccctagcgccgtgtgctctagcgccgccgtcgccgccgtcgcttcagccgcgcgccgccgccgttccagacgtcgccgtcgctcgggaagaccgccgtcgtggtcgccgtcgcgtcgccgtcctcgtctgcccctttgccgccgccgaagaccgccggagcaccaccgtcgtcgtcgatccgatctccgccgccgcttcttcctcgtcgccgtcgccgtccattggtcttccgccgctcctttggtcaccggtgagttcgccgcgtcgcgttctacccgttggtgccttccgttcgcgccgccgcgccgccgttcgccggtgagcgtgcgccgtccgagctgtcgagccgccgagccgtcgccgccggtggtgacgtcatcgctgacgtcatcgtcgccctctcccgtgagccggtcgtggaccgatcgatctcggccgttcgttttgaatggatcgatctcggccgtccgtttccgtgaaccgccgccgtgcgcccggtccaccgcaaaccttccacgtgcagccacgcggagcagcgtcgccgccgccggcggccctcgtgccaccgccccatggccggcgtcctcttttctcttctcccccacagtccgcgggtgcgcgcaaggctgtcgaggggctccgtggtggtgccctttgccctccccccttcccat

SEQ ID NO: 101661 - DNA, 1440 bp, Oryza sativa
  Clone ID: PAT_MRT4530_99260C.1
atggcgcccaatccggtcgggcatgcgcctttgtgttgcagactggtgcagggcaactttgaaactttccctcaacaggacttggtacctttaacagcacaagaggttcattctaagtgcattacattcggtcgagcagagaacctgccttttatccctttggcgacttcagcgctggtctcccaacatactggttcttcttctgtaaatgtgacaccgttgcaagaaattctgacttcgccgtcgcaaataagcaatgtcaacactgaatctattggggtgttacaagggctcccagcttcatccatcgttctggatagacctactgatgatggatacaactggcgaaagtatggtcagaaggcagtgaagggtggggaatatccaaagagctactacaaatgcacccatctgaactgtttggtcaggaaaaatgtggagcactctgcagatggacgaatcgttcagataatttacagaggacaacacactcatgaacggccctcaaaaaggaggtttaaagattgtggtggtatatcagatgatttagacgatttcagtggcaccacgggcacttcagtcagatcacagcctgattacgatgattactgcagaaagcctatcattccaagtggcaccatggttgctcctttagtgaaaaagattgaagatggtgatgaccaattgtctggatcaagtgataaccaggatgagcatgatgatgaggtgaggacttctgatggagcttccggtgatgccagtgcaaatgaaaggaatgtgccagccccaggtcaaaagattatagtgagtacaaccagtgagatcgatcttttggatgatggttataggtggcgaaaatatggacagaaagtggtgaaaggaaatccttacccaaggagttattacaaatgcacctacctaggctgtgatgtaaagaagcaagttgagagatctgttgaggaaccaaatgctgtgataactacatacgaggggaagcatatccatgatgtgcctgctgcaaggaacaaaagccatgtcgtagccaatgcctctctattgcagaacacaaagtcgaatacctactgcacagagcaatcctacacaacgatcacttgctagattctgccatacatccgtctgattgctcatatgtagcatttctgaagctgtgtattttatcggccgtacccactaacgaggcgatttttggcaccattgtgccatgtatttttcctgctgcaagcatacgttctcctatttgggaacatccgaattgtaatattgatttctgcaagtgctatttcaatgggatatgcagaagttgtgatttctgaacctgatggagcttcactcttggtcagaccttttaatgtgtgatgctgttgtactagtacatatcaaaaaaaaaaaaaaaaaaaaactcgagggggggcccggtac

SEQ ID NO: 101662 - DNA, 260 bp, Oryza sativa
  Clone ID: PAT_MRT4530_99261C.1
ggtgtggaattggtgagcggagaaacaatgtgcacacaggaatcagctgagtgaccatgatgtacgccaagctctgaatacgactgcactatgagggaaagctggtacgcactgcaggtaccggtccggaattccacggtcgaccacacgcgtgccaggcaagttaactgcacatgactctgtgcacggttggtatgcatcatgttgttagtgaaattcacacgctttagtgggattgaattggttggagtgaaagttgc

SEQ ID NO: 101663 - DNA, 690 bp, Oryza sativa
  Clone ID: PAT_MRT4530_99262C.1
atggcgtcgtggcgctcgtacaccacgacggtgtccccctccgcgatgcagcgttgggaggtgttttggtttggccgtatccgtttgggagaaatatcccacagcaaccatgaggtcgacgccggggtcggggccctagacgtacagcatcacacgcgaagccggcttggactcgacgcggaacgacctgccgatctcgtccagcgccaggacctgcccgccgttgagccactggctgtcgacggcgatggcgacgttgatgtgttctgcggcttgccggccacctgcccgccgacgcgcacccacgccaacacctggtatgtcgcgtacagcgccagctcacctcaccctgtccccgcctctcctccctgccgtcctcgcttcctgcaacggtcgacgcgggccgccggggcggagccggaggttgcatgctcccgccgtggctgcgatgctgccccggtggagtgcgctctactcgcggcgggtgcgtcgctgtcgccgtcgccgccgagaacatcgcaagtgggagtgaacgggacgatggtagcgtgcgacgtgctactgccgggtgaggctgaggcggccggcgtgcgcagcaccggcggggagggcggcgaggaggctggagagggagtgcctgcggccggggacatttcaccaatttatgtttttgcggtgtctcgcggctaa

SEQ ID NO: 101664 - DNA, 1716 bp, Oryza sativa
  Clone ID: PAT_MRT4530_99263C.1
atgcgcagctcgatgtcaagctggccgaaatcgagcgcgcggcccggctccagctggctacgactgcaagcagcggcggcggcggtgtcgccgtcctcccaggccgcaaccgtgtcggcgttgtacttcgccgccggtgccgcgttcctgctgctcgcagcatggttcatcgccagctacgtgagccacgggcttcttctgcctccctcccaccgcgaagcagcaccgcctcttccccttctctcgctggagatggcgtccggaacagtgccggcccttccccttctcctcgcccacaactcccacatgttcgccggaggagagagggcggcggcggcggtggcgctgctgcttctgtcgccgggggagaatcagatggtccgagtgtcagcacagccgacgaagacgaggtgcgccgccggcgtcgtcgacacctgcggcgacgtgggcgtgccgtacctgttcggcatcgacggcggtagctgcagcttcctcccgggcttcaacctcacctgcgaccgcaccaagcagccacacaggctgttcctcggcgacggctcccacctccaggtcaccgagatctccctggccaactacacggtgcgcgtcctcaacggcgtcggcaccgtgaacttcacctttgcggggcacaacgattccacggcgaagtgggccggagtcagcgtcggccaagacgacgggccgtacatcgtctcagaggagcacaaccagctggtggtgacggggtgcaacatcatggcctccctgctcgggaacagcggcagcaacgtcatcatcggctgctcctccttctgctccatcaccgactggtggggcgccgacccaatagtgcactccggcgccggcggcgcgtgctccggcctcggctgctgcgacgtcaacatcaccatcggccggccctcctacgaactgcagctcaggtggctcgactgggaccacaactacgacgacctcctgcccatcgccgtgcgcatcgcggagcgcggttggttcgacggcatgtcgaccaagcttctcaggaaaaacagccgcagcgctgttcccgtgcccgtggtgctggagtgggccgtggcgtctgttcacaagccgcccactcccgtagacgtgaacagcacgtgccccaaggacccggcgagaagcgagtgccgtagcagcaacagcttctgccgcaacatcgccaacatgtaccgcagcggttacgtgtgcaagtgcgacgacgggtaccagggcaacccttacctcaccggcggctgccaaggcgatccgggaggcgacgcctcaaagcacctgaggctctgcgcgtctgacctggtcgtgtggcagctcccatggtgtggtggtctcatggatgagggcggtggtgttcgcgggaaggctggatctggtgcccctaagttggcaagcgggcgtggttataggtttgtggtgctgccgttgcaagcaggcggcaagagcactagcgatggcggttgtggtggctaccaacgtggaggctactatctggcaaagacagagttggaagagtgggaaggcagcggcataggggatccggactccgagctgaaggttgaagattacccttacatgaggggtctgggtgtgacagctaagatggcctcatgtggtgccgatgtggtgcaaattgggcatgccatatatggtcgtctaacatggatgacgctggtgcacatctaa

SEQ ID NO: 101665 - DNA, 268 bp, Oryza sativa
  Clone ID: PAT_MRT4530_99264C.1
gacccacgcgtttcgattgaaccaaccccgaacaaacaaaagggaaatttttgatcaaactggcctgacctccgcagccaaaaagccaatgcccatatctaaacatttaaaaaaattccatactcattcaaattgggtatatactcaacttgaaccttggagcccatactccatgtagcaccagttaactcaaattttatttatttgagaagcccgacattgatgtctgagcgccactttaagttaacaaacaatacgttcgtgcagc

SEQ ID NO: 101666 - DNA, 630 bp, Oryza sativa
  Clone ID: PAT_MRT4530_99265C.1
atgaacggggcggcggcgggaagagcggcggcacgaagccgaaggggtgctagcctcgtcgtcatcttcttccggcgcatagtcgtggagcggccggcggagcgacgacgacgggcggcgggcggagggcggagtagaggggcggttgacggagcgacgacgggcggcgggcagcgtggcgagagcactgcgagggaggaggcgagctcgtcagggtggtcggcgggaaaagaggtagcgcagcgcacgccggtcgatgggagggagggagaggaacgggggtcggcagccggcgggtgtcggcggtgcgtgggggtcaacggctggtggaggtggccggaggaggaagaggcagaggaggaggtcgccggcgagcgcgggctccatgccgtcggccgctccgcccgagatgcccagcagaacggcgccgcccctcctcgctcggtcgccgagcgccgccttcctcctcgcccggtcgccgagcgccgcctccctccttgcccggttgccgcgagcggcccctcctctcacccagccgcggcgcgccgcctccctcctcgcccgaccgtcgcgcgccgctccgcccaccgccccctgctgcgccgccgctcaccattctctgacatgtag

SEQ ID NO: 101667 - DNA, 1066 bp, Oryza sativa
  Clone ID: PAT_MRT4530_99266C.1
atcagcgtcgtacgactctctcggcctcccctttcttccttccaccgcccaaaccctagatcggcgccgccgccgccacgcagggccggccagcaccgtgtgggggagcgtccggccgccgccggggtgccttggagatcgatctcctcgccgccgacgacagcttttcttcgccggatgcgttccgtggcggttatcaggactctttttctctcgagatagagaggaaaagctccctctcgatctgctgttggatcggaagaacagcagagagagagaaagcttagcgggatgatggtgcagatcgcgtggatctgtcgccgggaggtgacctggatcggtgtcgtgctctcgccgtgtgggtgagattcaccggcgccggtgcctcggatcctcttcggcggcggcgttgggcctccgatgcgcgaagacctggggctctgaggtcatgaggaggactttattttggggagaggatttgatgagcatggaggatgtgcagtgctccaagtcggaaagcttttttttttaccattactgctgccgaggaagctcaatctctgtcgggatggtaattacggaaggggttatcttagtatggtgtggtttatgaaattcagagatcggttatcttattatggtgtggtttataaagtcagagatccataatttcgtcgcttcaggaggataaaggaacacacatcgttttgggtgtccggtaccaaatattgttcatttcaccctctgggttgtctttcaaaaggtgtcagagtgatggttttttttttccttcttcaatcactggtgatatatagttttgcaaactgagctaaaatgcacggccattccaatattccaattgttctgtatttatgtggactcacacgaggattttgaaagacttctactattgtggattaacacgaggattttgaaagattgttactatgcggattcccatgaggatttttaaaagaccgttcattttagaggttggaaaatgttttacgttcatgttcatccggcttcctcttgatatggccggtaaccacaatggagatcgtcc

SEQ ID NO: 101668 - DNA, 278 bp, Oryza sativa
  Clone ID: PAT_MRT4530_99267C.1
attaaaaatgttcaccatgttttaaccaaaaagcatgaaagttgggagcccaaagaggccaacaaggtttgtgcactcatggctataccaacctggttataccactccataaagatctctactacgaaggcaaagatagcccgatggatggtggcaaccaagtttttaagaagcggccgacatgaacgtagcactgaaggacacctggagtctgcgacaacgaaatggctgctcgcccagaaccaatgatccgcctatcactagggtctatcggcgga

SEQ ID NO: 101669 - DNA, 1218 bp, Oryza sativa
  Clone ID: PAT_MRT4530_99268C.1
aagaaggggataatttggagggtcggtaatggtcaatctatacgcatgtggagagacccttggattcctcgggatcactcgagaagaccagtgacgatgagaggaaattgcagactgaaatgggtctctgatttaatagggcaagatggtacctggatgttgcacagatcaggaggtgcttcctgaacatagacactgagttaatcttatcgatttgtctttctccccgccaggaagaagactttctagcttggcaccctgacaagtctgggcggttctcagtccggagtgcttataatcttgcctgtaggctggcaaatactgaaggatcctcaagttcctttgctttgcattcccgcaaatcctgggatttaatttggaagtgtaagctcccacagaagattaaaatctttgcctggaaagtggcctccaattgtttagctaccatggacaacaaaaggaaaaggaagttggtaaactctgatatctgtatcatctgcaatagagaggtggagaattctgtacacgctctcttcaaatgtccccgagccagtgccttgttgtcggatatggtacagtcaggtaacttgtcgcttgttttggtgaatttccaattcggcaattactggctgtttgattgtttggaatatataccaactgaagaacatgagatgtttttattaactctctggcgaaactggtatgtgtgtaatgaaatcacacacataataagccgcctcctctgttggaagtctccaaaagattcctggaaagttatattgctactctattccaaatcacgctgatctggaaaaaggtaaaactgttgttagcagatctgttataagtgcaattagaagaagaggaccagatggtcctcctgctgcatcgacccgtttgcactaggagaagccgaggctgggctggatgaaacttaatgtagatggctcatttgatgctgatcgtgggaagggaggtatcagtatgattctacgggacaacagtggtagtacagtttttgcagcatgtaagtccctggatagctgcaagaatgccctggaggcagaaatccgagcttgcatggagggattgattttggccctgcagtggactatgcgccctatcttgattgaaacagattgtgtttcgctagtcaatcttctgaaggaagggaatagggatctgtctgaagttgtaatttcatttcatagctagtct

SEQ ID NO: 101670 - DNA, 504 bp, Oryza sativa
  Clone ID: PAT_MRT4530_99269C.1
atgaagggaaaatcctaccgaggcaattgtatttgttttggtagatatgctcttcaagcacttgaacccacttggattacggcgaggcagatagaagcaggacgaagagcaatgacacgatatgcacgtcgtggtggaaaaatctggacccttttaaatgtagcagataacagtggagctcgaaaattgatgtgtattcgagtcataggagctgctagtaatcagcgatatgctcgtattggtgatgttattgttgctgtaatcaaagacgcagtgccccaaatgcctctagaaagatccgaagtaattcgagctgtaattgtacgtacatgtaaagagttcaaatgcgaagacggtataataatacgctatgacgacaatgcagcggttatcattgatcaaaaaggaaatccaaaaggaactcgcgtttttggcgcgatcgccgaggaattgagagaattgaattttactaaaatagtttcattagctcctgaagtattataa

SEQ ID NO: 101671 - DNA, 2644 bp, Oryza sativa
  Clone ID: PAT_MRT4530_9926C.1
atgagcccggcagtgcggacgaagcggccgccgccgcagccgctgccgcggcggccgccgccgccgaagccgagcgcggagtcgaagccggcgaaggcccgtgcaccggcaacctcgctactggagagcctcaagtcgttcaagtcccgcctggccgccggcccgccgctcgcgcccacgccgaagtccttcaagtcgtacgcggagacctgcgcgtccatcctccggctctgctccgccgccgcggccgcctccggcaccgctgccgcctcctcaaacctgccgctcgtcctctcaatccacgcgcacgcgctcgtctccggcctgaccgcggacggctcggtggcgtcgcacctcctcaccgcctacgccgccttcgcgcgcgcggcggaccgcgacggggccttccgggactgcgtctccgtcgtcggggcggcgtccccgttcgcctacgatttcatggtgcgggagcacgtcaaggccggggacatcgtctccgctcgccggctgttcgacggaatgcccgagaggagcgtcgtgtcgtacaccaccatggtggatgcgctcatgaagcgcgggtccgtgagggatgcggttgagctgtatcgccagtgcccgctctgctcggttcccttcttcaccgcgatgatcgcggggtttgtcctcaatgagctccccaaggatgcgctcggcgtgttccatgaaatgctcagctgcggcgtgagtccaaatgagatcactttggtctccgtcatcaaggcatgcattggtgcagatgctgcacgcaggatgtttgatgaaatggaggtgagagatgtggtttcatggactgctttgcttgatgtgtatgctgaattgggtgacctcgagggagctcgacgggttcttgatgaaatgcctgagaggaacgaggtctcctggggttatagcaacaactcaaaaatggtggaagctgaggaactcttcaaaaagatgcctgcaaggaatgttgcttcatggaattcaatcatctctggttatgcacaaaatagacagtttattgatgcattaaaatctttccatgcaatgttagcttcagggcagagtccaggggaaattaccttctcaagtgttctcctggcttgtgctagcctgtgttctttagagatgggcaagatggttcatgctaagatcattaagcttggaattaaggaaagcatctttgttgggactgcactgagtgatatgtatgctaagtcaggggatttagatagctctaagagggtattttatgaaatgcccaaaagaaatgatgttgcttggactgccatgattcaaggacttgctgaaaatggttttgcagaggagtctattctgttatttgaggatatgatctcagcaggaataacaccaaatgagcagacatttttagccattttatttgcttgctcccacagtggcttggtggagcatgccatgcattatttcgaaatgatgcaggcatgtggtatatcacctaaagcaaaacattatacatgtatggttgatgtccttgctcgagctggtcatttggcagaagcagaagatcttctcctgaaaatcgaaagcaaatcagaagcaaattcatgggctgctcttctgagtgcctgcaacatttacaggaataaggaaatgggtgagagggctgcaaagaggctccaggagttggacaaggataatacagcaggttatgtgttactctcaaatatgtatgcatcttgcgggaaatggaaagatgctgctgagatgaggatactaatgaaagggatcaatcttaaaaaggatggtggcaccggacgcccagagcccagacacctcagcggctgggcagttcacatccgcgtgtactactacgcatattcttctttccccacccgcaatcaccgatcaaaccgcgtcgccctcagcagcggggtcaggtcagccttcaggtggctggtgcggcggggatggagccactggaggtggcgatcacgatcatcttcgacgtgctgttgctggtgttcatggtgaagctcttcttcgccatgttccagatgaagctcgtcgtcatcctcttctacctcgtcatcctcctcttcgccatggccttctccggccgggcacccagtagcttctagtatgccgcgacaaatttggaggtgcaaatctcttctttcccccttaattcgcgagctgattggtggatctacgtggattttcatcctctggtggaatcggtcgtctcggtttttgtgtaagaaaggagaatcatgaggccaaggtgcaaactgtgtagtcttgatcaaagaaaagccatggccatggccccctctcatgtgaatttagtcgagagtttcttctataatttccctgcttatatatttctacttacatttttgctaatgactcttgtcaaaagtgtagattttctagtggtttccttgatcatcaatggagagtagtctttcttgcaactttccccctttttctcttgaagaaaaataccacctgagttataccactttcttcataggagtatataaaaaggcagccttatgctattcatctcgccgtgtggcttcaataattatagagaaggtcccgaaaatgctgaaatggtagtctttctttcctggttcacgcg

SEQ ID NO: 101672 - DNA, 1696 bp, Oryza sativa
  Clone ID: PAT_MRT4530_99270C.1
gctcgattcgcagcatggagaacccactgaattttgggggcgctcacacactcctctctgtctccctaggagagaagccgcagcaaaagggggctagttactagcgggagggaagaggggagaagttgtcgttgaaaagtaggaggctacggccggcccgcaagtgattgaggccgaggaggaggagaacacggtgagatcaggagagaggagataccggccggcggaggcggcggcgcggcggcgcagggatagcggaaaaaaagatcgcgcctaaaaagggcgaggaggatggcgtcatcgtcagcgtcgtccgtgccggcgccgtcggggtcggtgatcaccatagcgtcggcgtcggcgtcggcggcggcgaacacggcggcgtgcggcacggggtcgccgtgcgcggcgtgcaagttcctccgccgcaagtgccagcccgactgcgtgttcgcgccctacttcccgccggacaacccgcagaagttcgtccacgtgcaccgcgtcttcggcgcgagcaacgtgaccaagctgctgaacgagctgcacccctaccagcgcgaggacgccgtgaactcgctcgcctacgaggccgacatgcgcctccgcgaccccgtctacggctgcgtcgccatcatctccatcctccagcgcaacctccgccagctccagcaggacctcgcccgcgccaagttcgagctctccaagtaccagcaggcggcggctgcggcggcggcggcttccgcgtcgacggggacgaataacgggccgcactcgatggcggagttcatcggcaacgcggtgccgaacggcgcgcagagcttcaagctgcaaaaccgatttgcaaatgaagcaaaatatggagtgtattgacctggccttgcactaggtcaacatgtagagcccactccaatgatgtcgaggaggtactaaggggagcccatcgctaacctgggcggcaacgggggcttcgagttcgggtactcgacgtcgaacgtcagctccatccgcggccgatggggaagaccacggctgctagctgtggagtgcgcggtcggcggtggcgatggcggtggaagggggcggtggtggcggcggccgcggctggcgaagaagccggctctggtgaggctgcggtggcgcggcgttagtacatgcgggtaggagcgaggaggcgaggaggcgaggaggatgagaggaggagcgatgggacgatggcgacgaagaagtcggctctggcgtgtccagcggcggaaggggacggcggtggcagcgggggcagaaggggtcgacggcggcggaaggggtcgacggaggcggcggcggcggctggcaaagaagacggctccggtgaggctgcagcgacgcggtgccatgcgaggagcgaggaggcgaggagagggagggtgtgtgatgctatcaatgagagaaggcaggagggcaggcctcccaaaaatgtcgtcctccatgcaggagatattcaatgcacacgaccctgcattcatggcggcatataccagtgcactatacgggcataccatcaacagttgcaacacacaggcagacaggctcgtcccatggctcactatagctatctaagagaactttattagtggtggttgtgtggtggcggcggccaatcggctttgcggaggggccgcggtgggtttcctgaactaccacccccgttttt

SEQ ID NO: 101673 - DNA, 218 bp, Oryza sativa
  Clone ID: PAT_MRT4530_99271C.1
caaatagaacaaagcgcggggcttttaaattattgaaacattccaaatatacaggcataaaccaaaacatcttctaaccataaatcctctaccattgcaaatatacaaggcccaagcaaaccatctactactttctaattcatataatacattaaataaaatcatacacccaccatcattgctttcatctttaacattacaaccttaaaacaaattcc

SEQ ID NO: 101674 - DNA, 6018 bp, Oryza sativa
  Clone ID: PAT_MRT4530_99272C.1
tttatttatcaaatcaactggcacgctcatacattcgaaggcgagctttggacctgcactggagttaagcagatctcccaggccttgtgttttctgtcaacacgcttttggcacacctggtgggacatttaagaagtcagccaacaattcttcctcatggccgagaaaccaccaccatccccagctagcccaggctctgttaaggaaaagatgctgaaattagggttggctgacgtcaatgaaggaaatgtcgtgccgatcgatccagaaaaattcacacctgagcagaagaaagagtttgaagcaatgttgcagcaagcacgggatcagtgcttgaactcattcatgcagacccgcaaggggacacttgttcagaagtacaaaataaaagtggttgctgatgatccggggaccagttcttctaaggatggagatgggaaacaagctccagacggctcggctcagctgagtaacaaaagtgctaccgacagctctctaggaaatcaaggtgacaattctcaaggagtccatggagtgcaaggtgacggggtgcatggagttcaagatcgggtcgactacgctgtgcatcatgttttgatcaatcaatctggggtgttagtcaagaccttatcaaacatgatgaagtccatagccgatggttcaatagctgagcatcaggctgcaggcccggtttatttgcaaggaggtgtctttccaaattatcggtctttgattaccgatgttcagccatcaactcaggcggttccctctgttgcaccaacatctcagccgaaggcactggcgtcaattcccctacctgttccgtcagcaatggcgccaggccagccagtgaaccctcagttgttaatgagagagcagccacagcatggtgggcaggttgcgaatcggctgacccaagatcaggttgctgccacgtttctgccgcctcaacctattgttgatccaatacagcagcatccgattcagcagacacccccaattcagcaggttgtgcaaccaagtttgcaacgcctggtggtcagcctgtgcaacaatttttaaatcaagttgtcccagaacacttggttcaccacgtacagccggatggcacgacgtaatgagggaacaatttgggcttaaaccaaaagagacaggaagcttgtatcggcagccttaccctgagtggtttgagagagttcctcttcccaatcggttcaaagttccggacttcttcaaattttcaggacaagatggtgtgtcaacttatgagcacattagccgattcttagctcagtgtggtgaagcatcggctgtagacgctctgaaggttaggttattccggttatctttgtctggatcggcttttacttggttttcttctttgccgtatgggtcgatcaatagctgggccgatttggagaagcaattccacagctatttctacagtggggttcatgagatgaaattatctgacttgacagcgattaagcagcggcatgatgaacctgtgcacgagtatattcagagattcagggagatgaggaacaaatgctttagcttgagtttaactgatgcccagttagccgatttggcttttcagggtacgattgctccgattagggagaaattctcgtctgaggactttgatagcttgtcacatctgatacagaaagtaaccttgcatgagcataggtccgcagaagttaggaaaaactctaagaaggttaatcatgtttgtccgtacatgtatggatcggatgatgacgaggacgattctgaaatagctgcagccgagtgggtgaggagtaaaaaggtcataccatgccaatgggtaaaaagttctagaaaagaggagaagtatgattttgatattactaaagccgacaagatctttgatctgctactccgagagaagcaaattcaacttcctgctggtcatacaatcccatcggctgagaaattaggcaaaaagaagtattgcaaatggcataattttgggtcccattctactaacgattgcaaggtttttagacagcagatttaggtggccattgagggaggcaagattaggtttgatgattccagaaagccgatgaaggtcgatggtaatccttttcctgttaatatggtgcatacagctggccaaacagccgatagggcccgtgcaaggggttttccggtgaattcggctaagattatcaacaaatatcagaagaagtatgacaagcagcaggagaagcatcatgagaaatacgatgatggtatgaggttgccatctattgaaaactgccctgggtgcagtgatatcgtcgagaactcaagccgatcatatgataggggcaatcggctaaggcagacaagagtttctgttcatcaaagattgggtccagtaaatcaagatcatggccaaaaggaccatgtaatcaggaataatcaatggtgtccttctggtattttcacgaagaatcagaagagaaggaaagcaaagccaaggcaggagtggcgtgttaagaatcaggttcctgcagtcgatgatgttgcagcagttgaggcaaaaaggtaggcaaaagggaagagtgttgtgacggcaccggttaacatggtctttaccctgccagccgaattcgggatcgaccaagccaatgttgacgaggtggaagaggaatcgactaagttggttctgtcactagaacaggcagtgttcgagaaacccgaggggacagagaatcggcatcttaaaccattgtatataaacggctacgtcaatggaaagccgatgtctaaaatgatggttgatggtggggccacggtaaatttaatgccctatgctacgtttaggaagttgggtagaaatgccgaggatctcatcaagacaaacatggtgctcaaagattttggtggcaatccatcagaaaccaaaggtgttctaaatgtggagctgacagtcggcagtaagactattcctaccacgttttttgtcatcgatgggaaaggttcttacagcttgttgcttgggagggattagattcatgccaattgttgcattccttcaactatgcatcaatgtttgattcagtggcaaggcgacaaaatagagatcgtgccagccgacaaccaattgaagatggagaacccaagctattactttgagggcgtcgtggagggttcaagtgtctacactacggacacggtagatgatctcgatgacaagcatggtcaaggtttcatgtcggccgatgatttggaagaagtggacataggtccagagtttagaaccaagctgatagagctcttaaaagagtttagagattgctgagcttgagagtattatgagatgcctggactcagccgatcgattgttgaacatcggctacctatcaaaccaggggttatgccacatcaataacctccgaggagatgcaaggccgacatgcttgaaccggtcaaggctgagattaaaagattatatgatgctggttttattcgtcctcgccgaatatgttgagtgggtttctagtatagttcctgttatcaagaaaaacagcaagggcagggccaccccaaaggatgaatccccattaccagtagccgatcaactagttgatggctgcttcgggacataagattttgagttttatggacggaaacgcagaatacaatcaaatttttatggccgaagaagacattcataagataacttttaggtgtcctagtgcaatcggcttatttgaatgggttgtcatgactttcggcttgaagagtgctagagctacatatcaaagagccatgaattacatatatgacgatctaatcggctggttggttgaagtctacattgatgatgtggttgttaagtccaaagaaataaaggaccatatagcttatttgaggaaggttttcgagagaaccagaaaatatggtctgaggatgaatccgacaaaatgtgcttttggtgtatcggctggccagtttttgggatttcttgtccatgagagggggatcgaggtaactcaaaggagtgttaatgcgatcaagaagattcagcctccagagaataagacagaattacaagagatgatcggcaagattaattttgttagaaggtttatttctaatttgtctggaaggttagaaccttttacaccattgtttagattgaaagtcgatcaacagtttacttggggggcagagcagcaaaaggctttggacaatattaaggaatatcttagctctcctcctgttttgattcctccacagaaaggaataccgtttaggttatatttatcggctcggtcttgattcaggaattggaagggaaggaatgagttgtattctatctcagtcgtcggctcttgcatgctgaaactagatattcccctgtggagaagttatgcttgtgtttgtatttttcgtgtacaaggttgaggcattatctactgtccaacgagtgtactgttgtatgcaaggccgatgttgtcaagtacatgctatcggctccaatattgaaaggaagggttggaaagtggatatttttcttaaccgagtttgatcttcggtatgagtcgccgaaggcgattaagggacaagctatagctgattttattgtggaacatcgtgatgattcaatcggctctgttgaaatagtgccatggactttattctttgatggatcggtgtgttctcacggttgtggtatcggcctagttataatttcccctaggggggcatgtttcgagtttgcttatactattaaaccgtatgcgactaataatcaagctgagtatgaagcagtgctcaaagggttgcaattactcaaggaagttgaagccgataccattgaaatcatgggggattctttgctagtaatcagtcaattggcaggagagcatgaatgcaagaatgatacattaatggtttataatgagaagtgccaagaactaatgaaggagtttcggctggttactttaaagcaattctctcgagaacaaaatattgaagctaatgatttggcccaaggggcatcaggatataagccgatgatcaaagatgttaaggttgaaattgcagcaatgacagctgatgattggaggtatgatgtgcatcagtatttgtgtaatccgtctcaatcggcttctaggaaattgcgatataagggattaaagtatactctgttggatggtgagctatattatcggacgattgatagtgttacttaagtgtttgggtgccgatcaggctaaagatgcaatcggcgaagttcatgaaggaatttgtggtactcatcaatcggctcataagatgaagtggttacttcggcgtgcagggtatttttggccgacaatgctagaggattgtttcagatattatagggggtgtcaggattgtcagaagtttggggcaattcagcgagctccggcatcggctatgaatcctattattaagccatggccattccgaggttggggaattgatatgatcggtatgataaacccaccatcgagtaaaggacataagtttatattggtggcgactgattatttcaccaagtgggtggaggcgattcctttgaagaaagttgattctggggatgcaattcaattcgttcaagaacatataatctaccgttttggtattcctcaaactattacaactgatcaggggtcaatcttcgtgtctgacgagtttgttcagtttgccgatagcatgggtatcaaattattgaattcttcaccttattatgcacaagctaatgggcaagctgaggcgtctaataaaagtttgatcaaattaattaagcggaaaatttctgattatcctcggcagtggcatactcggttggccgaagcgttgtggtcttataggatggcttgtcatggatcgatccaagtccctccttgcaaatttgtttatgggcatgaggctgttttgcggtgggaggttagaatcggctctcgaagaacggaattgcccaatggcaaatatttgaagaaatattacccaagtgtttgggttaacgca

SEQ ID NO: 101675 - DNA, 4872 bp, Oryza sativa
  Clone ID: PAT_MRT4530_99273C.1
atgacgtggctcggttggttgttgaggcaaggatggttgcggagcacgccgttgaggcgcttgaggagagcgacggcatggcaaagagatatgcttaggcaaaagtctgtcgtaaagacttgtggtatcttagagtttgttagagataatagtcgtgtccggatcaaatcaactggcacgctaacacacctgaaggctagtccaggcactgttaaggaaaagatccagaagttgggattgacggacgtcaatgaaggaaacgtcgtgcccattgaaccagaaaaattcacacctgatcagaagaaagatttcgacgcgatgatgcagcaggcacgggatcagttcttgaactcattcatgcagactcgcaagggaacattggttcagaagtataaagtaaaggtagttgccgatgatcctgggaccagttcttctaaaggtgaacacgggaaacaagctccggacggctcagctcaaccgagtgacaaaggtgctacagacggttctctaggaggtcaaggtgacaattctcaggatcgggtcgactatgctgtgcaccatgctttgatcaatcagtctggggtgctagttaataccttatcaaacatgatgaaatcaatagccgatggttcaataggtgagcatcaggctgcaggcccagtttatttgcaaggaggtgtctttccaaattatcggcctttgatcactgaagctcaaccatctattcaggcagttccccccattgcaccatcagctcagccgacggcgcctgcatcgactcccctatctgctccgtcagcgttggcaccaggccagctggtgaaccctcggttgttaataagagagcagccacagcatagtgggcaggttgcgaatcggctgacgcaagatcaggttgctgccacgtttctgccacctcaacctactgttgatccaatacagcagcagccgattcaacaaacacccccgattcaacaggttgtacaaccaattcagcaacagtcacagggagcagttcagcaacgactgtgggccgatgtgattgccgacgtaatgagggaacaatttgggcttaaaccaaaagagactggaaacttgtatcggcagccttaccctgagtgttgggccgatttggagaagcaattccacagctatttctacagtggggttcatgagatgaaattatctgacttgacggtgattaagcagtggcatgatgaacctgtgcacgagtatattcagagattcagggagatgaggaacaaatgcttcagcttgagtttaactgacgcccagttagccgatctggcctttcagggtatgattgctccgattaaggagaaattctcgtctgaagactttgatagcttgtcatatctgatacagaaggtaaccttgcacgagcataggtctgtggaagctaggaaaagctctaagaaggttaatcatgtttgtccttacatatatgggtcggatgatgatgatgaggatgactctgaaatagctgcagccgaatgggtgaggagtaaaaaggtcatatcgtgccaatgggtaaagagttctggaaaagaagagagatatgactttgacataaccaaggccgataagatttttgacttgttacttcgagagaagcagattcaatttcctgccgatcacataattccatcggctgaagaattgggcaagaaaaggtattgcaagtggcacaactctgggtctcatatgactaatgattgcaaggtcttcaggcagcaaatccaagaggctattgaagagggcaaaattaagtttgacgactctaagaggccgatgaaggttgatggcaatccttttcctgttaatatggtgcatacagctggccaaacagccgataggggccgtgttcctgcagccgatgaggccgcagccgatgaggcaaaaaggttagctaaggggaaaagtgtcgtaactgcttcgattaacatggttttcacattgccggctgagtttgggagcaagcaagccgatgttgatgaagttgaagaagaatcggctaaattgattttgtcgccagagcaagcggtttttgagaagccagagggggcagagaatcggcatcttaagccattgtatataaatgattatgtcaatgggaagccgatgtccaagatgatggtcgatggtggggctgcagtgaacttgatgccttacgctacattcagaaagttgggcagaaacactaaagatctcatcaagacaaacatggtgctcaaagattttggcggcaatccatcagaaaccaaaggagttttgaatgtggaactgacagtcggcagcaaaactatccctacaacattctttgtcatcgatgggaagggttcctacagcttgttgcttggaaaggattggattcatgccaattgttgtattccttcaaccatgcatcaatgcttgattcaatggcaaggcgacaggattgagatcgtgccagccgatagccaattgaagatggagagcccaaattgttattttgagggcgtcgtggagggctcaggagtttacgtcaaggacacggtggatgatctcgatgacaagcaaggacaaggttttatgtcagctgatgatttggaagaaattgatataggtccaggtgatcgaccaaggccgacgtttattagtaagaatttatctgcagaatttagaaccaagttgatagagctgttgaaagaattcagagattgcttcgcttgggaatattatgagatgcctggactcagccgatcgattgtagaacatcggctacctatcaaaccaggggttaggccacaccagcaacctccgaggagatgtaaggccgatatgcttgaacctgtcaaagctgaaattaaacgattgtatgatgctggttttattcgtccttgccgatacgctgaatgggtttctagtatagttcatgttattaagaagaatagcaaggtcagggtgtgcattgatttccgagatctgaataaagctacaccgaaggatgaatacccaatgccaatagccgatcagctagttgacgccacgtcaggaaacaaaattttgagttttatggatggaaacgcaagatataatcaaatctttatggctgaagaagatattcataagacagctttcagatttcttggtgcaatcggcttatttgaatgggttgttatgactttcggcttgaagagtgctggagctacatatcaaagagccatgaattacatatatcatgatctaatcggctggttggttgaagtctacattgatgatgtggttgtgaaatctaaagaaatagaggaccatatagccgatttaaggaaggtttttgagagaaccagaaaatatggcatgaagatgaatctgacaaaatgtgcttttagtgtatcggctggccagtttttggggtttcttgttcatgagagggggattgaagtaactcaaagtagtgttaatgcgatcaagaagattcagcctccagagaacaagacagaactacaagagatgatcagcaaaataaattttgttagaaggtttatttctaatttgcctgggaggttgaggcattatctactatccaacgagtgtattgttatatgcaaggccgacgttgtcaaatacatgttatcggctccaatattaaaaggaagggttagaaagtggatattttccttaactgagtttaatcttcggtatgagtcgtcgaaggcgattaagggacaagctatagccgattttattgtggaacatcgtgatgattcaatcggctcggttgaaatggtgccatggactttattctttgatggatcggtatgtactcatggttgtggtatcggcctagttataatttcccctaggggggcatgtttcgagtttgcttatactattaagccttacgcgactaataatcaagcggagtatgaagcagtgctcaaagggttgcagttactcaaggaagttgaagccgatgctattgaaatcatgggggattctttgctggtaatcagtcaattggcaggagaatacgaatgcaagaatgatacgttaatggtttataatgagaagtgccaagaattgatgaaggaattccggctggttactttgaagcatgtatctcgagaacaaaatattgaagctaatgatttggcccaaggggcatcagggtataagccgatgatcaaagatgttaaagttaaaattgcagctatgacagccgatgattggagcgtgggtatcaaattgttgaattcttcaccatattatgcacaagctaatgggcaggccaaggcatctaacaagagcttaatcaagttgattaagaggaaaatttctgattatcctcggcagtggcatactcgtttagccgaagcgttgtggtcttatcggatggcttgtcatggttcaattcaagttcctccttataagcttgtttatggacatgaagttgttttgccatgggaagttagaatcggctccagaaggatagaattgcaagacgatttgacggccgatgagtatgataaccttatggctgatgaaagggaggacttggttcaattgcgtttacgagcccttgctaaggttaccaaagataaggaacgagttgctatgcattataacaagaaagtggtgcccaaaactttttcggaaggtgaacttgtatggaagttgattttgccgattggaactcgggataacaagttcggcaagtggtcaccaaattgggaaggaccgtttcaaatctataaggttgtgtctaaaggggcatatatgttgcaagggcttgatggtgaagtctatggacgagcgctcaatggcaaatacttgaagaaatatttcccaagtgtttgggttaacgcatga

SEQ ID NO: 101676 - DNA, 972 bp, Oryza sativa
  Clone ID: PAT_MRT4530_99274C.1
atgagggaacagttcggcctcaaaccaaaagagactaggagcttgtatcggcagccctaccctgagtggtttgagagagttcctcttcccaatcgatttaaagttctggacttctccaaattttcgggacaggatgcgattaagcagcggtatgatgaacccgtgcacgagtatattcaaaggtttagggagatgaggaacaaatgctttagcttgagtttaactgatgctcagttagccgatttggccttccaaggtatgattgctccaatcagggagaaattctcgtctgaagactttgatagcttatcacatctgatacagaagaaagacgattctgaaatagctgcagccgaatgggtgaggagtaaaaaggtcatatcatgccaatgggtaaaaagtcctagaaaagagaagaagtatgacttcaatattaccaaagctgacaagatctttgatctactactccgagagaagcaaattcaacttcctgctggccatataatcccatcggctgaggaattaggcaaaaagagatattgcaaatggcataattctggatctcattccactaatgattgcaaggtttttagacagcaaattcaggttgccattgaggggggaaagattaggtttgatgattccaaaaagccgatgaaagtcgatgataatccttttcctgttaatatggtgcatacggctggtcaaatagccgatagggtccgtgcaaagggttttcaagtaaattcggctaagattatcaacaaatatcaaaggaaatatgacaagcagcaggagaagcattatgaagaatacgatgatggttttgatcctcattggggttgtgagttctttagattatgctggaatgaagggatgaggttatgtcacgcccagaaattcactagtaatttccgaacttatttgtgcataaaatcctcgtccaggaatcagccgaggtacacaaactga

SEQ ID NO: 101677 - DNA, 1286 bp, Oryza sativa
  unsure (1)..(1286): unsure at all n locations
  Clone ID: PAT_MRT4530_99275C.1
ggagtatatcggcataggcgacagcaccctaggtggctccagaaaacggaaaaacaatagagccttctaaatcttggacaagaaaaatgcaacgacgaaagcagcattgcttcagggggagaaaaatgaatggatagatgcaaccatctattatacaatagcagctggactagtgcagtaagctgcgtgctagagccttcgttgtcatgataagcatgtgtagatctgggaaagcacttcatatcatattgatcaccagctctgcaagctactcctttgcactttctgccttgcctgctgctttttccttgtcatcatcatcatcactctctaagcctgaagtgccatctatcttatcgaagtcatcatctaacccatcatcatcaccatcaggaccctcatcatcactgcctagatctcccagaaggaaaacatccaaatcatgctctggatttgttgaagttgaagtcttgctttgcaccttcatgtctttatgttctgcagttgtagcttgtgaggtctctgttacttccttcttggcatccattttttcctcctctgattttactttcagctcctcaaaatatttgttctcatagagggatgtgtagttgtttactagcaagaaataaaccctccagaatttacgctctttcatgtatcgtggacacaactcatatctgaactttgaaatttccttgacggcggagaggacgagagtggcgtgcctggcctgccactcattcagatcctgacgcacgttcgataccgtgggcacatccgacatctccggctcatcttgcaaggggaagtcgcggaaggtgctgatagtcatgcccttgacgaactcgcggaggtcttcggtgatgccgtagcgctcgagctccgcggcgtccggctccggcgcgacggcggtggggatgggcgggatcgcggggatggaggggacggggaggtcggtggagaggcgcttgatctggccggcgaggaggtcggcctgcttggtggcctcggccgcgatctcccgcgacttggtcgcggtctccgagaagatctccttggacttcttcgccgtctccgacaccagcgccgacgagcgcttggccgcctccgccgacagctcctgcgaccgcttcgccgcctccccggcgaaggcccgcgccctctcccagagatccattntgccgctcggaaatctctcgaaggtcgagtgtttgtgtgtgtccccctcacaacaccgacgttgccttgcctcgtcgtcttcggccttcgtgggtggattttgg

SEQ ID NO: 101678 - DNA, 764 bp, Oryza sativa
  Clone ID: PAT_MRT4530_99276C.1
tatctcgagaacaaaatattgaagctaatgatttggcccagggggcatcggggtataagccgatgatcaaagatgttaagattgaaattgcagctatgacagccgatgattggaggtatgatgtgcaccagtatttacagaatccatctcaatcggcttctaggaaattgagatataaggcattgaagtatactttattggacgatgagctttactatcggacgattgatggggtgttgcttaagtgtttaagtgccgatcaggctaaagttgcaatcggtggagttcatgaaggaatttgtggtactcatcagtcggctcataagatgaagtggttacttcggcgtgcagggtatttttggccgacaatgttggaagattgtttcagatattacaaagggtgtcaagattgtcagaagtttggagcaattcagcgagcaccggcgtcggctatgaatcctatcattaagccatggccatttagaggttggggaattgatatgatcggtatgataaatccaccatcgagtaaaggacataagtttatattagtggcgactgattattttaccaagtgggtagaggtgattcctttgaagaaagttgattctggggatgcaattcaatttgttcaagagtatataatctaccggtttggtattcctcaaattattacaaccgatcaaggctcgattttcatatccgatgagtttgttcagttttccgatagcatgggtttaaatggttgaattcttcaccatatt

SEQ ID NO: 101679 - DNA, 5403 bp, Oryza sativa
  Clone ID: PAT_MRT4530_99277C.1
atggccgagaaacagccaccaccaccatctagcccaggttccgttaaaggcaaggcgttgaagcagggattgactgacatcattgatgacaacgtcatgccgatcgatccagagaaattcacgcctgagcagaaggcggagtttgaagcaaccctgcagcaggcacgggatcagttcctgaactcatttatgcagacccgtaaggggacacttgttcagaagtataaaataaaagtggttgctgatagtcctgggaccggttattctaaagatggagaagtgaaacaagctccagacggctcggctcagccgagtactaaaggtggtaccgacggctcaccgagcgatcaaggcgacaattctcaaggagttcatggcgttcaaggtgatggcgcccaggagccacaaggaggaaatcttgaccagaataatgaactagcacaagattttttcaataacttccaagatcgggttgattacgctgtgcatcatgctttgatcaatcagtccgggccatctgttcaagcagttccctccgttgcacccacaactcagccgacggctccagcgtcgactcctttgcctgctacactagctatgacgccaggacagccggtgaaccctcggttgttaacaagggatcagccacagcatggcgggcaggctacgaatcggctaacccaagatcaagtcgctgccatgtttctgccacctccacctatcgttgatccagtgcagcagcagccgattcagcagacaccaccaatccagccggttgtacaatcgatccaacaacaggtcgtacaaccagctcagcaaacaccaccaaggcagcagcctctgcagccgattcagcagacgccaccaagacagcagcctcagcagccgatccaacagactccgttaagacagcaggtcatcccagaacatttggttcaccatgcacagccggacgcctccttcctcgcaagcccaatatcagctagggggattggtcagccccagtccgcatctcagtatggtcagttcgagtctaggcaacaacagccacaaggagcagctcagcaacgaccgtgggccgacgtgattgccgatgtaatgagagaacaatttgggcttaaaccaaaagagactggaagcttgtatcggcagccttatcttgagtggtttgaaagagtccctctccctaatcggtttaaagttccggatttctccaagtttttgggacaagagggcgtgtcgacttatgagcacatcagccgattccttgctcaatgcggtgaagcatcggctgtagacgctttgaaagttaggttattccggttatctctgtctggatcagcttttacttggttttcttctttgccatatgggtcgatcaatagttgggtcgatttggagaagcaatttcacagctatttctacagtggggttcatgagatgaagttgtccgacttgacagcgatcaagcagcggcatgatgaacccgtgcacgagtatattcagaggttcagggagatgaggaacaaatgctttagcttgagtttgactgatgctcagttagccgatttggcctttcagggtatgattcctccaatcagagagaaattctcgtccgaagactttgatagcttatcgcatctgatacagaagataaccttgcatgagcataggtcggcggaagtcaggagaagctctaagaaagttaatcatgtttgtccatacatgtatggatcggatgacgaggaagatgattctgaaatagctgcagccgaatgggtgaggagcaaaaaggtcataccatgccaatgggtaaaaagtcttggaaaagaggaaaagtacgattttgttttcaccaaggttgacaagatttttgatttactactccgagaaaagcaaattcagcttcctgctggtcatacgatcccatcggctgaggaattaggcaagaagagatattgcaaatggcataattctagatctcattctactaacgattgcaaggtttttagacagcaaatccaggttgccattgaggggggcaagattaggtttgacgattccaaaaagccgatgaaggtcgatggtaatccttttcctgttaatatggtgcacacagctggtcaagcagccgatagggtccgtgcaaagggttttcaagtgaattcggctaggattatcaacaagtatcagaggaagtatgacaagcagcaggagaagcattatgaagaatacgacgatggttttgatcctcattggggttgtgagttcttcagattctgctggaacgaagggatgaggttgccatccattgaaaactgccctaggtgcagtgatatcatcgagagctcgagccggtcatatagtagagccgatgaggcgaagaggttggcaaaagggaagagtgttatagcggcaccaattaacatggtttttacattgccagctgaattcgggatcgatcaggccgatgtcgatgaagtggaagagggatcggctaagttggttctatcaccagaacagacagtatttgagaaacccgaggggacggagaatcggcaccttaaaccattgtatgtaaacagctacgtcaatgggaagccgatgtctaagatgatggtcaatggtgggaccgcggtgaatttgatgccttacgctacgttcaggaagttgggtaggagcgccgaggatctcatcaagacaaatatggtgctcaaagactttggtggtaatccatcagaaaccagaggtgttctaaatgtggagctgacagtcggcagcaatactattcctactacgttttttgtcatcgatgggaagagttcgtacagcttgttgcttggaagggattggattcacgccaattgttgcattccttcgattatgcatcaatgcttgattcaatggcaaggcaacaagatagagatcgtgccagccgacagccaatcgaagatggagaacccaagctattactttgagggcgtcgtggagggttcaaatgtctacgctaaggatacagttgatgatctcgatgacaagcaagatcaaggttttatgtcggccgatgagttggaagaaatagacataggtccaggcgattggccaaggccgacatttattagcaaaaatttgtttccagagtttagaaccaagctgatagagctcctaaaagagtttagagattgcttcgtttgggagtattatgagatgcccggactcagccgatcgattgttgaacatcggctacctatcaagccaggggttagaccacgccagcaacctccgaggagatgtaaagctgatatgcttgaacctgttaaagctaagatcaaacggctgtatgatgccggttttattcgtccctaccgatatgctgaatgggtttctagcatagttccagttattaaaaagaatggcaaggtcagggtgtgcattgattttcgagatctgaataaagctacaccaaaggacaaatatccaatgccagtggccgattggctagttgatgccgcatcagggaacaaaattttgagttttatggatgggaacgcaggatataatcagatctttatggctgatgaagatatccataagacggcttttagatgccctggtgcaatcggcttatttgaatgggtcgtcatgacttttggtttaaagagtgctggagcaacatatcaaagagccatgaattatatatatcatgatttaatcggctggctggttgaagtttatattgacgatgtggttgtcaaatctaaagaagtgaaggaccacatagccgaattaaggaaagttttcgagagaaccaggaaatatggcttgaagatgaatccgacaaaatgtgcttttggtgtgtcgcccggccagtttttgggatttcttgttcatgaaagggggatcgaggtagtgccatggactttattctttgacggatcggtatgtactcatggttgtggcatcggcttagttataatttcccctaggggggcatgtttcgagtttgcttatactattaaaccatatgcgaccaataatcaagctgagtatgaagcggtgctcaaggggttgcaattactcaaggaagttgaagttgataccattgaaatcatgggggattctttgctgtgcttggaactaatgaaagagtttcggctggttactttaaagcatgtatctcgagaacaaaatcttgaagctaatgatttagctcaaggggcgtcgtggtataagccaatgatcaaagatgttaaagttgaaattgcagcgatgtcagccgatgattggaggtacgatgtgcaccagtatttgagtaatccatctcagtcggcttctaggaaattaagatataaggcattaaagtatacactgttggatgacgagctttattatcggacgattgatggagtattacttaagtgcttgagtgccgatcaggctaaggttgcaatcggcgaagttcatgaggggatctgtggtactcatcaatcagctcacaagatgaagtggttgcttcggtgtacaggatacttttggctgacaatgctggaggattgtttcagatattataaggggtgtcaggattgtcagaagttcggagcaattcagcgagcaccagcgtcggctatgaatcctattattaagccatggccgttcagaggttggggaattgatatgatcggtatgacaaacccaccatcgagtaaaggacataaatttatattggtggcaactgattattttaccaagtgggtagaggcgattcctttgaagaaagttgattctgggtatgctattccatttgttcaggagcatataatctaccgatttggtcttcctcaaactattactacggatcaagattcaatctttgtgtccgatgagtttgttcagtttgccgatagtgtgggcatcaagttgttgaattcttcaccttattatgcacaagctaatgggcaagccgaggcatctaataaaagtttgatcaaattgattaagcggaaaatttctgattatcctcggcaatggcatactcggttggccgaagcattgtggtcttataggatggcttgtcatggatcgattcaagttcctccttacaaacttgtttatgggcatgaggctgttttaccatgggaggttagaatcggctctcgacgaacggagttacaaaatgatttaacagccgatgagtattacaaccttatggccgatgagagggaggatctggttcagtcgcaattgcgagcccttacaaaggttaccaaggataaggaacgtgttgcttggcattataataagaaagtggtacctaaagatttttcggaaggtgaacttgtatggaagttgattttgccgattggtactcgtgatagtaaattcggcaaatggtcgccgaattga

SEQ ID NO: 101680 - DNA, 312 bp, Oryza sativa
  Clone ID: PAT_MRT4530_99278C.1
atgtatcagcattgtgatacttgtcctgaaagtttgggacaaaataggaagatcaattatctgatgacgaatgcaaatgctgaagcgaggcagataaagatgagggaggcgactattttggcaagcttatacgacccatcaacagtgactgcatacagcttagggatagatgagaccatctatccatcccttgttatttcttgcatgactatctgctccattaaccagctgctcagagattcaagtgccatccgaaaagaggggaaaagggacaaatcaaagctacaatggcatgcttgtgtggcattttga

SEQ ID NO: 101681 - DNA, 3867 bp, Oryza sativa
  Clone ID: PAT_MRT4530_99279C.1
atggccgaaaaacaactaccaccgccatctagcccaggctctgttaaggaaaagatgctgaagttgggattgactgacgtcaatgaaggaaacgtcgtgccggtcgatccagaaaaattcacacctgagcagaaaaaagagtttgaagcaatgttgcaacaagcacgggatcagttcttgaactcgttcatgcaaacccgcaaggggacacttgttcagaagtacaaaataaaagtcgttgttgatgatcctaggaccagttcttctaaggatagagatgggaaacaagctccagacggctcggctcagccgagtatcaagggtgctaccgacggctctctaggaaatcaaggcgacaattctcaaggagtccatggagtacaaggtgacggggtgcatggagttcaaggtgacggtgctcaggggctgcagggaggaaatcttaatagtgatgtggcacaggactttttcaataacttccaagatcggattgattacgctgtgcgtcatgctttgatcaatcagtctggggtttcagcagcagccgattcaacagacacctccaattcagcaggttgtaaaaccaatccagcaacaggtcgtgcaaccagttcagcaaacaccaccaaggcagcagcctctgcagccgatccaatagactccgttaagacagcaaatcgttcagccgattcagcaccaggggtcaataagcgcatcggccggccacaaggtgcagctcagcagcgaccgtgggccgatgtgattgctgatgtgatgagggaacagtttgggcttaaaccaaaagagactggaagcttgtatccgcaaccttaccctgagtggtttgagagagttcctcttcccaatcggttcaaagttccggactcctccaaattttcaggacaagatggtgtgtcgacttatgagcacattagccgattcttggctcagtgtggtgaagcatcggctgtagacgctctgaaggttagttgggccgatttagagatgcaattccacagctatttctacagtggggttcatgagatgaaattatcttacttgacagcaattaagcagcggcatgatgaacctatgcacaagtatattcagagattcaggaagatgaggaagaaatgcttcagcttgagtttaactgatgcccagttagccgatctagcctttcagggtatgattgctccgatcagggagaaattctcgtctaaagactttgatagcttgtcgcatttgatacaaaaagtaaccttgcacgagcataggtctatggaagtcaggaaaagctctaggaaggttaatcatgtttgtccgtacatgtatgggtcagatgatgaggaggacgactctgaaatagctgcagccgaatgggtgaggagtaaaaaggtttttagacagcagattcaggtggccattgaggggggcaagattagatttgatgattccaaaaagccgatgaaggtcgatgctggccaaacagccgatagggtccacgcaaagggttttcaggtgaattcggctaagattatcaataaatatcagaggaagtataacaagcagcaggagaagcattatgaagaatacgatgatggttttgatcctcattggggtttgatatcattgggtgcagtttctgttcatcaaagattgggtccggtgaatcaagatcgtggccaagaggacgagaatcagaagaaaagggttcaaagattgaggaacagagagcacttccaggaggttgaacaagaaattaatcatcggctgagaaaagcaaagccaagacaggagtggcgtgttaagaatcaggttcctgtagccgatgatgttgcagccgatgaggcaaagaggttggcaaaagggaagagtgttgtgacagcaccaattaacatggcagtgttcgagaaacccgaggggacagagaatcagcatcttaaaccattgtatataaacggctatgtcaatgggaaaccgatgtctaagatgatggttgatggtggggccgtggtaaatttgatgccttatgctacgttcaggaagatggggagaaatgccgaggatctcatcaaaataaatatggtgctcaaagactttggtggtaatccatcggaaaccaaaggtgttttgaatgtggagctgacagtcggcagtaagactattcctacgacgttttttgtcatcgatgggaagggttcttacagcttgttgcttggaagggattggattcatgctaattgttgcattcctttgactatgcatcaatgtttgattcaatggcaaggcgacaagatagagatcgtgccagccgacagccaattgaagatggagaacccaagctattattttgagggcatcgtggagggttcagatgtctacactaaggatacagtagatgatctcgatgacaagcaaggtcaaggtttcatgtcggccgatgatttggaagaaatagacataggtccaggcgatcggccaaggccgacatttattagtaagaacttatctccggagtttagaaccaagctaatagagttcttaaaagagtttagagattgcttcgcttgggagtattatgagatgcctggactcagccgatcgattgttgaacatcggctacctatcaaaccaggggttaggccacgccagcaacctccgaggagatgtaaagccgatatgcttgaacctgtcaaagctgatattaaacgattgtatgatgctggttttattcgtccttgccgatacgctgaatgggtttctagtatagtttcagttattaagaagaatggcaaggtcagggcgtgcattgatttccgagatctgaataaggccactccgaaagatgagtacccaatgccagtagccgatcaattagttgatgctgcttcgggacataagattttgagttttatggatggaaacgcgggatacaatcaaatttttatggccgaagacgacattcataagacagcttttaggtgtcctggtgcaatcggcttgtttgaatgggttgtcatgactttcggcttgaagagtgctggagctacatatcaaaaagccatgaattatatatatcatgatctaatcggctggttggttgaagtctacatcgatgatgtggttgttaagtctaaagaaatagaggaccacatagccgatttgaggaagatttttgagagaaccagaaaatatggcctaaagatgaatccgacgaaatgtgcttttggtgtatcggctggccagtttttgggatttcttgttcatgaaagggggattgagaaaggaataccgtttaggttatatttatcggccgccgacgtagtcagatacatgctatcggctccaatattgaaaggaagggttgggaagtggatattttccttaaccgagtttgatcttcggtacgagtctccgaaggcaattaagggacaagctatagccaattttattgtggagcatcgtgatgattcaatcgcttcggttgaaatagtaccatggactttattctttgatggatcggtgtgtactcatggctgtggtatcggcttagtcataatctcccgtaggagcgcatgtttcgagtttgcttatactattaaactgtatgcgactaataatcaagctgagtatgaggcagtgctcaaagggttgcaactactcaaggaagttgaagccgatgccattgaaatcatgggggattctttgttagtaatcagtcaattggcaggagagtatgaatgcaagaatgatacattgatggtttataatgagaagtgccaagaactaatgaaagagtttcggctggttactttaaagcatgtttctcgagagcaaaatattgaagctaatgatttagcctaa

SEQ ID NO: 101682 - DNA, 521 bp, Oryza sativa
  Clone ID: PAT_MRT4530_9927C.1
gtgaaagccactggtgaatgtcacacccgttttgataccccaagtggcaggcagccaccccataaggaggcctacatacatgttttaatgcagctgagctccacatttgcataaacaggtagcaaatataactgatctctttaattgcacttattcgacagttagcagggattatagacataatttccattggcacaatctaaatattgctacaagggagtattagcttataaatagatcagttgtatataaaacaaattttgattagagtttaggttctaaatttgcccgaacaaatgactttgaaatgaaaaattagggaaaaatagcattgttatgattgtgtatcttagtatgtttttctctgctaatgtaattttcttatttatgatagttttaatatcaattgcattaaactcttataataagccaatcatgatccaggaaggataacaggtactaagcacttcaagatgaggaggtcatacagttttgatgactgttgctttgtagtatagtct

SEQ ID NO: 101683 - DNA, 753 bp, Oryza sativa
  Clone ID: PAT_MRT4530_99280C.1
atataacctctcctctcttccttcctgcctagcggttcctcctctcatctcccctcttctctcttcctgtgggcgtgtgtcctgtgtcccccgggggatcggccgaggcgtccgtttgggttgggtcgattgatgcgtaggaggcaatggcggtgtcctcgccaacttctgctccggagaagaagaggaaatggctgctcagcaacaggaaggtgatcgacaagtacctgagggaggcgagggcgattcttgcgacggcgccggaagccggcggcggggacgccgtggcggccctcggcctagtagacgcggcgctggagctgtcgccgcggatggagtccgcactggagctccggggccgcgccctcctctcgctccggcggtacagggatgtggcggaaatgctgcgggattacatccccagctgcgccaagacatgctccggcgacgacaccttgtcgtcgtcgacatcgtcgtccctctcgtcgtccggctccggtgacctcggcacgatatcccgggccaaactcctctcgcctgaccgccaccgctccgacgcggcggccgaaccaggcgccgcagtcgcccgctcattccgctgcttcgacatctccgagctcaagcgccgcgttctcgccagcctctccaagaatcccaacacggacacccaatggaggtacttagttcttggccaagcttgcttccacctcgggctgatcgaggacgccatggtgcttctccagaccggacgcc

SEQ ID NO: 101684 - DNA, 165 bp, Oryza sativa
  Clone ID: PAT_MRT4530_99281C.1
atgccgaacacgagtgggagggaggggggagacttcgctggagacttggaagatgtgtgccgagttggggcgcgggtgagaactagcgaggagatgggagtcgaggccgagaagacgggctcggcgccaccgcctgctcgcagtcgcaactcgcaaggggagtag

SEQ ID NO: 101685 - DNA, 2727 bp, Oryza sativa
  Clone ID: PAT_MRT4530_99282C.1
aagtctaatgggagctcaaggtctgctgagtcttcataaagaaaccaaacccgggcatctttctggaagccttcataaaagctgcagaaccaatctttgagcagctcagccgatagttttgccccagcatcggctggtgtggatgcatattctccatatgacatgcatcgcctcgtgttttctgacttgacggcgattaagcagcggcatgatgaacctgtgcacgagtatattcagagattcagggagatgagaaacaagtgcttcagcttgagtttaactgacgctcagttagccgatctagcctttcagggtatgattgctccgattagggagaaattctcgtctgaagactttgatagcttgtcacatctgatacaaaaggtaaccttgcacgagcataggtctgcggagactaggaaaagctctaagaaggttaatcatgtttgtccttacatgtatgggtcggatgacgatgaggatgactctgagatagctacagccgaatgggtgaggattaaaaaggtcataccgtgccaatgggtaaaagtatggaaaggaagagaatatgattttgatattactaaagctgacaacatttttgatctgctactccgagagaagcaaattcaactccctgctggtcatacgattccatcatctaaggaattaggcaaaaagaaatattgcaaatggcataattctgggtcccattctactaacgattgcaaggtgtttagacaacagattcaggtggccattgagggaggcaagattaagtttgatgattccaaaagccgatgagggtcgatggtaacccatttcccgttaacatagtacacacagttggccgaatagctgatacggggtgcatgaggggttatcaagtaagttcggctagaattataaacaaatatcaaaggaaatatgacaagcaacaggaaaggcatcatgaagaagataatgaaggtatgaggttaccatctatcgaggattgtcctggatgcagtgatgttgcaaggggttcaagccgattgtacgatggaggcaattggctaaaacagacaagagtgcctgttcatcagagattgggtccagtaaaccaacgtggtgattcggaatatgacgaaaataagaagactcaatggtgtcctgctagtatttttacgaagaatcagaaaagaaggaaagcaaaaccgaggcaggagtggcgtgttaagaatcaggctcctgtagccgacgatgttgcagctgatgaggcaaagaggttggcaaaaggaaagagtgttgtgacggcaccagttaacatggtttttaccttgccagccgaattcgggatcgatcaagccgatgtcgacgaggtggaagaggaatcggctaagttggttctatcaccagaacaggcggtgttcgagaagtctgaggggacagagaatcggcatcttaaaccattgtatataaatggctatgtcaatgggaagccgatgtctaaaatgatggttgatggtggggccgcggtgaatttgatgccttatgctacgttcagaaagttgggtagaaatgccgaggatctcattaagacaaatatggtgctcaaggactttggtagcaatccataggaaaccaaaggtgttctaaatgtggagctgacagtcggcagtaagactattcctaccacgttttttgtcatcgatgggaagggttcttacagcttgttgcttggaagggattggattcacgccaattgttgtattccttcaactatgcatcaatgcttgatttagtggcaaggcgacagaatagagattgtaccagccgacagccagttgaagatggagaacccaagctattattttgagggcgtcgtggagggttcaagtgtctacactaaggatacggtagatgatctcgatgacaagcaagtcaaggttttatgtcggccgatgatttggaagaaatagatataggtccaggcgatcggccaaggccgacatttattagtaagaatttgtctccagaatttagaaccaagctgatagagctcttataagagtttagagattgcttcgcttagaagtattatgagatgcctggactcagccgatcaattgtagaacatcggctacctatcaagccaggggataggctgcaccagcagccttcgaggagatgcaaagccgatatgcttgaacctttcaaagctgagattaagcgtttatatgatgctggttttattcgtccttgccgatatgctgagtgggtttctaatctgaataaagctacaccgaaagatgaatatccaatgccagtagccgatcagctggttgatgctacatcagggaacaaaattttgagttttatggatggaaacgcagggtataatcaaatttttatggctgaagaagatatccataagacagcttttagatgtcctggtgcaatcggcttatttgaatgggttgttatgactttcggcttgaagagtgctggagctacatatcaacgggccatgaattatatttatcatgatctaatcggctggctggttgaggtctatattgatgatgtggttgttaaatctaaggaaataaaagaccacatagccgatttaagaaaagttttcgagaggaccaggaaatatggcttgaagatgaatccgacaaagtgtgcttttggtgtatcggctggccagttcttgggatttcttgtccatgagaggggaattga

SEQ ID NO: 101686 - DNA, 4929 bp, Oryza sativa
  Clone ID: PAT_MRT4530_99283C.1
atgtaattgccgatgtgatgagagaataatttgggcttaagccgaaagatactggaaaattgtatcggcaaccttaccctgagtggtttaaaattgatttaaaatcccagacttctccaaattttcaggacaagatggtgtgtcaacttatgaacacattagccgatttttagctcagtgcggcgaagcatcggctgtagacgctctcagagttagattgttccggttgtccttgtctgggtcggcttttatatggttttcttctttgccgtatgggtgcgtcaatagttgggccgatttggagaagcagtttcatagctatttctatagtggagttcatgagatgaagttatctgatttgacagcaatcaaacaaaggcatgatgaacctgtacatgagtatattcagagaatcagggagatgaggaacaagtgttttagcttgagtttgactgatgcccagttagccgatttggcttttcaaggcatgattcctccgattaggaagaaattctcatctggagattttgatagcctgtcgcatctcgtgtagaaggtaacattgcatgaacagaggtttgcagaggccaggagaagctctaagagggttaatcatgtctgcccttacatgtatggatcggatgatgacgacgatgactccgaaatagctgcagccgaatgggtaaggagtaaaaatgttataccttgtcagtgggtaaagaattctggaaaagaggagaaatatgattttgatattaccaaagctgacaagatttttgatctgctactccgggagaagcaaattcaactccccgctggtcatgtaattccatcggctgaggaactaggcaaaaggaggtattgcaaatggcataattctagatctcattctactaatgattgcaaggtttttagacagcaaattcaagtagccattgaaggagggaagattaagtttgatgattccaaaaagccgatgaaggttgatggtaatcctttccctgttaacatggtgcataccgttggtcggacagccgatgtgggacaagcgagaggttttcgcatgaattcggctaaaattataaataagtatcagaggaaatacgacaaacaacaagataggcattatgaagaagataatgatggtatgaggctacatctattgaagactgtcctggatgcagtgatattacatagagttcaagccgatcgtacaatagaggcaatcggctgaagcaggcgagaattcccgttcatcaaaggttgggcccggtaaatcaaaatgattacttggaggaagacgagaacgcgaagactcagtggtgtccttctggtatttttacaaagaatcagaaaagaaggaaagcaaagccaaggaaggagtggcgtgttaagaatcaagttcttggagccgatgatattgcagccgacgaagcaaagaggttggcaaaagggaaaagtattttaacggcgccaattaacatggtctttactttgccagccgaattcgggattgactaggccgatgttgacgaactggaagaggaatcggctaagttggttctatcaccggaacgagcagtctttgaaaagcctgaggggatagaaaatcggcatcttaaaccattgtatataaatggctatgtcaatgggaagccgatgtctaagatgatggtcgatggtggggctgcggtaaatttgatgccttatactacgttcagaaagttaggtagaactactgaggatctcatcaagacaaacatggtgcttaaagactttggtggcaacccatcgggaacaaagggtgttctgaatgtagaataattgacaatcggcagtaaaactatccctaccacattttttgtcatcgatggaaaaggttcttacagcttattgctcggaagggattggattcatgccaattgttgtattccttcgaccatgcaccaatgcttgattcaatggcaaggtgacaaggttgagattgtgccagccgacagctgattgaagatgaagaatccaagctattattttgagggcgttgtggagggttcaagcgtctacgccaaggacacggtagatgatctcgatgacaagcaaggtcagggttttatgtcggccgatgatttggaagaagtggatataggtccgggtgatcgaccaaggccgacattcattagtaagaatttgtcttcggaatttagaaccaagctgatggagcttttgaaagagtttagagattgctttggttgggagtattatgagatgccaggactcagccgatcgatcgtcgagcatcgattacctttaaaaccagggattagaccacaccagcagcctccgagaagatgcaaagccgatatgcttgaacctgtcaaggctgaaatcaaacgtttgtatgatgatggttttattcgtccttgccgatatgctaaatgggtttctaacttgaataaagctaccccgaaggatgaatatccgatcagttggttgatgctgcttcaggacataagatactaagttttatggatgggaacgcgggatataatcaaatctttatggccgaagaagatatccataagacggccttcagatgtcctggtgcaatcggcttgtttgaatgggttgtaatgactttcggcttaaaaagcgctggagctacgtactagagggctatgaattatatatatcatgatctgatcggatggttggttgaggtctacattgatgatgtggttgttaaatccagagaaatagaggaccacatagccgatttgagaaaggttttcgagaggactaggaaatatggtttgaagatgaatccgacaaaatgggctttcggtgtatcggctggccagttcttgggatttctttttcatgagagggggattgaaatacctcagaggagtatcaatgcgatcaaaaagattaagcctccggaaaacaagacagagttataggagatgatcggcaaaattaattttgttcgaaggtttatttctaatttgtctggaagactggaaccttttacaccattgttaagattgagagccgatcagcaattcacttggggggcagaataacagaaagctttggataatattaaagaatatttaagttctcctccagtattgattcctccacaaaaagggattcctttccggttatatttgtcggccggtgataagtcaatcggctcggtcttgattcaggaacttgaaggaaaagagagggttgtgttttatttaagccgtcggctcttggatgcagaaacaaggtattctcctgtggagaaattgtgtttgtgtttatatttctcttgcactaagttgaggcattacttgttgtccaatgaatgcactatggtgtgtaaagccgatgtgattaagtacatgctatcggctccgattttaaaagggagagttggcaagtggatattttctttaacggagtttgatcttcagcatgaatcaccaaaggcgattaagggacaggatgtagccgattttattgtgggtcatcatgatgattcaatcggcttggttgacattatgccttgggtattattctttgatggatctgtatgcagtcatggttatggtatcggcttggttataattgcgccttggggggcaagttttgaatttgcctatgctattaaacaccgtgtgactaataatcaggctgagtatgaggcggtcttaaaagggttacagttgcttcaggaagtagcagccgatgctattgaaatcatgggtgattcgttgttggtgattagtcaattggcaggagagtatgaatgcaaggatgatacattgatggtttattacgaaaagttccgaacgttgataagtgaatctaggctggtgaatttgaagcacatatctcgagaacagaatatagagtcgtaatagtttggctcaaggagcgttgggatataagccaatgacaaaagatatcgagatagagattgctactattatagccgatgattggagatatgatgtgtttcagtatttacagaatccatctcaatcggcttcgtggaaattgcattataaggctttgaaatatactttattggatgatgacctctattatcggacgattgatggagtgttgcttaaatgtttgagtgtcgatcaggcaaaagttgcaatcggcgaagttcatgaagggatatgtggtacacatcagtcggctcataaaatgaagtggttgctccgacgtgctggatatttttggctgacaatgctggaggatcgtttcagatattataaaagttgtcaagattgtcagaagtttggagcaatccaaagggcgccggcatcggctatgaatcctattattaaaccgtggccttttaaaggttggggaattgatatgatcggtatgattaatccaccctcgagtaaaagacataagtttatattggtggcaaccgattattctaccaagtgggtagaggccattcctttaaagaaagttgattctggggacgctatccagttcgttcaagagcatataatctatcgatttggtatccctcaaactattacgactgatcaaggttcaattttcgtatccgatgagtttgttcaatttgccgatagcatgggaattaaattgttgaattcttcaccgtattatgcacaagctaatgggcaggccgaggcatctaataagagtttgatcaagttgattaagatgaagatttctgattatcctcggcaatggcatactcggctggctgaagcattgtggtcttatcggatggcttgtcatggattgatacaggttcctccttataaacttgtttatggtcatgaggctgttctgccatgggaagttcgaatcggctcgaggaggacagagttgctaaatggcaaatacttgaagaaatattatcccagtgtttgggttaatgca

SEQ ID NO: 101687 - DNA, 3579 bp, Oryza sativa
  Clone ID: PAT_MRT4530_99284C.1
atgagggtcgatggtaacccatttcccgttaacatagtacacacagttggccgaatagctgatacggggtgcatgaggggttatcaagtaagttcggctagaattataaacaaatatcaaaggaaatatgacaagcaacaggaaaggcatcatgaagaagataatggtggctttgatcctcattggggctgtgagttcttcaggttctgtcggaatgaaggtatgaggttaccatctatcgaggattgtcctggatgcagtgatgttgcaaggggttcaagccgattgtacgatggaggcaattggctaaaacagacaagagtgcctgttcatcagagattgggtccagtaaaccaacgtggtgattcggaatatgacgaaaataagaagactcaatggtgtcctgctagtatttttacgaagaatcagaaaagaagggttcaaagattgaggagtagggaacgcttccaggaggtcgagcaagaaattaatcatcggctgaagaaagcaaaaccgaggcaggagtggcgtgttaagaatcaggctcctgtagccgacgatgttgcagctgatgaggcaaagaggttggcaaaaggaaagagtgttgtgacggcaccagttaacatggtttttaccttgccagccgaattcgggatcgatcaagccgatgtcgacgaggtggaagaggaatcggctaagttggttctatcaccagaacaggcggtgttcgagaagtctgaggggacagagaatcggcatcttaaaccattgtatataaatggctatgtcaatgggaagccgatgtctaaaatgatggttgatggtggggccgcggtgaatttgatgccttatgctacgttcagaaagttgggtagaaatgccgaggatctcattaagacaaatatggtgctcaaggactttgtggcaaggcgacagaatagagattgtaccagccgacagttgaagatggagaacccaagctattattttgagggcgtcgtggagggttcaagtgtctacactaaggatacggtagatgatctcgatgacaagcaagaacatcggctacctatcaagccaggggataggctgcaccagcagccttcgaggagatgcaaagccgatatgcttgaacctttcaaagctgagattaagcgtttatatgatgctggttttattcgtccttgccgatatgctgagtgggtttctagcatagttcctgtcatcaagaagaacggcaaggtgagggtatgcattgattttagagatctgaataaagctacaccgaaagatgaatatccaatgccagtagccgatcagctggttgatgctacatcagggaacaaaattttgagttttatggatggaaacgcagggtataatcaaatttttatggctgaagaagatatccataagacagcttttagatgtcctggtgcaatcggcttatttgaatgggttgttatgactttcggcttgaagagtgctggagctacatatcaacgggccatgaattatatttatcatgatctaatcggctggctggttgaggtctatattgatgatgtggttgttaaatctaaggaaataaaagaccacatagccgatttaagaaaagttttcgagaggaccaggaaatatggcttgaagatgaatccgacaaagtgtgcttttggtgtatcggctggccagttcttgggatttcttgtccatgagaggggaattgagataactcagagaagtataaatgcgatcaaaaatattaagcccccggaaaacaagaccgaattgcaggagatgatcggcaagattaattttgttcgaaggtttatttctaatttgtccagaaaattagaaccttttacaccattgttgagattgaaggccgatcagcagtttacttggggggcagagcagcaaaaggctttggataatattaaaggatacatgagttcccctcctgttttgattcctccacagaaagggataccttttagattgtatctgtcggccgctgagtatgaagcagtgcttaaagggttgcaattgctcaagcaagttgaagccgatgctattgaaatcatgggggattctttgctggtaatcagtcaattggcaggggagtatgaatgcaagaatgatacgttaatagtttataatgagaagtgccaagaactgatgaaggaatttcggctggttactttaaagcatgtatcacgagaacaaaatattgaagctaatgatttggcccaaggggcatcggggtataagccgatgatcaaagatgttaaggttgaaattgcagcaataacagccgatgattggaggtatgatgtgcatcaatatttacataatccatctcaatcggcttctaggaaattaagatataaggcgttgaagtacactctattggatgatgagctttattatcagacgattgatggagtgttacttaagtgcttgagtgctgatcaggctaaagttgcaatcggcgaagttcatgaaggaatttgtggcattcaccaatcggcccataagatgaagtggttacttcggcgtgcagggtatttttggccgacaatgctggaggattgcttcagatattataaggggtgtcaagattgtcagaagtttggggcaattcaacgagcgccggcatcggctatgaatcctattattaaaccgtggccatttagaggttggggaattgatatgatcggtatgataaacccaccatcaagtaaagggcataagtttatattggtggcgactgattatttcaccaagtgggtggaggccattcctttgaagaaagttgattctaggaatgcaattcaatttgttcaagaacatataatctaccgatttggtattcctcaaactattacaactgatcaaggttcaatcttcgtgtccaatgagtttgttcagtttgccgatagcgtgggtatcaaattgttgaattcttcaccatattatgcacaagctaatgggcaggctgaggcatctaacaagagcttgatcaaattaattaagcggaagatttctgattatcctcggcaatggcatacccggttggccgaagcattatggtcttatcggatggcttgtcatggatcaattcaagttcctccttataagcgtgtttatggacatgaagctgttttgccatgggaagttagaatcggctctagaagtatagaattgcaagacggtttgacagccgatgagtattataaccttatggccgatgagagggaggacttggttcaattgcgtttacgagcccttgctaaggttaccaaagataaggaacgagttgctaggcattataacaagaaagtaatgcctaaggatttttcggaaggtgaacttgtatggaagttgattttgccgattggaactcgggataacaagttcggcaagtggtcaccaaattgggaaggaccgtttcaaatatataaggctgtgtctaaaggggcatatatgttgcaagggcttgatggtaaagtttatggacgagcgctcaatggcaaatacttgaagaagtattacccaagtgtttgggttgacgcatga

SEQ ID NO: 101688 - DNA, 2160 bp, Oryza sativa
  Clone ID: PAT_MRT4530_99285C.1
atgtcgaacgaggtgaaccatgtaggaaaggctcccatgtttagtgacacaaattattctacttggaaaattaaaatgtctactcacctcaaggctacgagcttccatatttggagcattgtggatgtaggttttgttatcacgggaagccccttgatggaggttgatcatcgcaaccttctactcaatgctcaagcaatgaatgccttgttcaactcattgagccaagacgaatttgatagagtgagcaaccttgagacgacttatgagatatggaacaagttgagtgagatacatgagggcactagtgagtacaaggatgcaaagctccatttcctcaagatccaatatgagacctttgccatgttgccggatgagagcgtcaatgatatgtatgggaggctaaatgtgatagttaatgatctcaagggtcttggggccatctacaccgaccttgaggtggctcaaaagatgcttagagccttaccggacaagtataagaaccttgtcaccttcctcatcaactcggacatgtcaaggatgacacccgctagtcttttgggcaagatcaacaccaatgacatgtacaagttgaagaagaaggagatggaaaaagcatcaccatccaagaagactagcattgcccttcaaaccgaggtggaagacaagggaaagggcaaggtaaatgaaggcaaggatgacttggatgaagagattgctcttcttactagaaggttcaatgacctcttgggaagaaggaaagagagaggaagagggtcaaacaccaatagaagaaggaatagaagacccaacaagactctctccaacttgagatgctttgagtgtggcgagaaggggtactttgcttccaagtgtccttccaagggtgatgatgaggacaagtcatcaaagaagaacaagagtggtggatacaagctcatgaagaagctcaagaaggagggcaagaagatcgaggctttcattggtcaatgggactcaagtgttgagagcttcgattctcaatccgggtccgacaacgagagtgatgatgatggaagctccaagaagaagaacatggccggagtagctatcaaggaggctccatcactattctctccattttgcctcatgccaagaggctccaccaaggtaacatcaagtagtgatagtgaaagtgatgatgatgttgatgatatttcctatgatgagcttgtgagtatgtttgaggagctccatgcttatagtgagaaagagattgccaagtacaaggctctaaagaaagatcatgcttctttggaaaccttgtatgaggagctaaagacttctcgtgagagactcaccatttctcatgagaagcttaaggaagctcatgacactctccttaccactacccaacatggagctcacattgatctctgtgcttctatttgtgatgtttcacttgtggttgtgaacaatgagctcaaggagcaagtggccaagctcaacaagagtttggaaaggtgcttcaagggtaagaccactcttgacaaaatcttgagtgagcaacagtgcatccttaacaaggagggacatggattcattccaaagaagggaaggttcatgatggtcgcattgttgctagatatgtgggttcccctatacttggtggtgaactactacaccggtggaagccattgggtgcttgatagtgggtgcacccaacacaagaccggtgatagaaagatgttcaccacatttgaagtaggaggcaaagatcaagagagagtcacttttggtgataatagcaaaggaaaggtaattgggttaggtaaagatgctatcaccaatgatctatcaattacaaatgtctatcttgttgaaccactaaatttcaatttgttttccgttgcacaaatttgtgatcttggtttgtcatgtactttcaaccctcaagatgtgattgtttctagtcttcatgacaaatcttgcatcttcaaagattttcgttataaatatctttatttggttgatttcaactcaagtgaagcaaatttgaaagcttgtttggttgcgaaaatttctttgggttggctttggcataggaggctagcccatgttggtatgcatcaattgagcaaacttttaaaacatgatctagttgtgggcttgaaaatgtga

SEQ ID NO: 101689 - DNA, 6034 bp, Oryza sativa
  Clone ID: PAT_MRT4530_99286C.1
ttgcaggatcaaatcaaatggcacgctagcatacccgaaggcgtgttttggacctgcactggagttaagcagatctcccaggcctcgtgttttacgtcaacatgcttttggcacgcccggtgggaccgattagaagtcaacaagcaattttcctcatggccgagaaaccgccaccatcaccgtcctcggctagcccaagttctgttaaagaaaaactgcataaattaggtttgtcagaggttgatgagggaaatatcatgaccatcacactagaaaatttgacacctgatcaaaagaaagattttgaagcgatgatgcagcaagcacgggatcagttcttaaactcattcatgctgacccgcaagggaacacttgttcagaagtacaaaataaacgtagttgctgatgatcccgggaccagttcttctaaggatgaagaaggaaaacaagcttcagatggctcggctcaaccgagtgacaaaggtgctacagatggttctccagcaaatcaaggtgacaactctcaaagagtgcacagggttcaaggtgatggttctcagggagttcaagatcaggttgactatgctgtacaccatgctttgatcaatcaatctggaatattaaccaatactttggcaaacatggtgaagtcaatggttgatggttcaatagccgagtatcaagctacaggaccagtttacctactaggaggagtattccctaattatcggccattaatcaccgataatcaacaagtcgtccagtcaatccctcttaatgcaccatcagctcagccgacggcaccggtatcggctcctgcacctgctccaccaccttcggctccagaccaaataattaatccccggttgttagtgagggaacagccacagcacgctggacagaatgtgaatcggctaacgcaagaccaggttccatctatgttcttaccttaacacaccattgatccaacccagcacagccgattcagcaaacacccccaatccaacagtttgtgcaaccaggtttgcaacacctggtggtcagcctgtgcagcatgctgcaaatcaagttgttccagagcacttggttcatcacgtacaaccagatggcataatgtcatgaaggagcagtttgggcttaggccgaaagatgctggaaatttgtaccgacaaccctatcctgaatggtttgagagggttcctctacccaatcggtttaaggtgcctgacttttcaaaattttcagggcaagatagtacatcgacttatgagcacagtagccgattttttgcctagtgtggtgaagcatcggctgtagatgccttaaaggttaggttgttccggttatctttgtctggatcggccttcacttggttttcttctttgccatatggatcaattaacagttgggtcgatttagaaaagcagtttcacagctatttttatagtggggttcatgagatgaaattgtccgatctgacatcgatcaagcaaagacatgatgagcctatgcatgagtatattcagagattcagagagatgaggaataagtgctacagcttaagcttgactgatgcccagttagccgatttggcttttcagggtatgattgctccaattaaggagaaattctcatctgaggattttgaaagcttgtcccatcttacacagaaggtaaccttgcatgaacaaaggtttgcagaggctaggaagaattccaggaaggttaatcatgtctgtccttatatatatgggtcagacgatgaagatgatgattctgagatagttgcagccgaatgggtaagaagtaaaaaggttataccatgccaatgggtaaagaacacagggaaagaggaaaggtatgactttgatatcactaaggctgacaaaatttttgacttgctactccgagagaagcagattcaacttcctgtcggtcacacaattccatcggctgaagagttgggcaagaaaaggtattgcaagtggcataattctgggtctcatacgactaatgattgcaaggtcttcaggcagcagatccaagcggctattgaaggaggcaaaatcaaatttgatgactctaagaggccgatgaaggttgatggcaatccttttcctgttaatatggtgcatagtgctggccgaatagccgatgtgggtcatgcaagaggttttcaggtaaattcggctaagattatcaacaaatatcaaaggaagtatgacaagtagtaggagaagcattatgaagaagatgatgatggtatgaggctgccatctattgaggactgtcctgggtgcagtgatgttgcggagagctcaagccgatcatatagtaggggcaatcggctaaggcagacaagacttcctgttcatcaaagattgggtccagtgaactaagatcatagccaggaggacaatgaaaacaggaaaactcaatggtgtccttctggtatctttacgaagaatgaaaagagaaggaagacaaagccgaagcaggacaggcgtcttaagaatcaagttcctgtagccgatgaagccacagccgatgaagcaaaaaggttggctaaaggaaaaagtgttgtaactgcttcggtcaacatggtcttcacgttgcctgccgagtttgggatcaagcaagccgatattgacgaagttgaagaagaattggctaagttaattttgtcaccagagcaggcagtttttgagaagtcagaggggacgaagaatcagcatcttaagccattgtatataaatgattatgtcaatgggaagccgatatccaagatgatggtcgatggtggggctacagtaaatttgatgccttacactacattcaggaagttgggtagaaacgctgaagatctcatcaagacaaaatggtgctcaaagactttggcggcaatccatcagaaaccaaaggggttttgaatgtggagctgacagtcggcaacaaaaccatccctacaacgttctttgtcatcaatgggaagggttcttacaacttgttgcttggaagggattggattcatgccaattgttgcattctttcaaccatgcatcaatgcttgattcagtggcaaggcgataagattgaaattgtgccagccgacagccaatttaagatggataaaccaagctattattttgagggcgtcgtggagggttcagatgtctacaacgaggacacagtagatgatctcgatgacaaacaagggcagggttttatgtcggccgatgatttggaagaaattgatattggtctagaatttagaaccaagttgatagagctgttgaaagaattcagagattgcttcgcttgggagtattatgaaatgtctggactcagccgatcgattgttgaacatcggctacctatcaaaccaggaattaggccacaccaacaacctccgaggaggtgcaaagcccatatgcttgaacctgtcaaggctgagattaaacgattatatgatgctggttttagtcgtccttgccgatatgcttagtgggtttctagtatagttcctgttatcaagaagaatgacttgaataaagctaccccaaaggacgaatatccaatgccggtagccgatcagctggttgatgctgcgtcagggcacaagattttgagttttatggatggaaatgcaggatataatcagatttttatggccgaagaagacattcataagacagcttttaggtgtcctggtgcaatcggcttatttgaatgggttgtgatgactttcggcatgaagagtgctggggctacatatcaaagagccatgaattacatataccataatttaatcggctggttggttgaggactacattgatgatgtggttgttaagtctaaagaaatagaggaccacatagccgatttgaggagtttttgagagaactagaaaatatggcctgaagatgaacccgacaaaatgtgcttttggtgtatcggctggccagtttttgggatttcttgttcatgagagggggatcgaggtgactcaaaggagtgttaatgcaatcaagaagattcagcctccagagaacaagacagaactacaagagatgatcggcaagataaattttgttagaaggtttatttctaatttgtctgaaaggttagagccttttacaccattgttgagattgaaggccgatcagcagtttacttggggggggcagagaaacagaagggtttggatgatattaaggaatatcttagatctcctcctgttttgattcctccacagaaaggaataccttttagattatacctatcggccggtgagaagtcaatctgctcagtcttgattcaggagcttgaaggaaaagaaagagttgtattctatctcagtcgttggctcttggatgcagaaactagatattcccctgtggagaagttatgcttgtgcttatatttttcaagtataaggttgaggcattatctactatccaacgagtgtactgtcatattcaaggccaatgttgtcaaatacatgttatcggctccaattttgaaaggaagggttggaaagtgaatattctctttaactgagtttgatcttcggtatgagtcgccgaaagcgattaaaggacaagctatagccgattttattgtggaacatcgtgatgattcaatcggctcggtcgaaattgtgccatggactttattctttgatagatcggtgtgtactcatggttgtggtatcggcttagttataatttcccctagggggcatgtttcgagtttgcttatactattaaaccttatgcaactaataatcaagctgagtatgaggcagtgttcaaagggttgcaattactcaaggaggttgaagccgatgctattgcaatcattagggattctttgctggtaatcagtcaattggcaggagaatatgagtgtaaaaatgatacattaatggtttacaatgagaagtgccaagagttgatgaaggaatttcggctggttactttaaagcatgtatcccgagaataaaatattgaagctaatgatttggcccaaggggcgtcggggtataagccgatgatcaaagatgttaaggttgaaattgcagcaatgacagccgatgattggaggtatgatgtgcatcaatatttacaaaatccatctcaatcggcttctaggaaattaagatataaggcgttgaagtacactttattggatgatgagctttattatcggatgattgatagagtattccttaagtgtttgagtgccaatcaagccaaagttgcaatcggcgaagttcatgaaggaatttgtggtactcatcaatcggctcataagatgaagtggttacttcggcgtgcagggtatttttggccgacaatgctggaagattgtttcaggtattacaaaaggtgtcaagattgtcagaaatttggagcaattcagcgagcatcggcgtcggctatgaatcctatcattaagccatggccattcagaggtttgggaattgatatgatcggcatgataaatccaccatcgagtaaagggcataagtttatattggtggcgacagattatttcaccaaatgggtagaggcgattcctttgaagaatgttgattctggggatgcgatacagtttgttcaagagcatataatctaccgatttggtattcctcaaactattacaaccgatcaaggttcaattttcgtgtctgatgagtttgttcagtttgccgatagcatgggtatcaaattattaaattcttcaccatattatgcataagctaacgggcaggccgaggcatctaacaagagcttgattaaattaattaagcgaaagatttctgattatcctcggcaatggcatactcggttggctgaagcattgtggtcttatcggatggcttgtcatggatcgatccaggttcctgcttataaacttgtttatggacatgaggctgttttgccatgggaagttagaatcggctcaagaagaacggagttgcaaaatagtttaacagccgatgaatattataaccttatggctgatgaga

SEQ ID NO: 101690 - DNA, 204 bp, Oryza sativa
  Clone ID: PAT_MRT4530_99287C.1
cgccctaaaaatttttttggggggcctcttaagccgcgggggctaaacccggcatttcttagcccgtggaaaacttacaggggatccggacgggtggacaaaaaaagaacttcacctttttcaccctagccatgcaatagatgtggccatacaaaataatggactagaaacaggagggcagtgacagaaaggcatgaaagacca

SEQ ID NO: 101691 - DNA, 1353 bp, Oryza sativa
  Clone ID: PAT_MRT4530_99288C.1
atgtcaaataggtcaaagttctggagattagcagcgctagtccctgaagtgcagtgtcctgaccagcccatctctccccgtcaaaaatttaaatacacggccattgtacttttcatctttgtgactgccagccaagttctattgtatgggatccaacaccaacctcgaaccattgagcctgatccattacattggctgcatctgattctggcgtcaagccgtagtactctcttgtcgcacgggatcgtcgctattctagtacctgaggttctggtgaagatctgggtgtacctaaagatcataactctcgataccagtgcacctgaaactggtgttcttatgaatagagcacaaaggttgctggggatattggttgccattctgggagctgttaatttctatgtgcgaagccaacatttcactgtcaatacggttctaataatgcttcagattctttgctctgatatcattgtcatttatcttgatgatgtcctaagaaaaggatatggattgttatctggtatatccttgttcactgccaccaacatctgtgtaaatattctgtggaaggccttcagccccatgtccgtcatgtatcctgaacaaagccctgaatttgagggagctgttattgcctgggttcatcttctgatgactagaacggataaattgtctgcaatgtctaaagccttttaccgtcaaaacctcccgaatattatcaattttctagccacttgcttgtttgttccacttgccatattcttccaaggcttctatattgtactgcctgtcaggacacggcgtaattttcaagcctactgccacatcaagctctcacatttcttgtatgggcctgttgtcttgcaccgtttactgctcccacttccttatgttgcctcaaaggtgctgtacaagaaatacagtggaaacacactagtgaatttgcttggcaagtgggatggattgaaccattttggacagtctatccctgttggagggatagtgtactacctaagaacgccccctatcttggctgatttgcacagggacccgttccatgcatttatatatgtcgcattcgtgcttatttcatgtgtgtttatctcaatgggtcttatgatgcaggaggaacgaagactgaggcttgcccagcccgactcaatacatgcgaacgaaattcggcgtcatgtcatgagggcagcttgtgttggtggtttctgtgccggtgtactaataattttcgcagatctcattggggtgttttgttctgggactggaattatgcttgctgtgactgcttcatatccttatgttgatggcagagctagtgaggtcgggtcctttggcttctga

SEQ ID NO: 101692 - DNA, 314 bp, Oryza sativa
  Clone ID: PAT_MRT4530_99289C.1
ggaacggagggagcacacatagcgcacacatatcggtacactcggatggcgcaataagcaccattagctactactgtacctgacgaccgtccagccggataaaaccatgctacagaaggggcgagggagctctaaggagcaggacataatcacatatgcatgcggccagctattttacacatcatgcacggcgctgcactgaactgcactccagtgttatgatgtaaaaaacccgaggacagaggaggactgctgctctactgcgcagcaaaggcatgcacgaggaggcagctcgccagtgccagttctgggct

SEQ ID NO: 101693 - DNA, 1310 bp, Oryza sativa
  Clone ID: PAT_MRT4530_9928C.1
ataagtggtgtgggactaatcacgaaagacattgttcgacccgcccataaccgcgggcatggctattcgaatagttttactctggccagaggtgtaccactgtacccacaagacacaacccaccgtcatgtcaccgtgtccgcgcagacacgtcaccatggcgagtgattgtgacaagacccctcgcataactcaactcaaagcagtgcaccgttcctggatcataatcacccccttataaaacaaggcatggactccccagcgacccccgtgggcttatctccgccacttctcagtctggaaaaggaggattattgcgtcagcgggctagggtttcggtggactgggcgcacgggcgacggttcacgcgaacggacggccgagatcgatccatccaaaacggacggccgagatcgatcggtctacgaccggctcacggaagagggcgacgatgacgtcagcgatgacgtcaccaccggcggcgacggctcggcggctcgggcttgcatgcttgccggtgaacgacggcacggcggcgcgaacggaaggcaccaacgggtagagcgcgacgcgacgaactcaccggtgaccaaaagagcggcggaagatcaacggacggcgacggcgacgaggaggaagcggcggcaaacttcgggtcgacggcggcgacggtactccggcggtcttcggcggcggcgaaggagcggacgagaacggcggtgacttggcgatcacgacggtggccttcccgagcgatgacgacgaccgagacggcggcggcgcacggctggagcgacggcggcgacggcggcgctaggttgcacggcgctagagctcttccggcgacgagaggcaaaggcgagagtggcggcgggtagagaagagctcgggggtccttttaaaggggctaggaggcgacggcgaaggcccacggcggctggcgacgagaaggaaagtttagggttcggaggagagagacgaatccgattcgaactcgaatccaacgatttccaaaaagaattagccgatgattccaaaagagaaaaggtagaggagatcccggatattgtttcccctctatcaattcggccggagaaggaaaggatcgaccgaatttggaaaggaacggcggcggcgcgaaactagggtttcgggcggcggcggccggaggtagacgacgaccctgacaggtgggccccacctgtcagcgggcggacgcgcgcgcgcggcggcggactgggccgacttgggccgaggagagagagagcggttttgggccgactttcggcccaaagccaaaagaagacttt

SEQ ID NO: 101694 - DNA, 639 bp, Oryza sativa
  Clone ID: PAT_MRT4530_99290C.1
gggggcttcgaagccaacctagcctctggacacctttcttcacacccacacccttcgccacagtaccaataaggtacggcatcaaaggctgggggcgaaaattagttaagtccaagctggggggggggccttcgaagccaacctagcctctggacacctttcgccacacccacacccttcatcacagtaccaataagacacctttcgccacacccacacccttcgccatagtaccaataaggtacggcgtcaagggatgggggtgaaaattagttaagtccaagctagggggcttcgaagccaacctagcctctggacacctttcgccacacccacacccttcgccacagtaccaataaggtacagcaaggtacggcatcaagggctgggggcgaaaatgagttaagtccagaggtgaaaatgggggccgcgaagccaacctaacctctggacacctttcgccacacccacacccttcgccacagtaccaataagaatgctacgagtcaaaaacggaagtcaaaagctgaaaagtcaacaaatcttttcgtcaatccccaaatgggggccgaacgcatgagtctcggcgaaatccccgctaaagcaatagggaaaaggggaaggaaaaaatacaagtca

SEQ ID NO: 101695 - DNA, 567 bp, Oryza sativa
  Clone ID: PAT_MRT4530_99291C.1
gcacgaggctcaccacccccgagagagaaggccgcgcgccgcgcgctgctagtagtgctcgatggcgatggtccccgccgacgccgacgccgccgccaagccgccgccggacgtggagaagccggactacagctcccagaacggcgcccccaactcggccgccgccgccgccgggggaggcggcggcggcgtggtggattcggtggtggcgcggtggcggcgggaggacatgctcgacaagagccccctcgcgctgcacgcggccgccgcggcgttcgccttcgtcgcgctcgtgctcgtcgcctccaaccagcacggggactggatggagttcgaccggtaccaggagtacaggtatctgctcgcgattgcggcactggcgttcgcctactcgctcgcgcaggcgctgcggcatgctctccggatgcgccgcggcgtcgaccccgtcccgacggcgtccgggcggctcctcgatttcgccagtgatcaggtagtcgcatacttgctgatgtctggtctctctgctgctacaccattacaaatcggatgagatctgcagtaatcaac

SEQ ID NO: 101696 - DNA, 127 bp, Oryza sativa
  unsure (1)..(127): unsure at all n locations
  Clone ID: PAT_MRT4530_99292C.1
gtgactcgagggcaactgtgagccaagtgtgtgcgtgcacaagttgacaanggttggagatgcagatgggacaaaaagttgaaaactgatgactggcaattgaattgaatgtttgacctgtggagaa

SEQ ID NO: 101697 - DNA, 746 bp, Oryza sativa
  Clone ID: PAT_MRT4530_99293C.1
attccaattgcttcaaacattcaattttagcgtggaactaaacacagcctaagttgaatattgatgtgaccatggctactacggatacaaccattgctcatgtcatggatgaacaagaatatatcaagaaagtcctccaaatgctggaatctgattcggccacctgttacactgctaacttcaaacagtcgccgaatcagcatacgacttccgtttttagcccatgagtatttgatggaaagctctcggagccctctttccaacggatccagcttcatcaccaaattccatgtcgtttggccacaatcacataaacaagcgcgcgtgtcggctagaccgtctgtctgcttgttcttcggaaccccaacttatcagttgtattcaactcttatttgcaatatcagattgcttttatcttgttcttacttgtttctccgatttgcttgcaggaatagggttgatttgcaccggcaagatcaataacccacggagaggtgtatcgatcgctaaggcacaacacaacaacgtctcgtacggttgtagtcgggtcgtcaacgtttctcccaaatcgtagttaccttcaactcaccgaaagattgggccaacaacaaccttgagtgtcaagtggaactcagggttcatcaaatggtatacacaattcaggtgctatactgctatcagcctatcactccaggtattgtagaacatctgcatcaagttcatcatcactctccccatcatactct

SEQ ID NO: 101698 - DNA, 177 bp, Oryza sativa
  Clone ID: PAT_MRT4530_99294C.1
atgagcacggcgatcagcgcttctcggggcgtcctcctcgacctcgacggcgatgacaacatcaactgtgaagggcttcgggtagtggcggggatcggggctagggtttcacagatttttgggattttgtttgttagccaaaattcaagtgcaagcagtggtggggatcaaggctag

SEQ ID NO: 101699 - DNA, 386 bp, Oryza sativa
  Clone ID: PAT_MRT4530_99295C.1
cgatgggtactagagcgcgcctgtttcgcttctactggcgccagtagtatagcagcacagtagcaggggagaggagaggaggagaggagggagcgccgccgcccgaccacgaccagatccacggctcctcctccggcacctgggaccgcgtgcgtgcgggcgggcgggcgggcggcaagaaacagggatcttgaggtgactcccctttcccgttcccagatcttagtgtccctagatatggaaggaagagaggcaggcttatggtaagccctggtgaatatttgtggcaggtcagtaagtggtggcctgattaagactgcctcccacacatttgtggttatctttcttcactagtgagggcattgtcgaccctgcacttccccctg

SEQ ID NO: 101700 - DNA, 270 bp, Oryza sativa
  Clone ID: PAT_MRT4530_99296C.1
atggctacagacagcttttcgaagactggcgaaattcagtgtaaagatcacaaatcggagcggagcgactctgctcccaaccccaaccccaaccccaaccccaagttagcagttaccacaggtgcaacacctacgccaaaatcgagcgaaccggcggggatgagccggaaggaggtggcggcggcggctggagggggcgcgggtgcggaatcgggagcggagggatcttcctcggcgggagacggcggcggcggctataccgggaggtga

SEQ ID NO: 101701 - DNA, 522 bp, Oryza sativa
  Clone ID: PAT_MRT4530_99297C.1
atgcagatgcagggatggatgaggacaagtgcgtacgtcgtccccagcgcagcggccggcccagctgatcgatcgatcggtgcgcggccactgtgtggctcaccgctcatcgatcacacgcacgcggccgtccccttcggtgttttcctcgtgcggttgcttcttttcttcggtagtagtacacgcgcttgcgtggttggcggtttgcccgtgggcgcggcatgggcatgggcatggcggtgtggctgcgtcaccgaatcggcgtgctctccatcacgccgctcgcgtcgcgctcgcgccgggggttgtgagcggcgcggcgtgacgacggatggaccgcggatggatgggtgtcatggactcatggtcatgttggtgggatatttgggatccgcgtcggctgcgcctccgcgcgtcggcgcgtgcggtgtgagccgcgtgatcgggatcggatggcccgttggtgcgttccgcgctggtggatcgagtctattctccccgtctccaaataaatcaatctaa

SEQ ID NO: 101702 - DNA, 487 bp, Oryza sativa
  Clone ID: PAT_MRT4530_99298C.1
tttgacccaagagtagttccgtttatgttgaagcgtttcccaggatgtcttgaggaagcccaaggtgtcaatattaggaagtgcagccaccttgccgttgctactcatattaacccatggaaaggtgttattgtaaaagacccagctctcccagaagcgatcagaaggatctgttggaaatctgaccatgacagtgatgattatgaccaaacgaagaaaaaagaagtgcccatgtaaatagcatgcttcagcattgttatctccgttgtttttgttaggctttgaggcttatgattgtacagtacccatttattcagctataacgagatgtacggatagtacgggggttgtagaaaccggcagttagtttccatctaagaatctagtcttcttgtgttcttgtagttgatcatatttgtaaaagtttagtttctcgagactattatataaaaatcatatcactaaatttttaaaaaaaaaaaaaaaa

SEQ ID NO: 101703 - DNA, 978 bp, Oryza sativa
  Clone ID: PAT_MRT4530_99299C.1
atggcggcgcctgacatgtctcccaaggccggcaagccgctcgtccagaatgacgccggctcatacctcgcgtggtccggcaaggaccagccgaccctcgccggcgagaagctcggctgcggcctgctcgtcctcaagcccctcggcttcgcgctgccacactacgccgactccggcaagttcggctatgttcttggcggcagcgcggtggtcggggttcttccggtgggggtggacgccagggagagggtggtgcggctcgaggccgccgacgtgatcgccatgcgcgccggggaggtcacgtggtgccccggcgacttctcgtacttcatcctcgccggcccgatgagcgtcctgggaggcctcgatgccggcctcctcgccacggcgtcggggctgacgtcgccggagcaggcggccaccgccttccgcagccagcccgccgcgctgctcaccaggctgagccgcaagctgcacggcgtccgcccacgcgagcacgacaggcacgggatcgtcgtgaacgcggcgcgcgtgccaccggacagcaccggcggaaagacggtcaccgcggcgcacctgccggcgctggcgcagctcgggttaagcgtcgggctcgcgcttcttgacgcgggcgccgcggtgcgcgggccctgggtgctccgcgacgccgcggcgcaggcggtgtacgtcgccagggggaccgggcgcgtgcaggtagccagcgccggcggcgcgtcgacgctgctcgatgcggaggtcgcggcgggcagcctgctcgtcgtgccacggtacgcggttgcgctcgtggccgcggacgacgccggccgcatggagctggtgtcgctgatcaaaagctctagaccggcgatggagcacttcaccgggaaggggtcggtgatcggcggcctgacgccggagatagtgcaggcggcgctcaacgtgtcgccagagttggtggagcagctcaggaccaagtga

SEQ ID NO: 101704 - DNA, 321 bp, Oryza sativa
  Clone ID: PAT_MRT4530_9929C.1
atggaaaactcaggcatcccaggggccgggtgccccgcccggaaacccccgggcaccggcaaagcggacgcagagacgccgcgaaaaaatgaggaatgggggccataccaacgggtgcgcgggggtaaaagaatacgcgccgggggtaaattaccgcaatcgccggccgccaaaagagcctccaagagacatgttgtcggatcgggtgcaaaagaagacacgacctgcccgggggcaaccgaaagttctcgagaccaaccagggccggccgcaaaaaacgcgtcgccgaacctgtcccgaagcaatcgtctgggtatgtag

SEQ ID NO: 101705 - DNA, 634 bp, Oryza sativa
  Clone ID: PAT_MRT4530_992C.1
tagtggatcccccgggctgcaggaaaaggtaaatgatagatttaaggagtaactttgattattaggtttttagtacaactgaattggtttggtggtcgtgatccatttatcctttgacatagtactgcttggatatcagcaggcctctccaccgcaacaagttacaactttaaatatatatcgagtcctgcagagatctactaattttgtgcatttcacgctttgctttgtttgcttgtcttgaaagggtgaaacatatttattgataatctttagtgtagtgtatggattgaagcaaacatatttattgataatctttagtgtagtgtatggattgaagcatttgctgtgtgaatggatgcatcttcgctgtttattgtagtataaatgtagtgaggaggagagtcacagctattttttgagtcagtgcataggccttgttgttcatgtctgttttgcataattgaaatgaaattagttgaaattatgcatattgctgtcacaccatatgaaacgagcatcttctgacttaaccttggtatactgtgaaataaccttggtacaatatatctgtgaaataaccttagtacaatatataatagcgtagttgcagcattttatgtaatcctcttca

SEQ ID NO: 101706 - DNA, 872 bp, Oryza sativa
  Clone ID: PAT_MRT4530_99300C.1
cgctcacctctcctcctcctcgcgatttccacccgcgccgccgtctgcgccgatctgtgcattcccgcgaccaccgccgcccgccgcccgccgcatctggccaccacctatgccccccgtcaggtccgcccccgggaggcgggcgccggaattccggcgctcgtcgcggcggcggctgccggagtggatctggtggctcgtcgggatcttcctcgtcctcggcctcatgctcttcgtcctgcaccacaaccagagggagcatttccgcccgcccgtagtcgataagggttcagaatttgaggaaacccatcatgagaaagtaaatttcacagaagagcttttaagcagtacatcatttgcacgccaattgacagatcaaatgactctagcaaaggcttatgttgtccttgcaaaagagcatggcaaccttcagcttgcatgggagcttagttcacagataaggaattgtcaaagattgctatctgaagaagctgttagtgggaaggccatcactaaagaagaagcccatccaataataactcggcttgcacggttaatatacaaagcacaggactctcattatgatatcagcacaacaattgtaacactgaagagccttgtcaatgcacttgaggagcgtgcaaaggcagcagtttgttcagactgccgagtttggtcagttagctgcagagtccgtccccaagaatttgcactgtttaactgttaaactgacggtagagtggcttcagaacccaaaacataggggtcgctcagaagaacatcggaactccacacgattggtagacaataatctgtaccattttgccatattctctgataatgttcttgccacatcagttgttgtcaattct

SEQ ID NO: 101707 - DNA, 909 bp, Oryza sativa
  Clone ID: PAT_MRT4530_99301C.1
atggcggcgcctgacatgtctcccaaggccggcaagccgctcgtccagaatgacgccggctcatacctcgcgtggtccggcaaggaccagccgaccctcgccggcgagaagctcggctgcggcctgctcgtcctcaagcccctcggcttcgcgctgccacactacgccgactccggcaagttcggctatgttcttggcggcagcgcggtggtcggggttcttccggtgggggtggacgccagggagagggtggtgcggctcgaggccgccgacgtgatcgccatgcgcgccggggaggtcacgtggtggtacaacgacgcggacggtggtggtggcgaggatgtaacccatcctgttcctgggcgacaccgccggcgccgtcagccccggctgagccgcaagctgcacggcgtccgcccacgcgagcacgacaggcacgggatcgtcgtgaacgcggcgcgcgtgccaccggacagcaccggcggaaagacggtcaccgcggcgcacctgccggcgctggcgcagctcgggttaagcgtcgggctcgcgcttcttgacgcgggcgccgcggtgcgcgggccctgggtgctccgcgacgccgcggcgcaggcggtgtacgtcgccagggggagcgggcgcgtgcaggtagccagcgccggcggcgcgtcgacgctgctcgatgcggaggtcgcggcgggcagcctgctcgtcgtgccacggtacgcggttgcgctcgtggccgcggacgacgccggcggcatggagctggtgtcgctgatcaaaagctctagaccggcgatggagcacttcaccgggaaggggtcggtgatcggcggcctgacgccggagatagtgcaggcggcgctcaacgtgtcgccagagttggtggagcagctcaggaccaagtga

SEQ ID NO: 101708 - DNA, 1275 bp, Oryza sativa
  Clone ID: PAT_MRT4530_99302C.1
tgtatgatttggcagtcatctgtaatttgcagacagaaatggagctttccatcgatcaaaatttaatctgacggtgcgtttggtttccttgcacacggcacccatttgcctataaattgcgtgctcccctcctcgtgttgctcataacgcagatcagccaagaacgagttcatcttcttcttcgtgttgttgtagcatttgattcgagatatggcggcgactgacatgtctcccaaggccggcaagccgctcgtcgagaatgacgctggctcatacctggcgtggtccggcaaggaccagccggccgtcgccggcgagaagctcgggtgcggcctactcgtcctgaagcccctcggcttcgcgctgccgcactacgccgactccggcaagttcggctacgttcttggcggcagcgcggtggtcggggttcttccggcaggggtggacgccagggagagggtggtgcggctcgaggccggcgacgtgatcgccatgcgcgccggggaggtcacgtggtggtacaacgacacggacggtgaggatgtcaccatcgtgttcatgggcgacaccggccggcgccgtcagcccaggcgacatctcgtacttcgtcctcgccggcccgatgggcgtcctgggaggcctccacgccggcctcctcgccaaggcgtcggggctcacgtcgccggagcaggcggccaccgccttccgcagccagcccgccgcgctgctcaccaggctaaacggcaagctgcacggcgtccgcccacgcgagcacgacaggcacgggctcgtcgtgaacgcggcgcgcgtgccggcggacagcaacaccggcggcgccgccgccgggagaagacggtcaccgcggcgcacctgccagtgctggcgcagctcgggttcagcgtcgggctcacgcgtctcgacgcgggcgctgcggttcgcgggccctgggtgctccgcgacgccgcggcgcaggcggtgtacgtcgccagggggagcgggcgcgtccaggtcgccggcgccggcggcgcgtcgacgctgctcgacgcggaggtcgcggcggggagcctgctcgtcgtgccccggtacggcgtgtcgctcgcggccgcggacgacgccggcggcatggagctggtgtcgctgatcaaaagccccaggccggcgacggagcacttcaccgggaagggatcggtgatcggcggcctgacggcggagatcgtgcaggcggcgctcaacgtgtcgccggaatttgtggaacagctcaggaccaagtactga

SEQ ID NO: 101709 - DNA, 330 bp, Oryza sativa
  Clone ID: PAT_MRT4530_99303C.1
acgacgattgtgacggttggaatggtcggtaataccctccaactgtcattggggcttcatctcaaccgtccagccaaaacctggatccaacggaggagagggaggttcggccgaaccagggcccgccccaactagcccacctttcggctggcggcctcctctatttctcctttatgcaactagcccacctttcggctggcggcctcctctatttctcctttatgtagatttgtgaattttggcccagtttgacgtgtcaattctgagttcttggcccattcatgcataagtttgattgtcgacatcgtccgatggacttatcttctatgt

SEQ ID NO: 101710 - DNA, 627 bp, Oryza sativa
  Clone ID: PAT_MRT4530_99304C.1
ctaggaaatcaaggcgacaattctcaaggagtccatggagtacaaggtgacggggtgcatggagttcaaggtgatggtgctcaggggctgctctatcagtgatggcgccaggccagccggcgaaccctcggttgttaatgagagagcatccatagcatagtgggcaggttgcgaatcggctaacccaagatcaggttgctgccatgtttctgccacctcaaccaccaaggcaacagcctctgcagccgattcagcgaacgccattaagacagcaaatcgttcagccgatccagcaccagggttcagtaagcacatcggccgggtttgcaacgcctggtggtcagcctgtacaacaatttttaaatcaagttgtcccagaacacttggttcaccacgtacagccagatggcacagtaatgcctcaagttgttcctgagcacttggtacgtaatatccagccgaaccttcataattaccaagggggtaacttgaattatcaatatcagcctccttccccgcaagcccaatatcacccagggggattggctcaacctcagtttgcatctcaatacggtcagttcggacccatgcaacaacagtcacaaggggcagctcagcaacgaccat

SEQ ID NO: 101711 - DNA, 5106 bp, Oryza sativa
  Clone ID: PAT_MRT4530_99305C.1
atggccgagaagccaccgctgtctccatcctcggctagcccaagcactgttaaagaaaagatccagaagttggggttgactgacgtcaatgaaggaaacgtcgtgcccatcgatctagagaaattcacacctgagcagaagaaggattttgaagcaatgctgcagcaagcccttgatcaattcttgaactcattcatgcagacccgcaagggaacattggttcagaagtataaagtaaaggtagttgtcgatgatcctgggaccagttcttccaaagtagaagacgggagacaagctccagatggctcggctcaactgagtgacaaaggtgctaccgacggttctctaggaagtaagggtgacaaatctcaaggggtccatggagttcaaggcgatggggtccatggagttcaaggcgatggagtgcatggagttcaaggtgatggtactcaggggttgcaaaggggaaatcttaatcagaatagtgatgcggcacaagattttttcaataatttccaagaccgggtcgactatgctgtgcaccatgctttgatcaatcagtctggggtgttagtcaataccttatcaaacatgatgaagtcaatagccgatggatcagtagctgagcatcaggctgcaggcccagtttatttgcaaggaggtgtctttccgaattatcggcctttgatcactgatgcccagccatctattcgggcagtttcccccgtcgcaccatcagctcagccgacggcgccagcatcgactcccttacctgctccgtcagcattggcaccaggccagctggtgaaccctcagttgttaatgagagagcagccacagcatagtgggcaggttgtgaatcggccgacgcaagatcaggttgctgccatgtttctgccgcctcaacctgctgttgatccactacagcagcagccgattcaacagacactcccgattcagcaggttgtacaaccaatccagcaacaagttgtgcaaccagtccagcaaacgccaccaaggcaacagcctccgcggccgattcagcaaacactgtcaagacagcaaatcgttcagccgattcagcatcaaggctcaatgagtgcatcggccggcctccttctccgcaagcccaatatcagccagggggactggctcaacctcagtttgcgtctcagtacgccttatcctgagtggtttgagagagttcctctccccaatcggttcaaagttccggacttctccaaattttcgggacaagatggtgtgtcaacttatgagcacattagccgatttttagctcagtgtggtgaagcatcggctgtggacgctctgagggttaggttgttccggttatctttgtctagattggcttttacttggttttcttctttgccgtatgggtcgatcaatagttgggccgatttggagaagcaattccacagctatttctacagtggggttcatgagatgaagttatctgacttgactgtgattaagcagtggcatgatgaacctgtgcacgagtatattcagagattcagggagatgaggaacaagtgcttcagcttgagtttaactgatgctcagttagccgatctggcctttcagggtatgattgctccgattagggagaaattctcgtctgaagactttgatagcttatcacatatgatacaaaaggtaaccttgcacaagcataggtctgcggagactaggaaaagctctaagaaggttaatcattttgtccttacatgtgtggctggcaagatttttgatcttctactccgagagaagcaaattcaactccctgctggtcatacgattccatcggctgaggaattaggcaaaaagagatattgcaaatggcataattctgggtcccattctactaacgattgcaaggtgtttagacaacagattcaggtggccattgagggaggcaagattaagtttgatgattccaaaaagccgatgagggtcgatggtaacccatttcccgttaacatggtacacacagctggccaaacagctgatatggggcgcatgaggggttatcaagtaagttcggctagaattataaacaaatatcaaaggaaatatgacaagcaacaggaaaggcatcatgaagaagataatggtggctttgatcctcattggggctgtgagttcttcaggttcttttggaatgaaggtatgaggttaccatctatcgaggattgtcctggatgcagtgatgttgcaaggggttcaagccgattgtacgatggaggcaattggccaaaacagacaagagtgcttgttcatcagatattgggtccagtaaaccaacgtggtgattcggaatatgacgaaaataagaagactcaatggtgtcctcctggtatttttacgaagaatcaaaaaagaagggttcaaagattgaggagtagggaacgcttccaggaggtcgagcaagaaattaatcattggctgaagaaagcaaaaccgaggcaggagtggcgtgttaagaatcaggctcctgtagtcgacgatgttgtagctgatgaggcaaagaggttggcaaaaggaaagagtgttgtgacggcaccagttaacatggtttttaccttgccagccgaattcaggatcgatcaagccgatgtcgacgaggtggaagaggaatcggctaagttggttctatcaccagaacaggcggtgttcgagaagcctgatgggacagagaatcggcatcttaaaccattgtatataaatggctatgtcaatgggaagccgatgtctaaaatgatgattgatggtggggccacggtgaatttgatgccttatgctacgttcagaaagttgggtagaaatgccaaggatctcatcaagacaaatatggtgctcaaggactttggtggcaatccatcggaaaccaaaggtgttctaaatgtggagctgacagtcgacagtaagactattcctaccacgttttttgtcatcgatgggaagggttcttacagcttgttgcttggaaggaattggattcacgccaattgttgtattccttcaactatgcatcaatgcttgattcagtggcaaggcgacaaaatagagattgtaccagccgacagccagttgaagatggagaacccaagctattattttgagggcgtcgtggagggttcaagtgtctacaccacggatacagtagatgatctcgatgacaagcaagaacatcggctacctatcaagccaggggttaggccgcaccagcagcctccgaggagatgcaaagccgatatgcttgaacctgtcaaagctgagattaagcgtttatatgatgctggttttattcgtccttgccgatatgctgagtgggtttctagcatagttcctgtcatcaagaagaacggcaaggtgagggtgtgcattgattttagagatatgaataaagctacaccgaaagatgaatatccaatgccagtagccgatcagctggttgatgttgcgtcagggaacaaaattttgagttttatagatggaaacgcagggtataatcaaatttttatggctgaagaagatatccataagacaacttttagatgtcctggtgcaatcggcttatttgaatgggttgttatgactttcggcttgaagagtgttggagctacatatcaacgtgccatgaattatatttatcatgatctaatctgctggctggttgaggtctatattgatgatgtggttgttaaatctaaggaagtaaaagaccacatagccgatttaagaaaagttttcgagaggaccaggaaatatggcttgaagctgaatccgacaaagtgtgcttttggtgtatcggctggccagttcttgggatttcttgtccatgagaggggaattgagataactcaaagaagtataaatgcgatcaaaaagattaagcccccggaaaacaagaccgaattgcaggagatgatcggcaagattaattttgttcgatggtttatttctaatttgtccggaaaattagaaccttttacaccattgttgagattgaaggccgatcagcagtttacttggggggcagagcagcaaaaggctttggataatattaaaggatacctgagttcccctcctgttttgattcctctacagaaaggataccttttagattgtatctgtcggccggccgatgttgttagatacatgttatcggctccaatattgaaaggaagggttggaaagtggatattttccttaactgagtttgatcttcggtatgagtctccgaaggcgattaagggacaagctgtagccgattttattgtggaacatcgtgatgattcaatcggcttggttgaaatggtgccatggactttattctttgatggatcggtgtgtactcatggttgtggtatcggcctagttataatttcccctaggggggcttgtttcgagtttgcttatactattaaaccttatgcgactaataatcaagctgagtatgaagcagtgcttaaagggttgcaattgctcaaggaagttgaagccgatgctattgaaatcatgggggattctttgctggtaatcagtcagttggcaggggagtacgaatgcaagaatgatacgttaatagtttataatgagaagtgccaagaactgatgaaggaatttcagctggttactttaaagcatgtatctcgagaacaaaatattaaagctaatgatttggcccaaggggcattggggtataagccgatgatcaaagatgttaaggttgaaattgcagcaataacagccgatgattggaggaaattaagatataaggcgttgaagtacactcttttggatgatgagctttattatcggacgattgatggagtgttacttaagtgcttgagtgccgatcaggctaaagttgcaatcgatgaagttcatgaaggaatttgtggcactcaccaatcggcccataagatgaagtggctactccggcgtgtagggtatttttggctgacaatgctggaggattgcttcaggacaagccagggtacacaaacgacaattgttgacatacagacccacgtcttacaaaaatataaaagattacaaatgcagcgggaaagataa

SEQ ID NO: 101712 - DNA, 231 bp, Oryza sativa
  Clone ID: PAT_MRT4530_99306C.1
atgacgggtgctagcaagacttcatcatggaccactggtgacctcctcttctccctagtgactagggcagcggatctagcagcatggaggttgggggtcaccggatccagctgcctggagttctggatgtgtcgaccgagctgtgcatctaaaggatttagcttgatgctagaattggctcgattcatcaagtcaagcacgactctctttttttggctcacagaagtctaa

SEQ ID NO: 101713 - DNA, 2109 bp, Oryza sativa
  Clone ID: PAT_MRT4530_99307C.1
atgccggtagccgatcagctggttgatgctgcgtcagggcacaagattttgagttttatggatgaaaacacaggatataatcagatttttatggcccaagaagacattcataagacagcttttagatgtcctggtgcaattggcttatttgaatgggttgtgatgactttcggcttgaagagtgctggagctacatatcaaagagtcatgaattatatataccatgatctaatcggctggttggttgaggtctacattgatgatgtggttgttaaatctaaggaaatagaggaccacatagctgatttaaggaaagtttttgagagaaccagaaaatatggcctgaagatgaacccgacaaaatgtgcttttggtgtatcggctggtcagtttttgggatttcttgttcatgagagggggatcgaggtgactcaaaggagtgttaatgcgatcaagaagattcaacctccagagaacaagacagaactacaagagatgatcggcaagataaattttgttagagggtttatttctaatttgtctagaaggttagagccttttacaccactgttgagattgaaagccaatcagcagtttacttggggggcagagcaacaaaaggctttggataatattaaggaatatcttagctctcctcctgttttaactcctccacataagggaataccttttagattatatctatcagctggtgagaagtcaatcggctcagttttgattcaggagcttgaaggaaaagaaagagttatattctatctcagtcgtcagctcttggatgcagaaactagatattctgctgtggagaagttatgcttgtgcttatatttttcatgtacaaggttgaggcattatctgctatccaatgagtgcactgtcatatgtaaggccgatgttgtcaaatacatgttatcggctccaattttcaaaggaagggttggaaagtggatattctctttaactgagtttgatctgtggaatgagtcaccgaaagagattaaaggacaagctatagccgattttattgtggaacatcatgatgattcaattagctcggttgagattgtgccatggactttattctttgatggatcagtgtgtactcatggttgtggtatcggcttagttataatttcccctaggggggcatgtttcgagtttgcttatactattaaaccttatgcaactaataatcaagctgagtataaggcagtgctcaaagggttgcaattactcaacgaaattgaagccgatgctattgaaatcatgggggattctttgctgaatatcgaagctaatgatttggcccaaggggcatcggggtataagccgatgatcaaagatgttaaggttgaagtcgcagcaataacagccgatgattggagatattacaaaggatgtcaagattgtcagaaatttggagcaattcagcgagcaccagcgtcggctatgaatcctatcattaagccatggccattcagaggttggggaattgatatgatcggcatgattaatccaccatcgagtaaaggacataagtttatattggtggcgaccgattatttcaccaaatgggtagaggcgattcctttgaagaaggttgattctggggatgcgatacagtttgttcaagagcatataatctaccgatttggtattcctcaaactattacaaccgatcaaggttcgatctttgtgtccactgagtttgttcagtttgccgatagcatgggtatcaagttattgaattcttcgccgtattatgcacaagctaacgggcaagccgagacatctaacaaaagcttgattaagttgattaaaaggaagatttatgattatcctcggcaatggcatactcggctggccgaagcattatggtcttatcggatggcttgtcatggatcgatccaggtccctccttataaacttgtttatgggcatgagactgttttgccatgggaagttcgaatcggctccaggagaacggaattacaaaatgatttaacagccgatgagtattataaccttatggccgatgagagggaagatctagttcagtcacgttttgtgagcccttgcaaaggttactaa

SEQ ID NO: 101714 - DNA, 1569 bp, Oryza sativa
  Clone ID: PAT_MRT4530_99308C.1
atgaaggctttggtgtctagctcgtgcctgccgtcaagcgcctgtggtcgtcgccctagtcctccgctgtttttcgtttgtcttcttgtgtgctgggccttcgccgcccaggagattagtgaagccgaagttgatgatggcggctctatcgataatcggctttcttcgctaatcagagatagtaatattgaggtgccaaatgagtcagcaaagaattttttcaaattaatggaagaagatcggaaagaattatacccagggtgcaaggaggctaccatggtatctttcattgtcaggctatttcagattaagtgcatgtatggtatcagtaacaatgccatggagcaaatacttcacttattctgtcttttgctccctgagggacattgtgtcccaaatactttggataaagttcgtaaggtagtccaagatctcgggttggactaccaaaagattcatgcttgtgtcaatgattgtgtgttatttcgtggagagtatgataatatgaacagatgtccaacatgtggggagagtaggtggaaaaatatatattctggagaactcggggaaggcagtggcattggaggagtaaagaaaaaagtccttcgtcctcgtaaaatacttaggtgtagaaagaacaaggttagcttcaataacaaggttgaaatgagggggactccagtggcactcagtggtgacgaagtattgaagcagtacgagagttttgagcaagtcaaatttggcatgatgtcaaggaagaggaagcaacgagatgaagatactagatggcacaactggaggaagaagaatgtgatgcgtattgagaataacatatgtgagagcttgctaggtactttgcttgatttaacaggtaaatctaaggacagtgagaaggctcgacttgatttgcaagaattgggtattaggaagaatcaacatctattggtccataaaggaaaatacactttgtcggcagccttgtacacgttaagtccaagtcagaaggaaattctatgcagatttctacaacatgtcaagatgccagatggttatgcctcaaatatcaagagatgtgttgatgaaaatggttggaaggttagtggacttaaaagtcatgactaccttgttttattacaaaaacttttaccattggtggtatgccatattttgcctgaagatgttgtgatcccattgatcgagctcagcaggttttttaacaaactatgttcaaaggagcttgaggtgactgaaattgaaaaactttgcaattcgattggagagaccctttgtcggcttgagatgatattccctccatcattttttgatattatgatgcacttactagttcatattgcttcggaggctagaattagaggccctgtttgttatagatggatgtatcccgttgagaggtacctacgtacccttaaaggctatgtgaggaacaaagcgtgcccagaaggttcaatagcagaggtatatatctcggaggagtgccttactttctgtgctcggttctttgaagatgttagtacaaaggtgaataggccagaacgtcaagaaatgtaa

SEQ ID NO: 101715 - DNA, 6025 bp, Oryza sativa
  Clone ID: PAT_MRT4530_99309C.1
ttgtaggatcaaatcaactggcacgcttgcatacccgaaggcgagttttggacctgcactggagttaagcagatatcccaggcctcgtgttttatgtcaacacgcttttggtacgcctggtgggacagatcagaagtcagaatcacaacaacagtttttcccatggccgagaaaccgccagcatcgccgtcctcggctggtgaacctggctatgttaaagccaagatccacaagctgggtctatctgaggttgatgaagccaacattgtgcccgtcactatggataaattgacacccgagcagcaaaaggatcttgaggcaatgatgtagcaagcacggaatcagttcttgagctcattcacggagacccgcaagggaacacttgttcaaaagtacaaagtaaaagtaattggtgatgttcctgggacaggttcttctaaggatggagaagtgaaacaagctctagatgacgcggctcaaccgagtaataaaggtgctgcagatggctttcaaggagatcaaggtgatggctctcaaggagttcagggtgttggctctcaaggaattcaaggtgtccaggatcaggttgactatgctatgcaccatgctttgatcaatcaatctggaatattagtcaacactttgtcaaacatggtgaagataatggttgatggttcaatggctgaatatcaggctacatgaccggtttatctaccaggaggggtattcctgaattatcggccattagtcactgataatcagccagctgttcaatcaattcctcttaatgcaccatcggctcagccgacggcaccagtatcggctcctgcacctgctgcaccgtcatcagcaccaggtcaattagtgaatcctcgattgttggtgagagagaaaccacagcatagtggatagaatgtgaatcggctaacgcaggatcatgttgcagctatgttcttatctcctcaacctactgttgatccaacccagcagcagccgattcagcaaatacccaaggcttgatgaatgcatcggctgggtttgcaacacctgacaatcagccaaggcagcatgctgcgaatcaagttgtttcagagcacttggttcatcatgtacagccagatcagacgatgtgatgaaagagtagtttgggctcaggccgaaagacgctagaaatttgtatcggtatccttaccctgaatggtttgagagggttcctcttcctaaccgattcaaagttccagacttttcaaaattctcagggcaggatagtgtgtcaacttatgaacacgttagccgacttttagctcagtgtggtgaagcatcggctgtggaagccttgagggttacgttgttccggttgtctttgtctagatcggctttcacttggtttacttctctaccatgtggattaatcaacagttggcctgatttggagaagcaatttcatagttatttctacagtgggattcatgagatgaaactgtccgatttaacagtgatcaagtagagacatgatgagtctgtgcatgagtatattcagagattcagagagatgaggaataagtgctacagcttgagtttaactgatgcccagttagccgatttggcttttcagggtatgattgctccgatcagggagaaattctcgtttcaagactttgatagcttgtcacatcttgcacagaaggtaaccttgcatgaacagaggtttgcagaagccaggaagaacttcaaaagggttaatcatgtctgtccttacatatatggatcggatgatgatgatgatgacgactccgagatagcagcagccgaatgggtgaaaagcaaaaaggttatatcatgccaatgggtaaagaattctggaaaagaggagagatatgactttgatattacccaagctgacaagatttttgatttgctactccgagagaaacagattcaacttcctgctggccatacaatcccattggctgaagaattgggcaagaggagatattataagtggcataattttgggtctcattccaccaatgtttgcaaggtcttcaggcagcagatccaagcagctattgagggaggcaaaatcaaatttgatgattctaagaggccgatgaaggttgatggcaatccttttcctgtcaatgtggtgcatacagctggccgaatagccgatgggggacacgcaagaggtttttaggtgaattcggctaaaattatcgacaagtatcagaagaggtatgacaaacaacaggagaggcattacgaggaaggtgatgacggtatgaggctgtcatctatcgaagactgtcctggatgtggtaatattgcagaaagctcaagccgatcgtataatagaggcaatcggctaaagcaaacaagagttcctgttcatcaaaggttagtcccggtgaaccaagattgtaaccaagagggcaatgaagacaggaagactcaatggtgtccttctggtatctttataaagaatcagaagagaaggaaaatgaagccgaagcaggagtggcgagttaagaatcaagctcctatagccgatgaggccgcagccgatgaagcaaagagattggctaaagggaaaagtgttgtaactgcatcggttaacatggttttcacgttgcctgctgaatttggggtcaagcaagccgatgtcgatgaagttgaagaagaatcagctaaattgattttgtcaccagagcaagcaatcttcgaaaagccggaaggaacagagaatcggcatcttaaaccattgtatataaatggctatgtcaatgggaagccgatgtccaagatgatggtcgatggtggggctgcagtgaatttgatgccttatgctacattcaggaagttgggcagaaacgctaaagatctcatcaagacaaacatggtgctcaaggattttggtggcaatccatcagaaaccaaaggagttttaaatgtggaattgaccgtcggcagcaaaactatctctacaacgttctttgagcatcgatgggaagggttcctacagcttgttgcttggaagggattggattcatgccaattgttgtattcctccaaccatgcattaatgcttgattcagtggcaaggcgacaagattgaaattgtgccagccgacagccaattgaagatggagaacctaagctattattttgagggcgtcgtggatgatctcgatgacaaacaaggacagggtttcatgtcggccgatgatttggaagaaattgacataggtccagaattcagaaccaagttgatagagctgttaaaggagttcagagattgcttcgcttgggagtattatgagatacccggactcagccgatcgattgttgaacatcggctacctatcaaaccaggggttagaccacatcaacaacctccgagaagatgcaaagccgatatgctcgaacctgtcaaggctgggattaaacgtttatatggtgctggttttattcgtccatgccgatatgccgagttggtttccagtatagtttctgttatcaagaagaacgacttaaataaagctaccccaatggacgagtatccaatgccagtagccgatcagctggttgatgctgcctcaggacacaagattttaagttttatggatggtaatgcaggattcaatcaaatctttatggctgaagaagatatccataagacagcttttaggtgtcctggtgcaatcgacttgtttgagtgagctgtcatgactttcggcttgaaaagtgctggggctacatatcaaagagccatgaattatatatatcatgatctgatcggctagttggttgaagtctacattgatgatgtggttgttaaatctaaagagatataagaccacatagtcgatttgaggaaggtttttgagagaaccaggaaatatggcttgaaaatgaacccaacaaagtgtgctttcggcgtatcggctggccagtttttgggatttcttgttcatgagaggggaattgagattacccaaagaagtgttaatgcaatcaagaagattcagcctccagagaacaagacagagttgcaggagatgatctgcaagataaattttgttagaaggtttatttctaatttttctggaaggttagagccttttacaccattattaagattgaaagccgatcaacagtttacttggggggcaaagcaacagaaagctttggataatattaaggaatatcttagctctcctccagttttgattcctccacagaaggggataccttttaggttatatctgtcggccggtgagaagtcaatcggctcggtcttgattcaggagctagaagggaaagaaagagttgtattctacttgagccgtcagctcttggatgcagaaactagatattcccctgtagagaagttgtgcttgtgcttatatttttcatgtacaaggttaaggcattatctattgtccaacgaatttactgtagtatgctaagccgatgttattaaatacatgttatcggctccaatcttgaaagggagggttggaaaatggatatgttccttaactaagtttgatcttcgatatgagtcaccgaaggcggtcaaagggcaagctatagccgattttattgttgaacatcgtgatgattcagtcggctcggttgagattgtgccatggactttgttctttgatggattagtatgtactcatggttgtggtatcggcttagttataatttcccctcgggggggggcaagttttgagtttgcttatactattaaaccttatgcaacctacaatctagctgagtatgaggtagttcttaaagcattgcagttactcaaggaagttgaagccgatgctatcgaaattatgggggattctttgctagtaatcagtcaattggcaggagaatatgagtgcaataatgatacattaatagtttataatgagaagtgccaagaactaatgaaagaatttcggctggttactttgaggcatgtatctcgagagcaaaatattgaatctaatgatttggcccaaggggcatcagggtataagctgatgatcaaagatgttaaggttgaagttgctacattaacggccgatgattggagatatgatgtgcattaatatttacagaatccatctcaatcgacttctcataaattaagatataaagcgttgaagtatactttattggatgatgaactctattatcggacgattgatggggtgttgcttaagtgtttgagtgccgatcaggctaaggttgcaatcggcgaggttcatgaagggatttgtggcactcatcaattggctcataagatgaagtgattgcttcgacgtgcagggtatttttggccgacaatgctggaggattgtttcaaatattacaaagggtgtcaagattgtcagaaatttgaagcaattcagagggcaccggcgtcggctatgaatcctatcattaagccatggccatttagaggttgggggaattgatatgatcagcatgattaatccaccatcgagtaaaggacataagtttatattggtggcgaccgattattttaccaagtgggtaaaggcgattcctttaaagaaggttgattctgggaatgctatacagtttgttcaagagcatataatctatcgatttggtattcctcaaaccattacaaccgattaaggttcaattttcgtgtccgatgagtttgttcagtttgccgatagaatgggtatcaaattgttgaattcttcaccatattatgcacaagctaatgggcaggccgaggcatctaacaagagcttgctcaaattaattaagagaaagatttttgattatcctcggcaatggcatactcgattggccgaagcattgtggtcttatcggatggcttgtcatggatcgatccaagtccctccttataagcttgtttatggacatgaggctgttttaccatgggaggttagaatcggctcaaggagaacggagttgcgaaatgatttaacagccgacgagtattataacctcatggccgatgaaa

SEQ ID NO: 101716 - DNA, 315 bp, Oryza sativa
  Clone ID: PAT_MRT4530_9930C.1
tttgattgcaagaaggatatcttgctgggagttgtgagctaattaaatcttctaacattgaaagggagacaacgcacattaccacatccttcattggttacaagccataccttgcggcgctcactagagtccatgtgaactacatgcttggcggcttgtacaagcaggtgaacatcaggatggcgcatgtaacatccttgcagaccctatgacgctttaagtaccaccaatgactctggatgttatatgactttcattgaagaggatttgacagtaacataggcctgcttaagatcacgaccacctaattctact

SEQ ID NO: 101717 - DNA, 4743 bp, Oryza sativa
  Clone ID: PAT_MRT4530_99310C.1
atgaagttgtctgatttgacagtgatcaagcagaaacatgacgagcccgtgcatgaatatattcagaggttcagagagatgaggaataagtgctttagcttgagtttaactgatgcccagttagccgatttggcttttcagggtatgattgctccgatccgggagaaattctcatctgaggactttgaaagcttatcgcatcttacacaaaaggtaactttgcacgagcagaggtttgctgaagctaggaggaattctaggaaggttaataatgtctgttcttacatgtgtggatcggatgatgaggatgatgattctgaaatagctgcagccgaatgggtaaggagcacaaaggttataccatgccaatgggtgaagaattctggaaaagaggagaggtatgattttgaaattaccaatgctaacaaaatttttgatctgttactccgagagaagcagattcaaatgcctgctagtcatactattccatccgctgaggaattgggcaagaaaaggtattgcaaatggcacaattctggatctcatactaccaatgattgcaaggtctttaagcagcagatccaaacagctatcgaaggaggcaaaatcaaatttgatgattccaagaggccgatgaaggttgatggcaatccttttcctgtcaatatggtgcatacagctggccgaacggccgatgggggccgtgcaaggggttttcaagtgaattcggctaagatcatcaataagtaccaaaagaaattctgttggaatgaaggtatgaggctgccatctattgaagactgtcctgaatgcggcaacgttgcagagagttcaagccagtcgtatattaaaggcaatcggctgaagcatgcaagggtttctgttcatcaaaggttgggcccggtaaatcaggatcatgacccggaggatgacaaaaagaggaaaactcagtggtgtcctcctaccgaatttgggatcgaccaagccgatgttgatgaaatagaagaagaatcggctaagttgattctatcgccagaacaagtagtcttcgaaaagcctgagggtacagagaatcggcatcttaaaccattgtatataaatggctatgttaatgggaagccgatgtctaagatgatggtcgatggtggagctgcagtaaatttgatgccttatgctacgttcaggaagttgggcagaaacgccgaagatctcatcaaaacaaacatggtgctcaaagactttggtggcaatccatcagaaaccatgggtgttctaaatgtggagctgacagtcggcagtaagactattcctactacgttttttgtcatcgatgggaagggttcttacagtttgttgcttggaagggattggattcatgccaattgttgtattccttcaaccatacatcaatgcttgattcaatggcaaggcgacaagatagaaatcgtgccagccgacagccaattgaagatggagaacccgagctattgctttgagggcgtcatggagggttcaaacgtctacaccaaggacacggtagatgatctcgatgacaaacaaggacagggtttaatgtccgccgatgatttggaagaaatagatataagtccggcgatcggccaaggccgacatttattaatagagctcttgaaagaatttagggattgcttcacttgggagtattatgagatgcctggacacagccgatcaatcgtcgaacatcggctacctcttaaaccaggggttagaccgcaccagcagcttccgagaagatgcaaagccgatatgctcgaacctgtcaaggctgagattaagcgtttgtatgatgctggttttattcgtccttgccgatatgctgaatgggtttctagcatagttcctgttattaagaaaaacggcaaggtcagggtgtgcattgatttccgatatttgaataaagctaccccaaaggacgaatatccaatgctagtagccgatcaactagttgatgctgcttcgggacataagattttgagttttatggatggaaacgcaggatataatcagatcttcatggctgaggaagatattcataaaacgacttttaggtgtcctggtgcaatcggtttgtttgaatgggttgtgataacttttgtcttaaagagtgctggagctacatatcaacgagctatgaattacatttaccatgatctaatcggctggttggttgaagtctatattgatgatgtggttgttaagtctaaagaaatagaggaccacatagccgatttgagaaaagtttttgagaggaccaggaaatatggcttgaagatgaatccgacaaagtgtgcttttggcgtatcggctggccagttcttgggatttcttgttcatgagagagggattgaagtaactcagagaagtatcaatgcgatcaagaagattaaacctccggaggacaagacagaattgcaggagatgatcggcaaaattaattttgttcgaaggtttatttctattttgtctggaaagttagaaccttttacaccattattgagattgaaggccgatcagcaatttgcctggggggcagaacaacaaaaagctttggataatattaaggaatatttaagttcccctcctgttttgattcctccacagaagggaataccttttcggttatatttatcggccggtgataagtcaatcagctcggtcttgattcaggagctcgaaagaaaagagagggttgtgttctatttgagccgtcggctcttgaatgcagagactagatactcccctgtggagaagttatgcttgtgtttatatttttcatgtacgaggttaagacattatctgttgtccaatgaatgtactgtcatatgcaaggctgatgttgtcaaatatatgttatcggctcctattctgaaaggaaggattggaaagtggatattttcattgactgagtttgatcttcggtatgagtcaccaaaggcgatcaaaggacaagctatagccaattttattgttgactatcgtgatgattctatcggctcggttgaggttgtgccatggactttgttcttcgatgggtcagtttgtactcatggttgtggtatcggcttggttataatctcccctcggggggcatgctttgagtttgcctatactattaaaccttatgcaactaataatcaagcagagtacgaggcagttctcaaggggttgcagttactcaaggaagtcgaagccgatactattgaaatcatgggggattctttgttggtcatcagtcaattggcaggagaatatgaatgcaagaatgatacgttgatagtttataatgagaagtgccaagaactgatgagggaatttcggctagtaactttgaagcatgtatctcgagagcagaatattgaagctaatgatctagcccaaggcgcatcgggatataagctgatgatcaaacatgttcagattgaagttgctgttataacagccgatgattggagatattatgtctatcagtatttacaggatccatctcaatcggcttctcggaagttaagatataaagcgttgaagtatatattgttggacgacgagctttattatcggacaattgatggggtgttgcttaaatgtttgagtaccgatcaggcaaaagttgcaatcggtgaagttcatgaagggatatgtggcactcatcaatcggctcataaaatgaagtggctgcttcgatgtgctggatatttttggccgacaatgctggaggattgtttcagatattataagggttgtcaagattgtcagaaatttggagcgatccagagagcgccggcatcggctatgaatcctatcattaaaccatggccgtttagaggttggggaattgatatgatcggtatgattaatccaccatcgagtaaaggacataagtttatattggtggcaaccgattattttaccaagtgggtagaggctattcctttgaagaaagttgattctggggatgctatacagtttgttcaagagcatataatctatcgggttggtatccctcaaaccattacgactgaccaaggttcaatttttgtgtctgatgagtttattcagtttgccgatagcatgggaatcaagttgttgaattcttcaccgtattatgcacaagctaatgggcaggccgaggcatctaacaagagtttgatcaagttgattaagaggaagatttctgattatcctcggcaatggcatactcgtttagccgaagcattgtggtcttatcggatggcttgtcatggctcgatacaggttcctccttataaacttgtttatagacataaagctattttgccatgggaagttagaatcggctctagaagaacggaattgcaaaatgatttaacagccgatgagtattccaaccttatggccgatgagagggaggatctggttcaatcacggttacgagccctagcaaaggttatcaaagataaggagcgagttactcggcattataacaagaaagtagtgcccaaagatttttcggaaggtgaacttatatggaagttgattttgccgattgggactcgggatagcaaattcggcaagtggtcgccgaattgggaaggaccgttccaaattcataaggtggtatctaagggggcttacatgttgcaaggactcgatggtgaagtttatgacagagcgctaaatggcaaatacttgaagaaatattacccaagtgtttgggttaacgcatga

SEQ ID NO: 101718 - DNA, 4590 bp, Oryza sativa
  Clone ID: PAT_MRT4530_99311C.1
atggccgagaaacaaccaccaccaccatctagcccaggttctgttaaaggcaaggcattgaagttgggattgactgacatcattgaagaaaacgttatgccgatcgatccagagaaattcacgcctgagcagaaggaagagtttgaagcaacgttgcagcaagcacgggatcagtttctgaactcattcatgcagacccgcaaagggacacttgttcagaagtataaaataaaagtggttgctgatagtcctaggaccggttcttctaaagatggagaagtgaaacaagctccaggcggctcggctcagccgagtaccaaaggtgctaccaacggctctctaggcgatcaaggtgacaattctcaaggagttcatggcgttcaaggtgatggtgctcaggggccacaaggaggaaatcttaatcagaatagcgaagtagcgcaggactttttcaataacttccaagatcgggttgattacgccgtgcatcatgctttgatcaatcagtccagggtattagtcaataccttgtcaaacatgatgaagacaatagccgatagttcaatagctaagcatcaggccgcatgcccagtttatttgcaaggaggtgtcttcccaaattatcgatctttgatcaccgatgttcagccatctattcaagcagttccctccgttgcacccacaactcagccgacggcgccagtgtcaactcctctgcctgctacactagctatgacgccaggacagccggtgaaccctcagttgttaatgaggcaacagccacagcatggcgggcaagctgcgaatcggctgacccaagatcaagttgctgccatgtttctgccacctccacctattgttgatccagtgcagcagcagccgattcagcagacaccaccaatccagccggttgtgcaaccaatccaacaacaggtcgtacaaccagctcagcaaacaccaccaagccagcagcctctgcaaccaattcagcaaacaccaccaaggcagcagcctctgcagccgatccaacagactccattaaggcaacaaatccctccttccccgcaagcccaatatcagctagggggattggctcaaccccagttcgcatctcagcctccttccccgcaagcccaatatcagccagggggattggctcaaccccagttcgcatctcagtatggtcagtttgagcccatgcaacaacagccacaaggggcagctcagcaacgaccgtgggccgatgtgattgttgataaggtaaccttgcatgagcataggtcggcggaagtcaggaaaagctctaagaaggttaatcatgtttgtccgtatatgtatgggtcggatgatggggaagacgattctgaaatagctgcagccaaatgggtgaggagtaaaaaggtcataccatgccaatgggtaaaaattcctaaaaaagagaagtatgactttgatattaccaaagctgacaagatctttgatctactactccgagagaagcaaattcagcttcctgctggtcatacaatcccatcggctgaggaattgggcaaaaagaggtattgcaaatggcataattctggatctcattctactaatgattgcaaggtttttagacagcaaatccaggttgccactgaagggggaaagattaggttcgatgattccaaaaagccaatgaaagtcgatggtaatccttttcctgttaatatggtgcatacagctggccaaacagccgataggatccgtgcaaagggttttcaagtaaattcggctaagattatcaacaagtatcagaggaaattcttctggaatgaagggatgaggttgccatctatcgaaaactgccctgggtgcagtgatatcatcgagagctcgagccggtcatataataagggtaatcggctaaggcaggcaagacttcctattcatcaaagattgggtccgatgaatcaagatcatggccaagaggatgaggtaatcaggaagaatcaatggtgtccttctggtattttcacaaaaaatcagaagagaagggttcaaagattgaggaacagggagcgccttcaggaggttgaacaagaaatcaaccatcggctgaggaaaccaaagccaagacaggagtggcgtgttaagaatcaggttcctgtagccgatgatgctgcagccgatgaggcgaagaggaagttggataggaacgccgaggatctcatcaagacaaatatggtgctcaaatactttggtggtaatccatcggaaaccaaaggtgttctaaatgtggagctgacagtcggcagtaagactattcctaccacgttttttgtcatcgatgggaagggttcgtgcagcttgttgcttggaagggattggattcacgccaattgttgcattccttcaactatgcatcaatgcttgattcaatggcaaggcgacaagatagagatcgtgccagtcgacagccaattgaagatggagaacccaagctattactttgagggcgtcgtggagggttctaatgtctacaccaaggatacagtggatgatctcgatgacaagcaaggtcaaggtttcatgtcggccgatgagttggaagaaataaacataggtccaagcgatcggccaaggccgacatttattagcaagaatttgtctccagagtttagaaccaagctgatagagctcttaaaagagtttagagattgcttcgcttgggagtattatgagatgcctagactcagccgatcgattgtcgaacatcggctacctatcaagccaggggttagaccacgccagcaacctctgaggaggtgtaaagctgatatgcttgaacctgtcaaagctgagatcaaacgattgtatgatgctggttttatccgtccctgccgatatgctgaatgggtttctagtatagtttcagttattaaaaagaatggcaagtctaaagaagtagaggaccacatagccgatttaaggaaggttttcgagagaaccaaaaaatatggcttgaagatgaatccgacaaaatgtgtttttggtgtgtcggccggccaatttttgggatttcttgttcatgaaagggggaccgaggtaactcaaaggagcgttaatgcgatcaagaagattcagcccctggaaaataagacagaactacaagagatgatcggcaagatttctaacttgtctggaaggttgaggcattatctattatctaacgagtgcactgttatatgcaaagccgacgtagtcaggtatatgctatcggctccaatattaaagggaagagttggaaagtggatattctccttgactgagtttgatcttcggtatgagtcgccgaaagcgattaagggacaagctatagccgattttattgtagagcatcgtgatgattcaatcggctcggttgaaatagtgccatggactttattctttgatggatcggtatgtactcatagttgtggcatcggcttagttataatttcccctaggggggcatgtttcgagtttgcttatactattaaaccatatgcgaccaataatcaagctgagtatgaggcagtgctcaggggtttgcaattactcaaggaagttgaagccgataccattgaaatcatgggggattctttgctagtaatcagccaattggcaggagaatatgaatgcaagaacgatacattgatggtttataatgagaagtgccaggaactaatgaaagagtttcggctggttactttaaagcatgtatctcgagaacaaaatattgaagctaatgatttagcccaaggggcatcggggtataagccgatgatcaaagatgttaaagttgaaattgcagcgatgacagccgatgattggaggaaattaagatataaggcattaaagtatacactgttggatggtgaactttattatcagacgattgatggagtattacttaagtgcttaagtgccgatcaggctaaggttgcaatcggcaaagttcatgaaggaatctgtgctaatgggcaagccgaggcatctaataaaagtttgatcaaattgattaagcggaaaatttctgattatcctcggcaatggcatactcggttggccgaagcgttgtggtcttataggatggcttgtcatggatcaattcaagttcctccttacaaacttgtttatgggcatgaggctgttttgccatgggaggttagaatcggctctcgccgaactgagttacaaaacgatttaacagccgatgagtattacaaccttatggccgatgagagggaggatctggttcagtcacgattgcgagcccttgcgaaggttaccaaggataaggaacgtgttgctcggcattataataagaaagtggtacccaaagatttttcggaaggagaacttgtatggaagctgattttgcggattggtacttgtgatagtaaattcggcaagtggtcgccgaactgggaaggaccgttccaaattcataaggttgtgtctaagggagcatatatgttgcaagggcttgatggtgaagtctatgggcgagcactcaatggcaagtatttgaagaaatcttacccaagtgtttgggttaatgcatga

SEQ ID NO: 101719 - DNA, 213 bp, Oryza sativa
  Clone ID: PAT_MRT4530_99312C.1
accgcatgagcaatggtgctatcatcggcgcttccaccgtgctggtggtggagggggaggaagccgtgagcgtggagtctatcaagaacagtggcggtggaaaggaggatgtccagttgtgcacgtcggagaatacgcttaaggacatctgtcagacaacctactaccattgaagcggctatgacgaggcatggaaacgaaccctaaattgca

SEQ ID NO: 101720 - DNA, 1899 bp, Oryza sativa
  Clone ID: PAT_MRT4530_99313C.1
atggccgagaaacaaccaccaccactatctccagctagcccaggctctgttaaggaaaagatgctgaaattaggatcgactgacgtcaatgaaggaaacgtcgtgccgatcgatccagaaaaattcacacctgagcagaagaaagagtttgaagcaatgttgcagcaaaagtacaaaataaaagtggttgctgatgatcctgggaccagttcttctaaggatggagatgggaaacaagctctagacgactcggctcagccgagtaacaaaggtgctaccgacgtctctctaggaaatcaaggcgacaattctcaaggagtccatggaatgcaaggtgatggtgcccaagggttgcaaggaggaaatcttaatcagaatagtgatgcggcataagattttttcagtaatttccaagaccgggttgactacgctgtgcatcatgctttgatcaatcaatctagggtgttagtcaataccttatcaaacatgatgaagtcaatagccgatggttcaatagctgagcatcaggctgcaggcccagtttatttgcaaggtgcagccgattcagcagacacccccaactcagcaggttgtacaaccaatccagcaacaggtcatgcaaccagttcagcaaacaccaccaaggcagcagcctctacagccgattcagcagacgctgttaagacagcaaatcgttcagttgatccagcaccaaggttcaataagcgcatcggccgggtttgcaacgcctggtggtcagcccgtacaacaatttttaaatcaagttgtccaagaacacttggttcaccacgtacagccggatggcacagtaatgcctcaagttgttcctgagcacttggtacgtaatatccagccgaaccttcataattaccaagggggtaacttgaattatcaatatcagcctccttccccgcaagcccaatatcagccagggggattggctcaacctcagtttgcgtctcaatacggtcagttcgagcccatgcagcaacaaggggcagctcagcaacggtcgtgggccgatgtgattgctgacgtaatgagggaacagtttgggcttaaaccaaaagagactagaagcttgtatcggcagccttaccctgagtggtttgagagagttcctcttcccaatcggttcaaagttccggacttctccaaatttttgggacaagatggtgtgtcaacttatgagcacattagccgattcttagctcagtgtggtgaagcatcggctgtagacactctgaaggttaggttattccgattatctttgtctgaatcgacttttacttggttttcctctttgccgtatggatcgatcaatagttgggccgatttggagaagcaattccacagctatttttacagtggggttcatgagatgaaattatctgacttgacagcgtttaagcagcggcatgatgaacctgtgcacgagtatattcagagattcaaggagatgaggaacaaatacttcagcttgagtttaactgatgcccagttagccgatctggcctttcaaggtatgattgctccgattagggagaaattctcgtctgaagactttgatagcttgtcacatctgatacagaaggtaaccttgcatgagcatagatctgcagaagttaggaaaagctctaagaaggttaatcatgtttgtctgtacatgtatgggtcggatgatgatgaggacgattctgaaatagctgcagccgaatagatgaggagtaaaaaggtcataccatgtcaatgggtaaaaagttctggaaaagaggagaagtatgactttgatatgactaaagctgacaagatctttgatctactactccgagagaagcaaattcaacttcctgctggtcatataatcccatcggctga

SEQ ID NO: 101721 - DNA, 6849 bp, Oryza sativa
  Clone ID: PAT_MRT4530_99314C.1
atgtcgggccaaacgggggatggcaaagatggtgataagggatctacgtttccttatgactatccatccacatctacctcttatgtgagtacctatagcggcaaagcttcgtacttcaacggcacggactatgccgcttggaaacataagatgaagatgcatttgaagtttattaacccatctatttggagaatagtcgaaaagggctatgttttgcaaaaacctgaggatcccaccaaggaggatgacgagaacgagcacaagaacgctcaagccgctaatgcaatacttagcgccttgagtggaagtgagttcaaccgcgtggacggtattgagagtgccaaggtgatttgggacacgcttcggaatttgcatgaaggcacggatagtgttcgcgagtccaaggtggagatcctcaaagggcaatttgagaggtttgtgatgttggatggagagagcccaagcgacatgtatgaccgtttgagcaagatcgtcaatgagatcaagggacttggctccaaggacatgaccgatgaggttgtggtcaagaagatggttcgagcaatcactccaaggaactctaccttagtaactatcattcgtgagcgtctggacaacaagactctcacacctcatgatttgctcgggcgcatcctagcccatgacatgcttgtgcaagagtccaaggagggaagttcttccaagcaccactccaacaagtcaagtggaagacattctgcaagggtgtgctacgtgtgcaaagagcccgggcaattcattgcggattgcccttacctcaaggatggttcccacatcaaggaagataagaagggcgaaaagaaggatgagaagaaggagaagcacaagcatagcaagcgggaacgttatggccaagctcaccttgggatgattttcggctccgactccgagtcaagctcaagtgatgaaggagttgccacgtttgccgtcaagccttcatcaccaccaagactcttcaactactcaagtgatgaggatgctcccatttgcctcatggcaaaagagcctaaggtaccttcctccctcaagtcaatcaatgttgatcttgtttgtgatgaggaggatgatgttgaggatgaggttatggatgaggaattgttcaagtccataaccaaggagtctctaccacacttgagtgagttgcttgggagaattgatgatcagtatgcaacccttgagaggaggcaagaggcattactcattcgtgagaaagagcggtctcatgaactcaaggagataaatatgggcaaaagtctgccacaaagacttatggatcaaatcaactggcacgctaacatacccgaaggcgagctttggacctgcactggagttaagcagatctcgcaggcctcgtgttttacgtcaacacgcttttggcatgcccagtgggaccaagaagaagtcagcaagcaattcttcctcatggccgagaaaccaccgctatcgccatcctcggctagtccaagcactgttaaggaaaagatccagaagttgggattgaccgacgtcaatgaaggaaacgtcgtgcccatcgatccagaaaaattcacacctgatcagaagaaagatttcgacgcgatgatgcagcaggcacgggatcaattcttgaactcattcatgcagactagcaagggaacagtggttcagaagtataaagtaaaggtagttgccgatgatcctgggaccagttcttctaaaggtgaagacgggaaacaagctccggacggctcggctcaaccgagtgacaatggtgctacagacggttctctaggaggtcaacgtgacaattctcaaggagtccatggggttcaaggtgatggggtgcatggagttcaagatgtcatgaaggagcagttcaggcttaggccgaaagatgctggaaatctatatcggcagccatatcctaagtggtttgagagagttcctttgcccaaccggttcaaagttccagatttttcaaagttctcatggcaagatagtacatcaacttatgagcacattagccgatttttagctcaatgtggtgaagcatcggctgtggatgctttgaaagttaggttattccggttgtctttagctgggtcaacctttacttggttttcttctttaccatatggatcaattaacagttgggctgatttagaaaagcagtttcatagctatttctatagtgggattcatgagatgaaactgtccgatctgacgtcaatcaagcaaaagcatgatgagccagtacatgagtatatccagagatttagggagatgagaaataagtgttacagcttgagtttaactgacgcccagttagccgatttggcttttcagggtatgattgctccaattagggagaagttatcatctgaagactttgaaagcctgtcacatcttacacagaaggtagccttgcatgaacaaaggtatgcagaggctaggaaaaattctaggaaggttaatcatgtttgcccttataaatatggatcggatgatgaagatgatgattctgagatagctgcagccgagtgggtaaggagtaagaaggttataccatgccaatgggtaaagaactcaggtaaagaggaaaggtatgactttgatatatccaaggctgataagattttcgacttgctactccgagagaaacagattcaacttcctgccggtcacacaattccatcggctgaagaattagggaagaaaagatattgcaagtggcataattctggatctcatacgactaatgattgcaaggtcttcaggcagcagatccaagcggctattgagggaggcaaaatcaagtttgacgactctaagaggctgatgaaggttgatggcaatccttttcctgttaatatggtgcatacagctggccgaacagccgataggggccgtgcaaggggttttcaggtgaattcggctaagattatcaacaaatatcagaggaagtatgacaagcagcaggagaagcatcatgaagaagatgacgatggtctaaggctgccgtctattgaagactgtcctgggtgcagtgatattgccaagaattcaagccgatcatatggtaggggcaatcggctaaggcagacaagagttcctgttcatcaaagattgggtccagtgaatcaagatcatggccaagaggacaatgaaatcaggaaaaatcagtggtgtccttctggtattttcacgaagaatcaaaagagaaggaaaacaaagtcgaggcaggagtggcgtgttaagaatcaggttcctgtagccgatgaagctacagctgaggaggcaaaaaggttagctaaggggaaaagtgtcgtaactgcttcggtcaacatggttttcacgttgcctgctgagattgggaccaagcaagccgatgtcgatgaagttgaagaagaatcagccaaattgattttgttgccagagcaggcaatttttgagaagccagaggggacggagaatcggcatcttaagccattgtatataaatggttatgtcaatgggaagccaatgtccaagatgatggtcgacggtggggctgaagttaacttgatgccttatgctacattcagaaagttgggcagaaacgttgaagatctcatcaagacaaacatggtgctcatagactttggcggcaatctatcagaaaccaaaggagtttcgaatgtggaactgacagttggtaacaaaactatccctacaacattctttgtcatcgatgggaatggttcttatagcttgttgcttggaagggattggattcatgctaattgttgcattccttcaaccatgcatcaatgcttgattcagtggcaagacgacaagattgagattgtgccagccgacagccaattgaagatggagaacccaagctgttatttcgagggcgttgtggagggttcaaatgtctacatcaaggacacggtagatgatctcgatgacaaacaaggacagggttttatatcggccgatgatttggaagaaattgatataggtccaggtgatcgaccaaggccgacatttatttgtaagaatttatctacagaatttagagccaagttgatagagctgttgaaagaattcagagattgcttcgcttgggagtattatgagatgcctggactcagccgatcgattgtagaacatcggctacctatcaaaccaggggttagaccacaccagcaacctctgagaagatgcaaagccgatatgcttgaacctgtcaaagttgaaattaaacgattatatgatgcttgttttattcgtccttgccgatatgctgaatgggtttctagtatagttcctgttattaagaagaatgacttgaataaagctaccccgaaggatgaatacccaatgccagtagccgatcagctggttgatgctgcgtcagggaacaaaattttgagttatatggatggaaacgtaggatataatcaaatctttatggccgaagaagatatacataagacagcttttagatgtcctggtgcaatcggcttatttgaatgggttgtgatgactttcggcttgaagagtgctggagctacatatcaaagagccatgaattacatatatcatgatctaatcggctggttggttgaagtctacattgatgatgtggttgttaagtctaaagaaatagaggaccatatagccgatttgaggaaggttttcgagagaaccagaaaatatggcctgaagatgaatccgacaaaatgtgcttttggtgtatcggttggccagtttttgggatttcttgttcatgagagggggattgaggtgactcaaaggagtgttaatgcaatcaagaagattcagcctccggagaacaagacagaactacaagagatgaacggcaagataaattttgttagaagatttatttcttatctgtctggaaggttagagccttttacaccattgttgagattaaaagctgatcagcagtttacttggggggcagagcaacagaaggctttggatgatattaaagaatatcttagctctcctcctgttttgattcctccacagaaagggatatctttcagattatatctatcggccggtgagaagtcaatcggctcagtcttgattcaggagttggatggaaaagagcgcgttgtattttatctcagtcgtcggctcttggatgttgaaactagatattcccctatggagaagttgtgcttgtgtttgtatttttcatgtacaaggttgagccattatctactatctaacgagtgtactgtcatatgcaaagccgatgttatcaaatacatgttatcggctccgattttaaaaggaagggttggaaagtggatattttccttaactgagtttgatctaaggtatgagtcgccgaaggctattaagggacaagctatagccgattttattgtggaacattgtgatgattcaatcggctcggttgaagttgtgccatggacttcattctttgatggatcggtgtgtactcatgattgtggtataggcttggttataatttcccctcggggggcatgtttcaagtttgcttatactataaaaccttatgcgactaataatcaagctgagtatgaggcagtgctcaaagggttgcaattactcaaggaagttgaagccgatgctattgaaatcatgggggattctttgctggtaatcagtcaattggcaggggaatatgaatgcaagagtgatacattaatggtttataatgagaagtgccaagaactgatgcaggaatttcggctggttactttaaagcatgtgtctcgagaacaaaatattgaagctaatgatttggcccagggggcatcggggtataagccgatgatcaaagatgttaaggctgaaattgcagcaataacagccggtgattggaggtatgatgtgcatcaatatttacataatccatctcaatcagcttctaggaaattgagatataaggcgttgaagtatactctattggatgatgagctttactatcggacgattgatggagtgttacttaagtgtttgagtgccgatcaggctaaagttgcaatcggcgaagttcatgaaggaatttgtggtactcatcaatcggctcataagatgaagtggttacttcggcgtgcaaggtatttttggccgacaatgctggaagattgtttcaaatattataaagggtgtcaagattgtcagaagtttggagcaattcagcgagcgccggcgtcggctatgaatcctattattaagccatggccattcagaggttggggaattgatatgatcggtatgataagtcgaccatcgagtaaaggacataagtttatattggtggcgactgattatttcaccaaattggtagaggcgattcctttgaaaaaagttgattctggggatgcaattcaatttgttcaagaacatataatctatcggtttggtattcctcaaactattacaaccgatcaaggttcaattttcgtgtccgatgagtttgttcagtttgtcgatagcatgggtatcaaattgttgaattcttcaccatattatgcacaagctaatgggcaagccgaggcatctaacaagagcttaatcaaattgattaagagaaaaaattctgattatcctcggcaatggcatactcggttggacgaagcattgtggtcttatcggatggcgtgtcatggatcgatccaagtccctccctataagcttgtttatggacatgaggctattttgccatgggaggttagaatcggctctagaagaacggaattactaaatggcaagtatttgaagaaatattacctaagtgtttgggttaatgcatga

SEQ ID NO: 101722 - DNA, 150 bp, Oryza sativa
  Clone ID: PAT_MRT4530_99315C.1
atgacggcggaggaaggagctgtgaggttctcttcgcctcagcttaggttagggatggcgttggctctagaacgagagaggagaaagtgcagtaagaagacaaatggtcagacgttagataaaaagtcttacattaaaatatgggggtag

SEQ ID NO: 101723 - DNA, 227 bp, Oryza sativa
  unsure (1)..(227): unsure at all n locations
  Clone ID: PAT_MRT4530_99316C.1
gggggggggtntttgtgggagttttttttcntggggctttgttccctgggtgtgcacatggtatcgcgctaccccttttacagagaaccttcgcaccaagaggggaaaaacaacaaccaccagagaacagttgcaatgtaaatcgggccatatataaaaattttggctttagaatatccaactacaaaatatttggtggacgaacaccaaaaaaaagaactgggggg

SEQ ID NO: 101724 - DNA, 6282 bp, Oryza sativa
  Clone ID: PAT_MRT4530_99317C.1
atggcgaccctcaccgtcgcacgatgggaatggcgctccggcggcgaacctcgacgaaggaggggtggacggggtggatctcggccacgcgaacccgacggcggcgacggcgcgggctctgaaaattcctctaaaaatcctgttagtgaatttcgacatgtcgaactcaagaaaaattccacatgccaattccaattattatttgcattgatttacaagggtttactcttgctttgcaccggcttgggaggagaacttcggggtgtgacattcatgcagacccgcaagggaacattgattcagaagtataaagtaaaggtagttgccgatgatcctaggaccagttcttccaaaggtgacgacgggaaacgagctctagatggctcggctcaactgagtgacaaaggtgctactgacggttctctaggaagtcagggtgacaactctcaaggggtccatggagttcaaggcgatggagtgcatggagttcaaggtgatggtgctcaagggttgcaagggggaaatcttaatcagaatagtggtgcggcacaagattttttcaataatttccaagaccgggtcgactatgctgtgcaccatgctttgatcaatcagtctggggtgttagtcaataccttatcaaacatgatgaagtcaatagccgatggatcaatagctgagcatcaggctgcaggcccagtttatttgcaaggaggtgtctttccaaattatcggcctttgatcactgatgcccagccatctactcaggcagctttccccgtcgcacaatcagctcagccgatggcgctggcattaactcccttacctgcttcgtcagcattggcaccaggccagctggtgaaccctcagttgttaatgagagagcagccacagcatagtgggcaggttgtgaatcggccgacgcaagatcaggttgctgccatgtttctgccgcctcaacctactgttgatccaatacagcagcagccgattcaacagatactcccgattcagcgggtcatacaaccaatccagcaacaagttgtcctccttctccgcaagcccaatatcagccagggggactggctcaaccttagtttgcgtctcagtacgggagcagctcagcaacgaccgtgggtcgatgtgattgctgatgtgatgagagaacaatttgggcttaaaccaaaagagactagaagcttgtatcggcagccttaccctgagtggtttgagagagttcctcttcccaatcggttcaaagttccggacttctccaaattttcgggacaagatggtgtgtcaacttatgagcacattagccgatttttagctcagtgtggtgaagcatcggctgtggacgctctgagggttaggttgttccggttatctttgtctggatcagcttttacttggttttcttctttgccgtatgggttgatcaatagttgggccgatttggagaagcaattccacagctatttctacagtggggttcatgagatgaagttatctgacttgacggcgattaagcagcggcatgatgaacctgtgcacgagtatattcagagattcagggagatgaggaacaagtgcttcagcttgagtttaactgacgctcagttagctgatctggcctttcagggtatggttgctctgattagggagaatttctcgtctgaagactttgatagcttgtcacatctgatacaaaaggtaaccttgcacgaacataggtctgcggatgctaggaaaagctctaagaaggttaatcatgtttgtccttacatgtatgggtcggatgacgatgaggatgactctgagatagctgcagccgaatgggtgaggagtaaaaaggtcataccgtgccaatgggtaaagagttctggaaaggaagagaagtatgattttgatattactaaagctgacaagatttttgatctgctactccgagagaagcaaattcaactccttgctggtcatatgattccgtcggctgaggaattaggcaaaaagagatattacaaatggcataattctgggtcccattctactaacgattgtaaggtgtttagacaacagattcaaatggccattgagagaggcaagattaagtttgatgattccaaaaagtcgatgagggtcgatggtaacccatttcccgttaacatggtacacacagctggccgaacagctaatacggggcgcatgaggggttatcaagaaaggcatcatgaagaagataatggtggctttgatcctcattggggctgtgagttcttcaggttctgttggaatgaagagtatgatgaaaataagaagactcaatggtgtcctcctggtatttttacgaagaatcagaaaagaagggttcaaagattgaggagtagggaacgcttccaggaggtcgagcaagaaattaatcatcggctgaagaaagcaaaaccgaggcaggagtggcgtgttaagaatcaggctcctgtagccgacgatgttgcagttgatgaggcaaagaggttggcaaaaggaaagagtgttgcgacggcaccagttaacatggtttttaccttgccagccgaattcgggatcgatcaagccgatgtcgacgaggtggaagaggaatcggctaagttggttctatcaccagaacaggcggtgttcgagaagcctgaggggacagagaatcggcatcttaaaccattgtatataaatggctatgtcaatgggaagccggtgtttaaaatgatggttgatggtggggccgcggtgaatttgatgccttatgctacgttcagaaagttgggtagaaatgccgagaatctcatcaagacaaatatggtgcttaaggactttggtggcaatccatcggaaaccaaaggtgttctaaatgtggagctgacagtcggcagtaagactattcctaccacgttttttgtcatcgatgggaagggttcttacagcttgttgcttggaagggattggattcacgccaattgttgtattccttcaactatgcatcaatgcttgattcagtggcaaggtgacaagatagagatcgtaccagccgatagccagttgaagatggagaacccaagctattattttcagggcgtcgtggagggttcagatgtctacactacggatgcggtagatgatctcgatgacaagcaaggtcaaggctttatgtcggccgatgatttggaagaaatagatataggtccaagcgatcggccaaggccgacatttattagtaagattttgtctccagaatttagaaccaagctgatagagctcttaaaagagtttagagattgcttcgcttgggagtattatgagatgcctagactcagccgatcaattgtagaacatcggctacctatcaagccaggggttaggccgcaccagcagcctccgaggagatgcaaagccgatatgcttgaacctgtcaaagctgagattaaacgtttatatgatgctggttttattcgtccttgccgatatgctgagtgggtttctagcatagttcttgtcatcaagaagaacggcaaggtaagggtatgcattaattttagagatctgaataaagctacaccgaaagatgaatatccaattccagtagccgatcagctggttgatgctgcgtcagggaacaaaattttgagttttatggatggaaacgcagggtataatcaaatttttatagctgaagaagatatccataagacagcttttagatgtcctggtgcaatcggcttatttgaatgggttgttatgactttcggcttgaagagtgctggagctacatatcaacaggccaagaattatatttatcatgatctaatcggctggctggttgaggtctatattgatgatgtgattgttaaatctaaggaaataaaagaccacatagccgatttaagaaaagttttcgagaggaccaggaaatatggcttgaagatgaatccgacaaagtgtgcttttggtgtatcggctggccagttcttgggatttcttgtccatgagaggggaattgagataactctgagaagtataaatgcgatcaaaaagattaagcccccgaaaaacaagaccgaattgcaggagatgatcggcaagattaattttgttcgaaggtttatttctaatttgtccggaaaattagaaccttttacaccattgttgagattgaaggctgatcagcagtttacttgggggacagagcagcaaaaggctttggataatattaaaggatacctgagttcccctcctgttttgattcctctacaacaagggataccttttagattgtatatgtcggccggtgagaagtcaatcggctcggtcctgattcaagagttggatggaaaagaacgagttgtattttatctcagtcgtcggctcttggatgtagagactagatattctcctgtgaagaagttatgcttatgtttatatttttcatgcacgaggttaaggcattatttactgtccaatgaatgtactattatatgcaaggccgacgttgttagatacatgttatcggctccaatattgaaaggaagggttggaaagtggatattttctttaactgagttagatcttcggtatgagtctctgaaggcgattaagggacaagctgtggccgattttattgtggaacatcgtgatgattcaatcggctcggttgaaatggtgccatggactttattctttgatggatcggtgtgtactcatggttgtggtatcggcctagttataatttcccctaggggggcatgtttcgagtttgcttatactattaaaccttatgcgactaataatcaagctaagtatgaagcaatgcttaaagggttgcaattgctcaaggaagttgaagccgatgctattgaaatcatgagggattctttgctggtaatcagtcagttggcaggggagtatgaatgcaagaatgatacgttaatagtttataatgagaaatgccaagaattgatgaaggaatttcggctgattactttaaagcatgtatctcgagaacaaaatattaaagctaatgatttggcccagggggtatcggggtataagccgatgatcaaagatgttaaggttgaaattgcagcaataacagccgatgattggaggaaattaagatataaggcgttgaagtacactctattggatgatgagctttattatcggacgattgatggagtgttacttaagtgcttgagtggcaatcaggctaaagttgcaattggcgaagttcatgaaggaatttgtggcactcaccaatcggcccataagatgaagtggctacttcggcgtgcagggtatttttggccgacaatgctggaggattgcttcagatattataaggggtgtcaagattgtcagaagtttggggcaattcaacgagcgccggcgtcggctatgaatcctattattaaaccgtggccatttagaggttggggaattgatatgatcggtatgataaacccaccatcaagtaaagggcataagtttatattggtggcgactgattattttaccaagtgggtggaggccattcctttgaataaagttgattctggggatgcaattcaatttgttcaagaacatataatctaccgatttggtattcctcaaactattacaactgatcaaggttcaatcttcaagtccgatgagtttgttcagtttgccgatagcgtgggtatcaaattgttgaattcttcaccatattatgcacaagctaatgggcaggctgaggcatctaacaagagcttgatcaaattaattaagcggaagatttctgattatcctcggcaatggcatttccggttggccgaagcattatggtcttatcggatggcttgtcatggatcaattcaagttcctccttataagcttgtttatggacatgaaactgttttgccatgggaagttagaatcggctttagaaggatagagttgcaagacggtttgacagccgatgagtattataaccttatggccgatgagagggaggacttggttcaatcgcgtttacgagcccttgctaaggttaccaaagataaggaacgagttgctaggcattataacaagaaagtagtgcctaaagatttttcggaaggtgaacttgtatggaagttgattttgccgattggaactcgggataacaagttcggcaagtggtcaccaaattgggaaggaccgtttcaaatctataaagttgtgtctaaaggggcatatatgttgcaagggcttgatgatgaggtttatggatga

SEQ ID NO: 101725 - DNA, 552 bp, Oryza sativa
  Clone ID: PAT_MRT4530_99318C.1
ccattgttgagattgaaagccaatcagctgtttacttggggggcagagcaatagaaggctttggataatattaaggaatatcttagctctcctcctgttttgattcctccacaaaaaggagtaccttttagattatatctatcggccggtgagaagtcatcggctcagttttgattcaggagcttgaaggaaaggaaagggttgtattctatctcagtcgtcggctcttggatgcagaaactagatattcccctgtggagaagttatgcttgtgcctatatttttcatgtacaaggttgaggcaatatctactatccaacgaatgtactgtcatatgcaaggccgatgttgtcaaatacatgttttcggctccaattttgaaagtaagggttggaaagtggatattctctttaactgagtttgatctttgatatgagtcgccgaaggcaattaagggacaagctatagccgattttattgtggaacatcgtgatgattcaatcggctcggtcgagattgtgccatcgactttattctttgatggatcggtgc

SEQ ID NO: 101726 - DNA, 576 bp, Oryza sativa
  Clone ID: PAT_MRT4530_99319C.1
atagtgcttgcactgggtttgcagaccattgtttcatcaaactgccagcgagaaattccatcgtcaaacattgacttacattcggcacactgcgcacgtaaccttcaaaagtgtgaacactgtggagaaatggtggccagaaagcttatggacgagcactacaatgaaagccatgctccagtaaattgcactctttgcaaggaaattgtaacacgcgagatctgggatcttcataaaagtgaacagtgcccacaaaggattgttgcatgtgaatattgtgagtttgagttgcctgcggttgagcttcatgaacatcaggatgtatgcggaaaccgaacagaattttgtcaaacatgcaagaagtatgttagactacgtgaatggattgggcatgaaatacagtgtcatgcaaatgcaaatgcaaatgcttctgcacagagagaagtgcgtcctcctccaccagtaagaccgccacggcctatgcatggtgcacagcacaagcgtctgctcttcacaattgcggtgactggaatcgcagttatgattggttcgatactttttcagagggaggagagt

SEQ ID NO: 101727 - DNA, 525 bp, Oryza sativa
  Clone ID: PAT_MRT4530_9931C.1
atggcagcgagggcgtcaaggctgcctgcggcggaattggtggcggcaagggtggaagtggaagcagcggcggatgcagcgcaagcggcggcggcagagctcaaggctctgcgcgacaatagctccagcagctctgtctccgcctacgacatccctgctgatgagctgacgagggaggcagctcgtgagcgggtggagcaacgggcagccgcgcaaccccacacgcgccgtagcagcagcccagccgggcgtggatgcgtcggcggcgttcctggcaggagcgcgcgcggcagcggtagcccagacgggcttggacgcattggcggaccccttggcaggggtgcgcatgacggcggtgctcccggcggcaacggcttggtcgacggagatcgcggccgttgcaggcggctcgtctctccctccccggaccggtaccgtggacaccacgggattcaggccgtcatcagggaagtcagccccggcggtggttggcctgccttcaccaagaccaactacatcgagtga

SEQ ID NO: 101728 - DNA, 546 bp, Oryza sativa
  Clone ID: PAT_MRT4530_99320C.1
acaattcctaaagggccagatttagcaaaccaccacaaatcatgcatagggaaagtttcaaaaccattagtatgtgtcctactcctaatgacaatatagttcaatatggaaaagaagttcctgtttcaaaaaggtaggaatgcaatttcattctctgggatgacatatagggatcatcaggtgttgggcaatataaatctactgctgatgctgccggccgggacgacaatgttgatggagcttcatcctcgtcaatagcgacaggtcgttcatcatgagaagctggttcagaaaatggtgcgtctatgctctcccagttcaggtcatctttgcaaaaaggctaggctcttcattgaaccattcatccaaaacgtctacatagccatgtctgatggggtcagtgacatctctgagttggtaaagcttcttgcaagactgttaacagtataattagtaaagcaggacgagtactaccaaaattcccaaatacattccatcatctttatatcttcagttagcaagaataaagcccataaataagcaaaa

SEQ ID NO: 101729 - DNA, 1090 bp, Oryza sativa
  Clone ID: PAT_MRT4530_99321C.1
cctcttctcctctcctctctcgccttcccttcgcctcgtcttctcctccacctccaccaaactcctccccccccccccccccaaccaatcttcctcgaatcctccggctgcgccaccacccaccccgcgcgcgtcgtcgtcgtcttcgtcgtctccgccgccggctgctcgattggcgccggccaaggaagcggcgaggcggattcactgcgaaggcgatatggcggcagcagcaacggcggccgacgccggctccgatccctccgcggccctcgccgccgccgccgccacatccacctgcgcccactgccagcgagaaattccatcgtcaaacattgacttacattcggcacactgcgcacgtaaccttcaaaagtgtgaacactgtggagaaatggtggccagaaagcttatggacgagcactacaatgaaagccatgctccagtaaattgcactctttgcaaggaaattgtaacacgcgagatctgggatcttcataaaagtgaacagtgcccacaaaggattgttgcatgtgaatattgtgagtttgagttgccctgcggtttgagcttcatgaaccatccacggatgtatgcggaaaccgaacagaattttgtcaaacatgcaagaagtatgttagactacgtgaatggattgggcatgaaatacagtgtcatgcaaatgcaaatgcaaatgcttctgcacagacatcaagtgcccgaatcattccagagagagaagtgcgtcctcctccaccagtaagaccgccacggcctatgcatggtgcacagcacaagcgtctgctcttcacaattgcggtgactggaatcgcagttatgattggttcgatactttttcagagggaggagagtttctaagtccagtgtctatggtctctccccatcgagttgattccaacagcaacagcataaagagttaccttgatgtataatttacccctcataatcagtctataaaatcactttgtttgtttgataaaaaaataacaagcatggctttgttaaaagaattgaaataaccatgaagatgcccattattctcagtggtatatcaagacctttgaagcag

SEQ ID NO: 101730 - DNA, 511 bp, Oryza sativa
  Clone ID: PAT_MRT4530_99322C.1
ggaaggaaaattcgccattcctaaataaccttagtttataacttatcttgaattcaaggtaactttgttctaacaggcccatgcccataaaataaggggccgcgaaacgtgggcttttttaactcacatcccaggacaacattactcctttttgggaaatctaatttccatgttctgtgacgaaaataaaaaaaaaaaaatttcctttggggggcacagaatctacaggtcttcctccttgggacaagtgatggggatgcgccttgaacctagggatacaaaaccttgcctgaatttctggtggtaccttcagcccctcccggtgccaagggtatggctttcaaaggtttcttaaccgccgagagtggggctataatgttactgccaacccccgccgggcaaagaggactccttcctatattaagcttctataaacgatgaactgttttctgggatgctttaacaggttggttgtttatcccaagagttaaacaaaaacccccgaaggaat

SEQ ID NO: 101731 - DNA, 333 bp, Oryza sativa
  Clone ID: PAT_MRT4530_99323C.1
atgggaagggggaagtggggcatcgggtttagggggatggcctatgagctggtggtggcgggggcaaagcaagacgaaggggagtgggtggaggccgaccgggcggggttgcgccagtggcagaggaggcaaggaatcgaagctgacctcgatctagacttcgcactggagggagagcggagggagctcaccggggagaggccgtcgttgcgatgccatcgtcaacgtgtagcccactcctgctcccatcgccaaagccgaagggccgctcattccgtagttcgcgctcaatataacgctaggaagactagagataaggtggagagagtgtag

SEQ ID NO: 101732 - DNA, 1893 bp, Oryza sativa
  Clone ID: PAT_MRT4530_99324C.1
cgcgacgccgagctagtgcgacccggggagctctgcgacctcctccatggccaaggcggtgctgctccgcaaggtgcggggcaccgagaaaagtacatgaggtttactgtcaatttgcggattaagttattcacaatgcttataaactaagctatttacatgtaaactagcatctttgagaggaaagcgaggtagacatcaatacattggaacaaaactctcaaaaacctggattcaatgaccaaaggaaccaaagatctcaagtccagatatagatatgatgcttgtcagcggtagcaagaggtcctaacccacaccatgaacttgaaactaccgacgaagaatggccctgtaggatcgtcggtaccccatcctttttcaatcttgaccatatgtaaacagacccatcattagcaccagcagctatggagttttcatcagggcttatgcaaggcctgccccagctgctaaccactctgttacccatggccttgaattttccacaaacttccattgttctaggatcaaaaaggttgtgcacgttatcctttccacttgtaagaatgaaatttctattccgtgacacactgacagagcttacgtcaagatgagcgaatgtctgactagtgcattttgcacttcggatgtcccataaccgaaggtgtccatccctatgacccgagcaaagggtgacaccatcaatgaaagctagtgagttggcgttgctccctgacattatggtgcttttgcagaagcctgactgaagatcccaaatcttgatggtatgatcattggatgaactagcaagaacacagctcttcacccagcttgcatcaacggatgaaacattttttgtgtgaccagtcagagtgtgacgtgggcgccccccattaacttcccatacaaacaatttgttagagctacaggcagcaatcacaaacttgttgtcattagtcacagcaagatcattgacagaccccaaacagccttgtagagtggaggttaaagcaccggtatgtgcagaccaaatcttgacagtttgatcctggccaccactgattagcttgtctgtgttatgctggaaaattatagatccacagccaccatcatgagcacggatagtgattctgcatgtagatgggattggtgtttccatgatgtccatgtacccagcttcagaacgacgaatgatgccatcagcttcttgtagtgcattgtgttgtataccaccaacaccagctgacttcagctttagaaccatctcctcatacattgcatttgcctcattaagcctctctgcatccttcatcttctcaagcatccatcgatcaatcagattcctgttttcatcttctgccactttctgttttgttaatgcctgttcaagttcagctttaactgcctggtgctcctgaattataagatctaaagcgcttgttttttcttcaagcgactgcttgagctgcgtattttcttccctggtttgctcgagttcagtctgcatggtagtaatcagtgtttctttctctttaagcagcgcttttgatgctttcccctcttctatctcggtaacgagctgctcggacaaacgtgactgagccttgtagcattgctgcagctccaattcatgcttctcagccttctctttccactccaccgcttgggcggcgaagggccgggcgagcgcctcgatggccgggcggtgggcgccctcctcgacgagatgcctccgccgcagagaccgcagggctcgccggatcgcctccttgccggcctcggcctccaccatcgtcattgccgggtgcaatccgtcgccgaggaggtccggtgccttccggcggaggaagaggaggtcgcgtacggcgggcgtgcccggcggagaggtcgtcacga

SEQ ID NO: 101733 - DNA, 213 bp, Oryza sativa
  Clone ID: PAT_MRT4530_99325C.1
atggctgtggcaggcggcatcctggtgagcggtgaggtgctagagcagtggggaaggatgagatggggaaaatggttggatggggcactggtgcgccctcggcttggaaaagataagggagatggggaggtggacggttgggagagcctcaccaacgctgttgacaccttccggcaagccgacatgggggcaatgtcactagatacgcaatga

SEQ ID NO: 101734 - DNA, 774 bp, Oryza sativa
  Clone ID: PAT_MRT4530_99326C.1
ctgcacaagccggatctccaatccacaagcctgtgcacgttgatgtccccgcacgcaacaagcaccgtacatcgatcatccccggagtggctaacggtcgaagtacgcggacgtgtcacgcgtgcgtggtggggcctgatcggcgaagatttttatatgtttggtctattgtactacccaacagacgctctcgccgggccgcctaccctcaggcctggcgtttgataagcgaccagcgttactcggctcgctccgcctaccaggcttttttcctcggacaacatccctttgcttccggtgattttctaggcgggctaaaagctctactaaatgcatgctcctcctttagcttgaatttcagtagtgttgttggacggccgatctcttgcataagtgttaaattgacagccacttggtctgttcgttcggtgtcccgaaactcgagacggcgaatcatatcgtcctcgatcgtgtctttgctcgctagatctagcatcggattctgtctccgcctgacctgtcgaacctctctcctgcccttggctcctctcttcaagcctggtggccagcttccagggcttgtctgccagcacacctttacaaggggtttgattacttagtccttctcgtttcctggcaactatgaaaaggacaaaactccaaaattttcgatttctctctttgtaggtctcggtagttctgagctccatcctgcaaaaagaccgcctgaggtctgctgcaggtgtcatgtcttttgaagactcgttgggtgag

SEQ ID NO: 101735 - DNA, 735 bp, Oryza sativa
  Clone ID: PAT_MRT4530_99327C.1
atgaactcgccggaagaacgaggcatgtcagcggcagcggctacggaggtggaagcgcacgcagcagacagccctcctcgccgtcgcctgtcgggtcgcaaccatggcgataactgcctgacggttttgttggtagtgctcctcttgctcatcgtcggcggggtagttttcttcgtagtcgattccaacacgagaccgcggtactccgtcgcgatcgacgccgtctccggcctcgacccggccgcgacgggtgatgacgggcggggtcccacgctggacccggtgttcgacctcaccgtcagcatctcgccgcggagccgggtaagaggcacggactgctacgagcccggcaccaccgtggaggtgaactaccacggcgtcctcctcgccagcgggcccgtcgagcagctgtgcgcccgggcgacgaagacggggcgggggcgcgccgtcgcgtggggcaccggcgtgcgcttgccggggttcgtcctggacgcgctcgtgtccgacgtgcggcgcggcggggtggaggccacagggttcgacgtcacggtgaagatcccgtccaccggcggtggcgaccgctccagcccggccgggatgctcgtgtcgtgcagggcgaggcgggccggggacgacgccgccgctgtgttgaggactccgtgcgacgcgctgagcgcgaacatcgtcgtgccattgccgaacacggggaggacgcagacgggcggtgccagttaa

SEQ ID NO: 101736 - DNA, 114 bp, Oryza sativa
  Clone ID: PAT_MRT4530_99328C.1
atgtcgaatatcggaccccccggggaggacctaaggcatcgaatctcagagtcaacacaacccccacagcctacgaagtcggagcctgcaggagccaaaccgccagagatctag

SEQ ID NO: 101737 - DNA, 468 bp, Oryza sativa
  Clone ID: PAT_MRT4530_99329C.1
aaggcggtaaacatgtgtaatgtaatatacacaaaattctccatccactcaaatttgtccacatgtaagtatgcttttgcttagctatctcaggcatatgtatatgtatgtacaagcaatacggccgaggactgagaaaggaacacatgataaaacaacctaaggcatacatcatacaaaactgtcgatgatcccctaactgaccatgttctaagactgaaccatcctacggtctcataatagctgaatgcaacctttaaacatcgctgtcatggtcactggctgcatctttctcttcatagctcatgtcttcgttgatactaacactaaggccatcttcttcgtcatcgtcatcatcatcatcatcgtcgtcgtcgtcttcgtcgtcctcttcagatgaatcaaaatccgaggaaaatatgtaatcatcaaagtaaaccgagtcataggactcactgatatcagagc

SEQ ID NO: 101738 - DNA, 364 bp, Oryza sativa
  Clone ID: PAT_MRT4530_9932C.1
atattattgtttttttttttttttttttatattttatagtttttttgaaattaaaacattttttgtagaattctctcttttgggagaacaaaaaaaagatacgcccgggggggacaaacgaggggccaataagcaaaaacaaaaaaagtgaaggggtgtccccctaaaaagcttgagggggggaacttgggccaagaacggaaaaaaaaggagaagggggggagggtaaagtgcaacgaggcctaaaaaacccggaatggggatgaaaagaccacatcaaggggaggtaaaaaatagctgggaaaaatacaaaaattagggggggggaccaccccagggcggaagaaaacggaaacgaagtcca

SEQ ID NO: 101739 - DNA, 1478 bp, Oryza sativa
  Clone ID: PAT_MRT4530_99330C.1
ttttattacagagtaggagtacagttatgttgggctgcggacagattccgagctcacaactgcattacaaaaggaaaagcggaagccaagacttggaccaatcatcacaggcgcgacttgggaactaggccgaaaccataaaactcatcgtaaccgacttgctcctggaagaactcctcgtcagcgggatccacatcatcttcttcagcgattgggggggattatttatatagagcatgggtgattactcagccaggggtgtcccattccacccatgtggtcgcagttgtcttatgttcggatgaaattccaaggaaacagtccttaagtgcaagagcgggaaaccgtactcccgcctcttggctctccgtgggccgcgtgcacgcgagcggggacggagggagcggctgaccggggtcggcttgacccggtcttggccgagctggcaccgacgtggcgcctacgtggctgccacgcgggccggctggaggaagacgacgacgccggccggaacggacggcggacggcggcggcgagcgacggggtgatctacggcgaggcaggcgaaggcgagcacaccgggaggttgcacggaacgaggggagatgagccaacggctcggattcgccggagggagttcgacggcggcggattgtggcggcgaccaccggcgccgagagaagagggaaacggcgacgagacgactagggttcgattcatttacactagagcatctacgaagtctccggagtttgattctagcgccggattgggcggagctacgccgagcgaggccggcgacgagaggcgctatccgacggcgcgcggcgtgatcgctccggcctcgggccggtgaagaggaggaagacgtgcgcccggagtccccttcacgcgtccttcacacgcaccggctctcccggtgctttagcgacgaacggcggaggcgagatagaggggggcaatggtgcggtggagcgagggcgaaagggagagggaaaggaagggaggacgccttggatttataggggcgacaatgtcggtttgggagggaggaaccgacattgggtggtcaagccagcgagctggcgctccggctagcggccaaaacggcgacagggaggatgacgccggcggaggaagagagaaaatggaaaaagaagaaagaaagggggggcttgcctcttgcctatttgggaaaagaaggaagaaaagagagggcgacaaggcagtgggaggaggagctctgcctccaacccttggaagcatgccgcggaggtggcagggagggaggggagggagggagggagagagagagagagagagaaagatgggccgagagggaaatcggcccaccgaacctgagggaggcaaactagacttttgcggaggaattcgatttgggaaggaattggattcgggatttgagatctggaattggcacggagactgactacaagcaaagaaacaattttcgcaaa

SEQ ID NO: 101740 - DNA, 561 bp, Oryza sativa
  Clone ID: PAT_MRT4530_99331C.1
atggcgctcctccatcttcaacgacagtcgccgaaggctctgctccctcttcggcggccatatccgccccgcaacgataagagcccagggcccaagacacagctagggatgcggtcgggcacgacgggcacggttggggatgcatctacagaagcctgtgaggcttgctcacgccggttgctgctgaccggtggagtagcacactggctgctactggccgaagggaggacgttgccggccggaggggagctcggcggctcggcacagaggaggcagtggcgaccggaggaggcgaggcgacaacggctagagggtggagccgccggcgacgacctcccgtggcgcccctcccagcggcgacctgacctcccgcgcggacctcccgtggtgcctatggcacccctcccggcggtgacctcccatggcacggtggcgcccctcccatgtccgcctagagcccctcccggcggcgacctcccgcgtcagcttggcggctgtggaggagaaaagtcgaagagaaggagatgcggcggctatgaagggaagagaagaaaattctag

SEQ ID NO: 101741 - DNA, 655 bp, Oryza sativa
  Clone ID: PAT_MRT4530_99332C.1
gagccgccgcatctccttctcttcgagttttctcctccacagccgccaagctgacgcgggaggtcgccgccgggaggggctctaggcggacatgggaggggcgccaccgtgccatgggaggtcaccgccgggaggggtgccataggcacaacgggaggtccgcgcgggaggtcaggtcgccgctgggaggggcgccacgggaggtcgtcgccggcggctccaccctctagccgttgtcgcctcgcctcctacccgtctgcgcgagctcccctccggccggtcatcaacgtctccaaccgcgcctccctccagtcgcgcctcccacctccggtcgccactgcctcctctgtgccgagccgccgagctcccctccggccggcaacgtcctcccctgcgctgagcaagtgatttgaaccaatggctacttcggccagtagcagccagtgtgctactccaccggtcagcagcaaccggcgtgagcaagcctcacaggcttctgtagatgcatccccaactgcaaaacaagctgaataggaagaagaggaaacttgtgtaattgaagtttgttgattgtgtaattgtgctaaagtatgacatttgaagttgtcttattgttgaacttataatgtttgtattgttccaaaaaaaaaaaaaa

SEQ ID NO: 101742 - DNA, 333 bp, Oryza sativa
  Clone ID: PAT_MRT4530_99333C.1
ggacagaccaataaaaccgaagataatttccttgaactaagcaacagggcagagggttaataaaaaactgttttacacccatgggttaataatacagattctgattgggggcattaggtttgacattccacacaatacacataagatgacgcccgggtatgggatatatggtctctttaggttgcaatagctgagtgatcaaatggattagcatacaccagactgaaagattacggtaggggccataagaacattaccagcacaaacacaaaaaagcgttttcgtgtgctttgggaagcttcgatagtgtcaggtatatggccggacagatcc

SEQ ID NO: 101743 - DNA, 291 bp, Oryza sativa
  Clone ID: PAT_MRT4530_99334C.1
atggaacgcccttccactcccgactccggttgggtcatcctcagcaccatcgccgtcgccggccgccgccacagcaataatggtagcaccgccattaattggcaccaccaggaacggaaacaccatcgatcgagctccgacatgaaccccgccctgttcccgaccatcgtctgcgaggccggcgacgccctcctcccctctgtcaacgtgcggtccgaaccctactgtcgctccgacgaccgcgcgactacttcgtataccgcatgccgacgcggcgacgcctgcccgtag

SEQ ID NO: 101744 - DNA, 319 bp, Oryza sativa
  Clone ID: PAT_MRT4530_99335C.1
ggaaaaaagggaaaaacaattttgaaagaaagggattgaggcctatttcgaaggccaaaaaagcaacatggatcgggtccccctaacagaaaaagggggaaacagggaacttttataggcaggcagttaccaacaggggaggaaatgctccgggaaaaaatactacccccaaaccccctaaaagttatgctaccagggcaacaacgggtttaccaggggggaagctggggggttcttaacccccagagacctcccgaaagggtgggaaaacaacacctaccactgaacattaaaggcggagaaggaggcctgggcattg
